United States Patent Application Publication US 2025/0352577 A1 - sequence listing, part 2

SEQ ID NO: 10028 - protein, 26 aa, Artificial Sequence
  Synthetic polypeptide
TVFPFPKIKGLLEPGVGRTASVSPGN

SEQ ID NO: 10029 - protein, 26 aa, Artificial Sequence
  Synthetic polypeptide
TVFPFPKIKGLLEPGVGRTASVSPGN

SEQ ID NO: 10030 - protein, 26 aa, Artificial Sequence
  Synthetic polypeptide
TVFPFPKIKGLLEPGVGRTASVSPGN

SEQ ID NO: 10031 - protein, 26 aa, Artificial Sequence
  Synthetic polypeptide
TVFPFPKIKGLLEPGVGRTASVSPGN

SEQ ID NO: 10032 - protein, 26 aa, Artificial Sequence
  Synthetic polypeptide
TVFPFPKIKGLLEPGVGRTASVSPGN

SEQ ID NO: 10033 - protein, 26 aa, Artificial Sequence
  Synthetic polypeptide
TVFPFPKIKGLLEPGVGRTASVSPGN

SEQ ID NO: 10034 - protein, 26 aa, Artificial Sequence
  Synthetic polypeptide
TVFPFPKIKGLLEPGVGRTASVSPGN

SEQ ID NO: 10035 - protein, 26 aa, Artificial Sequence
  Synthetic polypeptide
TVFPFPKIKGLLEPGVGRTASVSPGN

SEQ ID NO: 10036 - protein, 560 aa, Artificial Sequence
  Synthetic polypeptide
KDCWSQVWGGQPVYPQETDDACIFPDGGPCPSGSWSQKRSFVYVWKTWGQYWQVLGGPVSGLSIGTGRAMLGTHTMEVTVYHRRGSRSYVPLAHSSSAFTITDQVPFSVSVSQLRALDGGNKHFLRNQPLTFALQLHDPSGYLAEADLSYTWDFGDSSGTLISRALVVTHTYLEPGPVTAQVVLQAAIPLTSCGSSPVPGTTDGHRPTAEAPNTTAGQVPTTEVVGTTPGQAPTAEPSGTTSVQVPTTEVISTAPVQMPTAESTGMTPEKVPVSEVMGTTLAEMSTPEATGMTPAEVSIVVLSGTTAAQVTTTEWVETTARELPIPEPEGPDASSIMSTESITGSLGPLLDGTATLRLVKRQVPLDCVLYRYGSFSVTLDIVQGIESAEILQAVPSGEGDAFELTVSCQGGLPKEACMEISSPGCQPPAQRLCQPVLPSPACQLVLHQILKGGSGTYCLNVSLADTNSLAVVSTQLIMPVPGILLTGQEAGLGQVPLIVGILLVLMAVVLASLIYRRRLMKQDFSVPQLPHSSSHWLRLPRIFCSCPIGENSPLLSGQQV

SEQ ID NO: 10037 - protein, 62 aa, Artificial Sequence
  Synthetic polypeptide
CVSISEDKRIVGARCGEDSQCIPRKLTMPASSLMVDLAHLALGLRREALFMSGRPGANTGKF

SEQ ID NO: 10038 - protein, 62 aa, Artificial Sequence; identical to SEQ ID NO: 10037
  Synthetic polypeptide

SEQ ID NO: 10039 - protein, 62 aa, Artificial Sequence; identical to SEQ ID NO: 10037
  Synthetic polypeptide

SEQ ID NO: 10040 - protein, 62 aa, Artificial Sequence; identical to SEQ ID NO: 10037
  Synthetic polypeptide

SEQ ID NO: 10041 - protein, 62 aa, Artificial Sequence; identical to SEQ ID NO: 10037
  Synthetic polypeptide

SEQ ID NO: 10042 - protein, 62 aa, Artificial Sequence; identical to SEQ ID NO: 10037
  Synthetic polypeptide

SEQ ID NO: 10043 - protein, 62 aa, Artificial Sequence; identical to SEQ ID NO: 10037
  Synthetic polypeptide

SEQ ID NO: 10044 - protein, 553 aa, Artificial Sequence
  Synthetic polypeptide
KDCWSQVWGGQPVYPQETDDACIFPDGGPCPSGSWSQKRSFVYVWKTWGQYWQVLGGPVSGLSIGTGRAMLGTHTMEVTVYHRRGSRSYVPLAHSSSAFTITDQVPFSVSVSQLRALDGGNKHFLRNQPLTFALQLHDPSGYLAEADLSYTWDFGDSSGTLISRALVVTHTYLEPGPVTAQVVLQAAIPLTSCGSSPVPGTTDGHRPTAEAPNTTAGQVPTTEVVGTTPGQAPTAEPSGTTSVQVPTTEVISTAPVQMPTAESTGMTPEKVPVSEVMGTTLAEMSTPEATGMTPAEVSIVVLSGTTAAQVTTTEWVETTARELPIPEPEGPDASSIMSTESITGSLGPLLDGTATLRLVKRQVPLDCVLYRYGSFSVTLDIVQGIESAEILQAVPSGEGDAFELTVSCQGGLPKEACMEISSPGCQPPAQRLCQPVLPSPACQLVLHQILKGGSGTYCLNVSLADTNSLAVVSTQLIMPGQEAGLGQVPLIVGILLVLMAVVLASLIYRRRLMKQDFSVPQLPHSSSHWLRLPRIFCSCPIGENSPLLSGQQV

SEQ ID NO: 10045 - protein, 553 aa, Artificial Sequence; identical to SEQ ID NO: 10044
  Synthetic polypeptide

SEQ ID NO: 10046 - protein, 553 aa, Artificial Sequence; identical to SEQ ID NO: 10044
  Synthetic polypeptide

SEQ ID NO: 10047 - protein, 553 aa, Artificial Sequence; identical to SEQ ID NO: 10044
  Synthetic polypeptide

SEQ ID NO: 10048 - protein, 553 aa, Artificial Sequence; identical to SEQ ID NO: 10044
  Synthetic polypeptide

SEQ ID NO: 10049 - protein, 219 aa, Artificial Sequence
  Synthetic polypeptide
KDCWSQVWGGQPVYPQETDDACIFPDGGPCPSGSWSQKRSFVYVWKTWEGIESAEILQAVPSGEGDAFELTVSCQGGLPKEACMEISSPGCQPPAQRLCQPVLPSPACQLVLHQILKGGSGTYCLNVSLADTNSLAVVSTQLIMPGQEAGLGQVPLIVGILLVLMAVVLASLIYRRRLMKQDFSVPQLPHSSSHWLRLPRIFCSCPIGENSPLLSGQQV

SEQ ID NO: 10050 - protein, 77 aa, Artificial Sequence
  Synthetic polypeptide
CVSISEDKRIVGARCGEDSQCIPRKLTMPASSLMVDLAHLALGLRREALFMSGRPGRVLKVPRSCRLCRPVRGMHLS

SEQ ID NO: 10051 - protein, 188 aa, Artificial Sequence
  Synthetic polypeptide
KDCWSQVWGGQPVYPQETDDACIFPDGGPCPSGSWSQKRSFVYVWKTWVPGTTDGHRPTAEAPNTTAGQVPTTEVVGTTPGQAPTAEPSGTTSVQVPTTEVISTAPVQMPTAESTAAQVTTTEWVETTARELPIPEPEGPDASSIMSTESITGSLGPLLDGTATLRLVKRQVPLDCVLYRYGSFSVTL

SEQ ID NO: 10052 - protein, 109 aa, Artificial Sequence
  Synthetic polypeptide
CVSISEDKRIVGARCGEDSQCIPRKLTMPASSLMVDLAHLALGLRREALFMSGRPGFQAPQMGTGQLQRPLTPQLAKCLLQKLWVLHLVRRQLQSPLEPHLCRCQPLKS

SEQ ID NO: 10053 - protein, 236 aa, Artificial Sequence
  Synthetic polypeptide
KDCWSQVWGGQPVYPQETDDACIFPDGGPCPSGSWSQKRSFVYVWKTWDQVPFSVSVSQLRALDGGNKHFLRNQPLTFALQLHDPSGYLAEADLSYTWDFGDSSGTLISRALVVTHTYLEPGPVTAQVVLQAAIPLTSCGSSPVPGTTDGHRPTAEAPNTTAGQVPTTEVVGTTPGQAPTAEPSGTTSVQVPTTEVISTAPVQMPTAESTGMTPEKVPVSEVMGTTLAEMSTPEAT

SEQ ID NO: 10054 - protein, 62 aa, Artificial Sequence
  Synthetic polypeptide
CVSISEDKRIVGARCGEDSQCIPRKLTMPASSLMVDLAHLALGLRREALFMSGRPGTRCLSP

SEQ ID NO: 10055 - protein, 240 aa, Artificial Sequence
  Synthetic polypeptide
KDCWSQVWGGQPVYPQETDDACIFPDGGPCPSGSWSQKRSFVYVWKTWGQYWQVLGGPVSGLSIGTGRAMLGTHTMEVTVYHRRGSRSYVPLAHSSSAFTITDQVPFSVSVSQLRALDGGNKHFLRNQPLTFALQLHDPSGYLAEADLSYTWDFGDSSGTLISRALVVTHTYLEPGPVTAQVVLQAAIPLTSCGSSPVPGTTDGHRPTAEAPNTTAGQVPTTEVVGTTPGQAPTAEPSGT

SEQ ID NO: 10056 - protein, 43 aa, Artificial Sequence
  Synthetic polypeptide
KDCWSQVWGGQPVYPQETDDACIFPDGGPCPSGSWSQKRSFVY

SEQ ID NO: 10057 - protein, 50 aa, Artificial Sequence
  Synthetic polypeptide
CVSISEDKRIVGARCGEDSQCIPRKLTMPASSLMVDLAHLALGLRREALF

SEQ ID NO: 10058 - protein, 23 aa, Artificial Sequence
  Synthetic polypeptide
KDCWSQVWGGQPVYPQETDDACI

SEQ ID NO: 10059 - protein, 31 aa, Artificial Sequence
  Synthetic polypeptide
CVSISEDKRIVGARCGEDSQCIPRKLTMPAS

SEQ ID NO: 10060 - protein, 66 aa, Artificial Sequence
  Synthetic polypeptide
EFEAAVSDERATARRYPETRTGLVSQGNSEPKPGTGSCIQSGQKPRDLTAGEVVKCPSRSVMMGLH

SEQ ID NO: 10061 - protein, 66 aa, Artificial Sequence; identical to SEQ ID NO: 10060
  Synthetic polypeptide

SEQ ID NO: 10062 - protein, 66 aa, Artificial Sequence; identical to SEQ ID NO: 10060
  Synthetic polypeptide

SEQ ID NO: 10063 - protein, 66 aa, Artificial Sequence; identical to SEQ ID NO: 10060
  Synthetic polypeptide

SEQ ID NO: 10064 - protein, 66 aa, Artificial Sequence; identical to SEQ ID NO: 10060
  Synthetic polypeptide

SEQ ID NO: 10065 - protein, 66 aa, Artificial Sequence; identical to SEQ ID NO: 10060
  Synthetic polypeptide

SEQ ID NO: 10066 - protein, 66 aa, Artificial Sequence; identical to SEQ ID NO: 10060
  Synthetic polypeptide

SEQ ID NO: 10067 - protein, 66 aa, Artificial Sequence; identical to SEQ ID NO: 10060
  Synthetic polypeptide

SEQ ID NO: 10068 - protein, 66 aa, Artificial Sequence; identical to SEQ ID NO: 10060
  Synthetic polypeptide

SEQ ID NO: 10069 - protein, 66 aa, Artificial Sequence; identical to SEQ ID NO: 10060
  Synthetic polypeptide

SEQ ID NO: 10070 - protein, 41 aa, Artificial Sequence
  Synthetic polypeptide
VMNVPLHAGTQKPGLAWCLKATQNQSLEQAAVSRVDRSPET

SEQ ID NO: 10071 - protein, 41 aa, Artificial Sequence; identical to SEQ ID NO: 10070
  Synthetic polypeptide

SEQ ID NO: 10072 - protein, 41 aa, Artificial Sequence; identical to SEQ ID NO: 10070
  Synthetic polypeptide

SEQ ID NO: 10073 - protein, 41 aa, Artificial Sequence; identical to SEQ ID NO: 10070
  Synthetic polypeptide

SEQ ID NO: 10074 - protein, 41 aa, Artificial Sequence; identical to SEQ ID NO: 10070
  Synthetic polypeptide

SEQ ID NO: 10075 - protein, 41 aa, Artificial Sequence; identical to SEQ ID NO: 10070
  Synthetic polypeptide

SEQ ID NO: 10076 - protein, 41 aa, Artificial Sequence; identical to SEQ ID NO: 10070
  Synthetic polypeptide

SEQ ID NO: 10077 - protein, 41 aa, Artificial Sequence; identical to SEQ ID NO: 10070
  Synthetic polypeptide

SEQ ID NO: 10078 - protein, 41 aa, Artificial Sequence; identical to SEQ ID NO: 10070
  Synthetic polypeptide

SEQ ID NO: 10079 - protein, 41 aa, Artificial Sequence; identical to SEQ ID NO: 10070
  Synthetic polypeptide

SEQ ID NO: 10080 - protein, 41 aa, Artificial Sequence; identical to SEQ ID NO: 10070
  Synthetic polypeptide

SEQ ID NO: 10081 - protein, 649 aa, Artificial Sequence
  Synthetic polypeptide
TCHCTQVPRNQDWLGVSRQLRTKAWNRQLYPEWTEAQRLDCWRGGQVSLKVSNDGPTLIGANASFSIALNFPGSQKVLPDGQVIWVNNTIINGSQVWGGQPVYPQETDDACIFPDGGPCPSGSWSQKRSFVYVWKTWGQYWQVLGGPVSGLSIGTGRAMLGTHTMEVTVYHRRGSRSYVPLAHSSSAFTITDQVPFSVSVSQLRALDGGNKHFLRNQPLTFALQLHDPSGYLAEADLSYTWDFGDSSGTLISRALVVTHTYLEPGPVTAQVVLQAAIPLTSCGSSPVPGTTDGHRPTAEAPNTTAGQVPTTEVVGTTPGQAPTAEPSGTTSVQVPTTEVISTAPVQMPTAESTGMTPEKVPVSEVMGTTLAEMSTPEATGMTPAEVSIVVLSGTTAAQVTTTEWVETTARELPIPEPEGPDASSIMSTESITGSLGPLLDGTATLRLVKRQVPLDCVLYRYGSFSVTLDIVQGIESAEILQAVPSGEGDAFELTVSCQGGLPKEACMEISSPGCQPPAQRLCQPVLPSPACQLVLHQILKGGSGTYCLNVSLADTNSLAVVSTQLIMPVPGILLTGQEAGLGQVPLIVGILLVLMAVVLASLIYRRRLMKQDFSVPQLPHSSSHWLRLPRIFCSCPIGENSPLLSGQQV

SEQ ID NO: 10082 - protein, 642 aa, Artificial Sequence
  Synthetic polypeptide
TCHCTQVPRNQDWLGVSRQLRTKAWNRQLYPEWTEAQRLDCWRGGQVSLKVSNDGPTLIGANASFSIALNFPGSQKVLPDGQVIWVNNTIINGSQVWGGQPVYPQETDDACIFPDGGPCPSGSWSQKRSFVYVWKTWGQYWQVLGGPVSGLSIGTGRAMLGTHTMEVTVYHRRGSRSYVPLAHSSSAFTITDQVPFSVSVSQLRALDGGNKHFLRNQPLTFALQLHDPSGYLAEADLSYTWDFGDSSGTLISRALVVTHTYLEPGPVTAQVVLQAAIPLTSCGSSPVPGTTDGHRPTAEAPNTTAGQVPTTEVVGTTPGQAPTAEPSGTTSVQVPTTEVISTAPVQMPTAESTGMTPEKVPVSEVMGTTLAEMSTPEATGMTPAEVSIVVLSGTTAAQVTTTEWVETTARELPIPEPEGPDASSIMSTESITGSLGPLLDGTATLRLVKRQVPLDCVLYRYGSFSVTLDIVQGIESAEILQAVPSGEGDAFELTVSCQGGLPKEACMEISSPGCQPPAQRLCQPVLPSPACQLVLHQILKGGSGTYCLNVSLADTNSLAVVSTQLIMPGQEAGLGQVPLIVGILLVLMAVVLASLIYRRRLMKQDFSVPQLPHSSSHWLRLPRIFCSCPIGENSPLLSGQQV

SEQ ID NO: 10083 - protein, 642 aa, Artificial Sequence; identical to SEQ ID NO: 10082
  Synthetic polypeptide

SEQ ID NO: 10084 - protein, 642 aa, Artificial Sequence; identical to SEQ ID NO: 10082
  Synthetic polypeptide

SEQ ID NO: 10085 - protein, 649 aa, Artificial Sequence
  Synthetic polypeptide
TCHCTQVPRNQDWLGVSRQLRTKAWNRQLYPEWTEAQRLDCWRGGQVSLKVSNDGPTLIGANASFSIALNFPGSQKVLPDGQVIWVNNTIINGDQVWGGQPVYPQETDDACIFPDGGPCPSGSWSQKRSFVYVWKTWGQYWQVLGGPVSGLSIGTGRAMLGTHTMEVTVYHRRGSRSYVPLAHSSSAFTITDQVPFSVSVSQLRALDGGNKHFLRNQPLTFALQLHDPSGYLAEADLSYTWDFGDSSGTLISRALVVTHTYLEPGPVTAQVVLQAAIPLTSCGSSPVPGTTDGHRPTAEAPNTTAGQVPTTEVVGTTPGQAPTAEPSGTTSVQVPTTEVISTAPVQMPTAESTGMTPEKVPVSEVMGTTLAEMSTPEATGMTPAEVSIVVLSGTTAAQVTTTEWVETTARELPIPEPEGPDASSIMSTESITGSLGPLLDGTATLRLVKRQVPLDCVLYRYGSFSVTLDIVQGIESAEILQAVPSGEGDAFELTVSCQGGLPKEACMEISSPGCQPPAQRLCQPVLPSPACQLVLHQILKGGSGTYCLNVSLADTNSLAVVSTQLIMPVPGILLTGQEAGLGQVPLIVGILLVLMAVVLASLIYRRRLMKQDFSVPQLPHSSSHWLRLPRIFCSCPIGENSPLLSGQQV

SEQ ID NO: 10086 - protein, 607 aa, Artificial Sequence
  Synthetic polypeptide
TCHCTQVPRNQDWLGVSRQLRTKAWNRQLYPEWTEAQRLDCWRGGQVSLKVSNDGPTLIGANASFSIALNFPGSQKVLPDGQVIWVNNTIINGDQVWGGQPVYPQETDDACIFPDGGPCPSGSWSQKRSFVYVWKTWGQYWQVLGGPVSGLSIGTGRAMLGTHTMEVTVYHRRGSRSYVPLAHSSSAFTITDQVPFSVSVSQLRALDGGNKHFLRNQPLTFALQLHDPSGYLAEADLSYTWDFGDSSGTLISRALVVTHTYLEPGPVTAQVVLQAAIPLTSCGSSPVPGTTDGHRPTAEAPNTTAGQVPTTEVVGTTPGQAPTAEPSGTTSVQVPTTEVISTAPVQMPTAESTAAQVTTTEWVETTARELPIPEPEGPDASSIMSTESITGSLGPLLDGTATLRLVKRQVPLDCVLYRYGSFSVTLDIVQGIESAEILQAVPSGEGDAFELTVSCQGGLPKEACMEISSPGCQPPAQRLCQPVLPSPACQLVLHQILKGGSGTYCLNVSLADTNSLAVVSTQLIMPVPGILLTGQEAGLGQVPLIVGILLVLMAVVLASLIYRRRLMKQDFSVPQLPHSSSHWLRLPRIFCSCPIGENSPLLSGQQV

SEQ ID NO: 10087 - protein, 277 aa, Artificial Sequence
  Synthetic polypeptide
TCHCTQVPRNQDWLGVSRQLRTKAWNRQLYPEWTEAQRLDCWRGGQVSLKVSNDGPTLIGANASFSIALNFPGSQKVLPDGQVIWVNNTIINGSQVWGGQPVYPQETDDACIFPDGGPCPSGSWSQKRSFVYVWKTWVPGTTDGHRPTAEAPNTTAGQVPTTEVVGTTPGQAPTAEPSGTTSVQVPTTEVISTAPVQMPTAESTAAQVTTTEWVETTARELPIPEPEGPDASSIMSTESITGSLGPLLDGTATLRLVKRQVPLDCVLYRYGSFSVTL

SEQ ID NO: 10088 - protein, 325 aa, Artificial Sequence
  Synthetic polypeptide
TCHCTQVPRNQDWLGVSRQLRTKAWNRQLYPEWTEAQRLDCWRGGQVSLKVSNDGPTLIGANASFSIALNFPGSQKVLPDGQVIWVNNTIINGSQVWGGQPVYPQETDDACIFPDGGPCPSGSWSQKRSFVYVWKTWDQVPFSVSVSQLRALDGGNKHFLRNQPLTFALQLHDPSGYLAEADLSYTWDFGDSSGTLISRALVVTHTYLEPGPVTAQVVLQAAIPLTSCGSSPVPGTTDGHRPTAEAPNTTAGQVPTTEVVGTTPGQAPTAEPSGTTSVQVPTTEVISTAPVQMPTAESTGMTPEKVPVSEVMGTTLAEMSTPEAT

SEQ ID NO: 10089 - protein, 103 aa, Artificial Sequence
  Synthetic polypeptide
EFEAAVSDERATARRYPETRTGLVSQGNSEPKPGTGSCIQSGQKPRDLTAGEGARCGEDSQCIPRKLTMPASSLMVDLAHLALGLRREALFMSGRPGANTGKF

SEQ ID NO: 10090 - protein, 280 aa, Artificial Sequence
  Synthetic polypeptide
TCHCTQVPRNQDWLGVSRQLRTKAWNRQLYPEWTEAQRLDCWRGSQVWGGQPVYPQETDDACIFPDGGPCPSGSWSQKRSFVYVWKTWGQYWQVLGGPVSGLSIGTGRAMLGTHTMEVTVYHRRGSRSYVPLAHSSSAFTITDQVPFSVSVSQLRALDGGNKHFLRNQPLTFALQLHDPSGYLAEADLSYTWDFGDSSGTLISRALVVTHTYLEPGPVTAQVVLQAAIPLTSCGSSPVPGTTDGHRPTAEAPNTTAGQVPTTEVVGTTPGQAPTAEPSGT

SEQ ID NO: 10091 - protein, 132 aa, Artificial Sequence
  Synthetic polypeptide
TCHCTQVPRNQDWLGVSRQLRTKAWNRQLYPEWTEAQRLDCWRGGQVSLKVSNDGPTLIGANASFSIALNFPGSQKVLPDGQVIWVNNTIINGSQVWGGQPVYPQETDDACIFPDGGPCPSGSWSQKRSFVY

SEQ ID NO: 10092 - protein, 112 aa, Artificial Sequence
  Synthetic polypeptide
TCHCTQVPRNQDWLGVSRQLRTKAWNRQLYPEWTEAQRLDCWRGGQVSLKVSNDGPTLIGANASFSIALNFPGSQKVLPDGQVIWVNNTIINGSQVWGGQPVYPQETDDACI

SEQ ID NO: 10093 - protein, 665 aa, Artificial Sequence
  Synthetic polypeptide
GRAPWLTPVIPALWEAEAGGSRVPRNQDWLGVSRQLRTKAWNRQLYPEWTEAQRLDCWRGGQVSLKVSNDGPTLIGANASFSIALNFPGSQKVLPDGQVIWVNNTIINGSQVWGGQPVYPQETDDACIFPDGGPCPSGSWSQKRSFVYVWKTWGQYWQVLGGPVSGLSIGTGRAMLGTHTMEVTVYHRRGSRSYVPLAHSSSAFTITDQVPFSVSVSQLRALDGGNKHFLRNQPLTFALQLHDPSGYLAEADLSYTWDFGDSSGTLISRALVVTHTYLEPGPVTAQVVLQAAIPLTSCGSSPVPGTTDGHRPTAEAPNTTAGQVPTTEVVGTTPGQAPTAEPSGTTSVQVPTTEVISTAPVQMPTAESTGMTPEKVPVSEVMGTTLAEMSTPEATGMTPAEVSIVVLSGTTAAQVTTTEWVETTARELPIPEPEGPDASSIMSTESITGSLGPLLDGTATLRLVKRQVPLDCVLYRYGSFSVTLDIVQGIESAEILQAVPSGEGDAFELTVSCQGGLPKEACMEISSPGCQPPAQRLCQPVLPSPACQLVLHQILKGGSGTYCLNVSLADTNSLAVVSTQLIMPVPGILLTGQEAGLGQVPLIVGILLVLMAVVLASLIYRRRLMKQDFSVPQLPHSSSHWLRLPRIFCSCPIGENSPLLSGQQV

SEQ ID NO: 10094 - protein, 64 aa, Artificial Sequence
  Synthetic polypeptide
SQHFGRLKQVDHEYPETRTGLVSQGNSEPKPGTGSCIQSGQKPRDLTAGEVVKCPSRSVMMGLH

SEQ ID NO: 10095 - protein, 64 aa, Artificial Sequence; identical to SEQ ID NO: 10094
  Synthetic polypeptide

SEQ ID NO: 10096 - protein, 64 aa, Artificial Sequence; identical to SEQ ID NO: 10094
  Synthetic polypeptide

SEQ ID NO: 10097 - protein, 64 aa, Artificial Sequence; identical to SEQ ID NO: 10094
  Synthetic polypeptide

SEQ ID NO: 10098 - protein, 64 aa, Artificial Sequence; identical to SEQ ID NO: 10094
  Synthetic polypeptide

SEQ ID NO: 10099 - protein, 64 aa, Artificial Sequence; identical to SEQ ID NO: 10094
  Synthetic polypeptide

SEQ ID NO: 10100 - protein, 64 aa, Artificial Sequence; identical to SEQ ID NO: 10094
  Synthetic polypeptide

SEQ ID NO: 10101 - protein, 64 aa, Artificial Sequence; identical to SEQ ID NO: 10094
  Synthetic polypeptide

SEQ ID NO: 10102 - protein, 64 aa, Artificial Sequence; identical to SEQ ID NO: 10094
  Synthetic polypeptide

SEQ ID NO: 10103 - protein, 64 aa, Artificial Sequence; identical to SEQ ID NO: 10094
  Synthetic polypeptide

SEQ ID NO: 10104 - protein, 38 aa, Artificial Sequence
  Synthetic polypeptide
SRWITSTQKPGLAWCLKATQNQSLEQAAVSRVDRSPET

SEQ ID NO: 10105 - protein, 38 aa, Artificial Sequence; identical to SEQ ID NO: 10104
  Synthetic polypeptide

SEQ ID NO: 10106 - protein, 38 aa, Artificial Sequence; identical to SEQ ID NO: 10104
  Synthetic polypeptide

SEQ ID NO: 10107 - protein, 38 aa, Artificial Sequence; identical to SEQ ID NO: 10104
  Synthetic polypeptide

SEQ ID NO: 10108 - protein, 38 aa, Artificial Sequence; identical to SEQ ID NO: 10104
  Synthetic polypeptide

SEQ ID NO: 10109 - protein, 38 aa, Artificial Sequence; identical to SEQ ID NO: 10104
  Synthetic polypeptide

SEQ ID NO: 10110 - protein, 38 aa, Artificial Sequence; identical to SEQ ID NO: 10104
  Synthetic polypeptide

SEQ ID NO: 10111 - protein, 38 aa, Artificial Sequence; identical to SEQ ID NO: 10104
  Synthetic polypeptide

SEQ ID NO: 10112 - protein, 38 aa, Artificial Sequence; identical to SEQ ID NO: 10104
  Synthetic polypeptide

SEQ ID NO: 10113 - protein, 38 aa, Artificial Sequence; identical to SEQ ID NO: 10104
  Synthetic polypeptide

SEQ ID NO: 10114 - protein, 38 aa, Artificial Sequence; identical to SEQ ID NO: 10104
  Synthetic polypeptide

SEQ ID NO: 10115 - protein, 658 aa, Artificial Sequence
  Synthetic polypeptide
GRAPWLTPVIPALWEAEAGGSRVPRNQDWLGVSRQLRTKAWNRQLYPEWTEAQRLDCWRGGQVSLKVSNDGPTLIGANASFSIALNFPGSQKVLPDGQVIWVNNTIINGSQVWGGQPVYPQETDDACIFPDGGPCPSGSWSQKRSFVYVWKTWGQYWQVLGGPVSGLSIGTGRAMLGTHTMEVTVYHRRGSRSYVPLAHSSSAFTITDQVPFSVSVSQLRALDGGNKHFLRNQPLTFALQLHDPSGYLAEADLSYTWDFGDSSGTLISRALVVTHTYLEPGPVTAQVVLQAAIPLTSCGSSPVPGTTDGHRPTAEAPNTTAGQVPTTEVVGTTPGQAPTAEPSGTTSVQVPTTEVISTAPVQMPTAESTGMTPEKVPVSEVMGTTLAEMSTPEATGMTPAEVSIVVLSGTTAAQVTTTEWVETTARELPIPEPEGPDASSIMSTESITGSLGPLLDGTATLRLVKRQVPLDCVLYRYGSFSVTLDIVQGIESAEILQAVPSGEGDAFELTVSCQGGLPKEACMEISSPGCQPPAQRLCQPVLPSPACQLVLHQILKGGSGTYCLNVSLADTNSLAVVSTQLIMPGQEAGLGQVPLIVGILLVLMAVVLASLIYRRRLMKQDFSVPQLPHSSSHWLRLPRIFCSCPIGENSPLLSGQQV

SEQ ID NO: 10116 - protein, 658 aa, Artificial Sequence; identical to SEQ ID NO: 10115
  Synthetic polypeptide

SEQ ID NO: 10117 - protein, 658 aa, Artificial Sequence; identical to SEQ ID NO: 10115
  Synthetic polypeptide

SEQ ID NO: 10118 - protein, 665 aa, Artificial Sequence
  Synthetic polypeptide
GRAPWLTPVIPALWEAEAGGSRVPRNQDWLGVSRQLRTKAWNRQLYPEWTEAQRLDCWRGGQVSLKVSNDGPTLIGANASFSIALNFPGSQKVLPDGQVIWVNNTIINGDQVWGGQPVYPQETDDACIFPDGGPCPSGSWSQKRSFVYVWKTWGQYWQVLGGPVSGLSIGTGRAMLGTHTMEVTVYHRRGSRSYVPLAHSSSAFTITDQVPFSVSVSQLRALDGGNKHFLRNQPLTFALQLHDPSGYLAEADLSYTWDFGDSSGTLISRALVVTHTYLEPGPVTAQVVLQAAIPLTSCGSSPVPGTTDGHRPTAEAPNTTAGQVPTTEVVGTTPGQAPTAEPSGTTSVQVPTTEVISTAPVQMPTAESTGMTPEKVPVSEVMGTTLAEMSTPEATGMTPAEVSIVVLSGTTAAQVTTTEWVETTARELPIPEPEGPDASSIMSTESITGSLGPLLDGTATLRLVKRQVPLDCVLYRYGSFSVTLDIVQGIESAEILQAVPSGEGDAFELTVSCQGGLPKEACMEISSPGCQPPAQRLCQPVLPSPACQLVLHQILKGGSGTYCLNVSLADTNSLAVVSTQLIMPVPGILLTGQEAGLGQVPLIVGILLVLMAVVLASLIYRRRLMKQDFSVPQLPHSSSHWLRLPRIFCSCPIGENSPLLSGQQV

SEQ ID NO: 10119 - protein, 623 aa, Artificial Sequence
  Synthetic polypeptide
GRAPWLTPVIPALWEAEAGGSRVPRNQDWLGVSRQLRTKAWNRQLYPEWTEAQRLDCWRGGQVSLKVSNDGPTLIGANASFSIALNFPGSQKVLPDGQVIWVNNTIINGDQVWGGQPVYPQETDDACIFPDGGPCPSGSWSQKRSFVYVWKTWGQYWQVLGGPVSGLSIGTGRAMLGTHTMEVTVYHRRGSRSYVPLAHSSSAFTITDQVPFSVSVSQLRALDGGNKHFLRNQPLTFALQLHDPSGYLAEADLSYTWDFGDSSGTLISRALVVTHTYLEPGPVTAQVVLQAAIPLTSCGSSPVPGTTDGHRPTAEAPNTTAGQVPTTEVVGTTPGQAPTAEPSGTTSVQVPTTEVISTAPVQMPTAESTAAQVTTTEWVETTARELPIPEPEGPDASSIMSTESITGSLGPLLDGTATLRLVKRQVPLDCVLYRYGSFSVTLDIVQGIESAEILQAVPSGEGDAFELTVSCQGGLPKEACMEISSPGCQPPAQRLCQPVLPSPACQLVLHQILKGGSGTYCLNVSLADTNSLAVVSTQLIMPVPGILLTGQEAGLGQVPLIVGILLVLMAVVLASLIYRRRLMKQDFSVPQLPHSSSHWLRLPRIFCSCPIGENSPLLSGQQV

SEQ ID NO: 10120 - protein, 293 aa, Artificial Sequence
  Synthetic polypeptide
GRAPWLTPVIPALWEAEAGGSRVPRNQDWLGVSRQLRTKAWNRQLYPEWTEAQRLDCWRGGQVSLKVSNDGPTLIGANASFSIALNFPGSQKVLPDGQVIWVNNTIINGSQVWGGQPVYPQETDDACIFPDGGPCPSGSWSQKRSFVYVWKTWVPGTTDGHRPTAEAPNTTAGQVPTTEVVGTTPGQAPTAEPSGTTSVQVPTTEVISTAPVQMPTAESTAAQVTTTEWVETTARELPIPEPEGPDASSIMSTESITGSLGPLLDGTATLRLVKRQVPLDCVLYRYGSFSVTL

SEQ ID NO: 10121 - protein, 341 aa, Artificial Sequence
  Synthetic polypeptide
GRAPWLTPVIPALWEAEAGGSRVPRNQDWLGVSRQLRTKAWNRQLYPEWTEAQRLDCWRGGQVSLKVSNDGPTLIGANASFSIALNFPGSQKVLPDGQVIWVNNTIINGSQVWGGQPVYPQETDDACIFPDGGPCPSGSWSQKRSFVYVWKTWDQVPFSVSVSQLRALDGGNKHFLRNQPLTFALQLHDPSGYLAEADLSYTWDFGDSSGTLISRALVVTHTYLEPGPVTAQVVLQAAIPLTSCGSSPVPGTTDGHRPTAEAPNTTAGQVPTTEVVGTTPGQAPTAEPSGTTSVQVPTTEVISTAPVQMPTAESTGMTPEKVPVSEVMGTTLAEMSTPEAT

SEQ ID NO: 10122 - protein, 296 aa, Artificial Sequence
  Synthetic polypeptide
GRAPWLTPVIPALWEAEAGGSRVPRNQDWLGVSRQLRTKAWNRQLYPEWTEAQRLDCWRGSQVWGGQPVYPQETDDACIFPDGGPCPSGSWSQKRSFVYVWKTWGQYWQVLGGPVSGLSIGTGRAMLGTHTMEVTVYHRRGSRSYVPLAHSSSAFTITDQVPFSVSVSQLRALDGGNKHFLRNQPLTFALQLHDPSGYLAEADLSYTWDFGDSSGTLISRALVVTHTYLEPGPVTAQVVLQAAIPLTSCGSSPVPGTTDGHRPTAEAPNTTAGQVPTTEVVGTTPGQAPTAEPSGT

SEQ ID NO: 10123 - protein, 101 aa, Artificial Sequence
  Synthetic polypeptide
SQHFGRLKQVDHEYPETRTGLVSQGNSEPKPGTGSCIQSGQKPRDLTAGEGARCGEDSQCIPRKLTMPASSLMVDLAHLALGLRREALFMSGRPGANTGKF

SEQ ID NO: 10124 - protein, 148 aa, Artificial Sequence
  Synthetic polypeptide
GRAPWLTPVIPALWEAEAGGSRVPRNQDWLGVSRQLRTKAWNRQLYPEWTEAQRLDCWRGGQVSLKVSNDGPTLIGANASFSIALNFPGSQKVLPDGQVIWVNNTIINGSQVWGGQPVYPQETDDACIFPDGGPCPSGSWSQKRSFVY

SEQ ID NO: 10125 - protein, 128 aa, Artificial Sequence
  Synthetic polypeptide
GRAPWLTPVIPALWEAEAGGSRVPRNQDWLGVSRQLRTKAWNRQLYPEWTEAQRLDCWRGGQVSLKVSNDGPTLIGANASFSIALNFPGSQKVLPDGQVIWVNNTIINGSQVWGGQPVYPQETDDACI

SEQ ID NO: 10126 - protein, 119 aa, Artificial Sequence
  Synthetic polypeptide
GRVQWLTPIIPALWEAEVTRRALFPGDSEIDQLFRIFRTLGTPDEVVWPGVTSMPDYKPSFPKWARQDFSKVVPPLDEDGRSLLSQMLHYDPNKRISAKAALAHPFFQDVTKPVPHLRL

SEQ ID NO: 10127 - protein, 119 aa, Artificial Sequence; identical to SEQ ID NO: 10126
  Synthetic polypeptide

SEQ ID NO: 10128 - protein, 119 aa, Artificial Sequence; identical to SEQ ID NO: 10126
  Synthetic polypeptide

SEQ ID NO: 10129 - protein, 119 aa, Artificial Sequence; identical to SEQ ID NO: 10126
  Synthetic polypeptide

SEQ ID NO: 10130 - protein, 8 aa, Artificial Sequence
  Synthetic polypeptide
YQHFGRLR

SEQ ID NO: 10131 - protein, 8 aa, Artificial Sequence
  Synthetic polypeptide
YQHFGRLR

SEQ ID NO: 10132 - protein, 8 aa, Artificial Sequence
  Synthetic polypeptide
YQHFGRLR

SEQ ID NO: 10133 - protein, 8 aa, Artificial Sequence
  Synthetic polypeptide
YQHFGRLR

SEQ ID NO: 10134 - protein, 17 aa, Artificial Sequence
  Synthetic polypeptide
LAGEATGGVVGEDIAWQ

SEQ ID NO: 10135 - protein, 17 aa, Artificial Sequence
  Synthetic polypeptide
LAGEATGGVVGEDIAWQ

SEQ ID NO: 10136 - protein, 17 aa, Artificial Sequence
  Synthetic polypeptide
LAGEATGGVVGEDIAWQ

SEQ ID NO: 10137 - protein, 102 aa, Artificial Sequence
  Synthetic polypeptide
DPISTKNTEVNWLEKRLEEWLGRTLPGSDWTPNAQFITRSWLRDGLKPRCITRDLKWGTPVPLEGFEDKVFYVWFDATIGYLSITANYTDQWERWWKNPEQP

SEQ ID NO: 10138 - protein, 58 aa, Artificial Sequence
  Synthetic polypeptide
DQPGQHGETPSLQKIQKLTGWRSDWRSGWGGHCLAVTGHPMPSLSPVLGFGMASSHAA

SEQ ID NO: 10139 - protein, 58 aa, Artificial Sequence; identical to SEQ ID NO: 10138
  Synthetic polypeptide

SEQ ID NO: 10140 - protein, 58 aa, Artificial Sequence; identical to SEQ ID NO: 10138
  Synthetic polypeptide

SEQ ID NO: 10141 - protein, 456 aa, Artificial Sequence
  Synthetic polypeptide
DPISTKNTEVNWLEKRLEEWLGRTLPGSDWTPNAQFITRSWLRDGLKPRCITRDLKWGTPVPLEGFEDKVFYVWFDATIGYLSITANYTDQWERWWKNPEQVDLYQFMAKDNVPFHSLVFPCSALGAEDNYTLVSHLIATEYLNYEDGKFSKSRGVGVFGDMAQDTGIPADIWRFYLLYIRPEGQDSAFSWTDLLLKNNSELLNNLGNFINRAGMFVSKFFGGYVPEMVLTPDDQRLLAHVTLELQHYHQLLEKVRIRDALRSILTISRHGNQYIQVNEPWKRIKGSEADRQRAGTVTGLAVNIAALLSVMLQPYMPTVSATIQAQLQLPPPACSILLTNFLCTLPAGHQIGTVSPLFQKLENDQIESLRQRFGGGQAKTSPKPAVVETVTTAKPQQIQALMDEVTKQGNIVRELKAQKADKNEVAAEVAKLLDLKKQLAVAEGKPPEAPKGKKKK

SEQ ID NO: 10142 - protein, 425 aa, Artificial Sequence
  Synthetic polypeptide
DPISTKNTEVNWLEKRLEEWLGRTLPGSDWTPNAQFITRSWLRDGLKPRCITRDLKWGTPVPLEGFEDKVFYVWFDATIGYLSITANYTDQWERWWKNPEQVDLYQFMAKDNVPFHSLVFPCSALGAEDNYTLVSHLIATEYLNYEDGKFSKSRGVGVFGDMAQDTGIPADIWRFYLLYIRPEGQDSAFSWTDLLLKNNSELLNNLGNFINRAGMFVSKFFGGYVPEMVLTPDDQRLLAHVTLELQHYHQLLEKVRIRDALRSILTISRHGNQYIQVNEPWKRIKGSEADRQRAGTVTGLAVNIAALLSVMLQPYMPTVSATIQAQLQLPPPACSILLTNFLCTLPAGHQIGTVSPLFQKLENDQIESLRQRFGGGQVRKLKAVPSLHNSHSITSLISLSSPHPSLFPSFGPAASSLTVFLSCLN

SEQ ID NO: 10143 - protein, 280 aa, Artificial Sequence
  Synthetic polypeptide
NFLCCFFSYPLECKFHKAQYNISALVTIATKTFLRYDRLRALITSIRRFYPTVTVVIADDSDKPERVSGPYVEHYLMPFGKGWFAGRNLAVSQVTTKYVLWVDDDFVFTARTRLERLVDVLERTPLDLVGGAVREISGFATTYRQLLSVEPGAPGLGNCLRQRRGFHHELVGFPGCVVTDGVVNFFLARTDKVREVGFDPRLSRVAHLEFFLDGLGSLRVGSCSDVVVDHASKLKLPWTSRDAGAETYARYRYPGSLDESQMAKHRLLFFKHRLQCMTSQ

SEQ ID NO: 10144 - protein, 280 aa, Artificial Sequence; identical to SEQ ID NO: 10143
  Synthetic polypeptide

SEQ ID NO: 10145 - protein, 13 aa, Artificial Sequence
  Synthetic polypeptide
NVSSIKPSTTSAL

SEQ ID NO: 10146 - protein, 13 aa, Artificial Sequence
  Synthetic polypeptide
NVSSIKPSTTSAL

SEQ ID NO: 10147 - protein, 13 aa, Artificial Sequence
  Synthetic polypeptide
NVSSIKPSTTSAL

SEQ ID NO: 10148 - protein, 84 aa, Artificial Sequence
  Synthetic polypeptide
NFLCCFFSYPLECKFHKAQYNISALVTIATKTFLRYDRLRALITSIRRFYPTVTVVIADDSDKPERVSGPYVEHYLMPFGKVCS

SEQ ID NO: 10149 - protein, 313 aa, Artificial Sequence
  Synthetic polypeptide
NFLCCFFSYPLECKFHKVRFSTEGHEAAFTIRIRHPPNPRLYPPGSLPQGAQYNISALVTIATKTFLRYDRLRALITSIRRFYPTVTVVIADDSDKPERVSGPYVEHYLMPFGKGWFAGRNLAVSQVTTKYVLWVDDDFVFTARTRLERLVDVLERTPLDLVGGAVREISGFATTYRQLLSVEPGAPGLGNCLRQRRGFHHELVGFPGCVVTDGVVNFFLARTDKVREVGFDPRLSRVAHLEFFLDGLGSLRVGSCSDVVVDHASKLKLPWTSRDAGAETYARYRYPGSLDESQMAKHRLLFFKHRLQCMTSQ

SEQ ID NO: 10150 - protein, 313 aa, Artificial Sequence; identical to SEQ ID NO: 10149
  Synthetic polypeptide

SEQ ID NO: 10151 - protein, 21 aa, Artificial Sequence
  Synthetic polypeptide
NVSSIKSGSPPRDMRLLSLSA

SEQ ID NO: 10152 - protein, 21 aa, Artificial Sequence
  Synthetic polypeptide
NVSSIKSGSPPRDMRLLSLSA

SEQ ID NO: 10153 - protein, 25 aa, Artificial Sequence
  Synthetic polypeptide
NFLCCFFSYPLECKFHKVRFSTEGH

SEQ ID NO: 10154 - protein, 25 aa, Artificial Sequence
  Synthetic polypeptide
NFLCCFFSYPLECKFHKVRFSTEGH

SEQ ID NO: 10155 - protein, 14 aa, Artificial Sequence
  Synthetic polypeptide
NVSSIKSGSPPRDM

SEQ ID NO: 10156 - protein, 14 aa, Artificial Sequence
  Synthetic polypeptide
NVSSIKSGSPPRDM

SEQ ID NO: 10157 - protein, 140 aa, Artificial Sequence
  Synthetic polypeptide
LVLHKGKLGENMILKRAAWVKVPSGFYVGSYVHGAMQSPSLHKLVLGKYGALVICETSEQKTNLEDVGRRLGQHVVGMAPLSVGSLDDEPGGEAETKMLSQPYLLDPSITLGQYVQPQGVSVVDFVRFECGEGEEAAETE

SEQ ID NO: 10158 - protein, 140 aa, Artificial Sequence; identical to SEQ ID NO: 10157
  Synthetic polypeptide

SEQ ID NO: 10159 - protein, 140 aa, Artificial Sequence; identical to SEQ ID NO: 10157
  Synthetic polypeptide

SEQ ID NO: 10160 - protein, 18 aa, Artificial Sequence
  Synthetic polypeptide
PECLAHSWCFIKENWEKT

SEQ ID NO: 10161 - protein, 18 aa, Artificial Sequence
  Synthetic polypeptide
PECLAHSWCFIKENWEKT

SEQ ID NO: 10162 - protein, 18 aa, Artificial Sequence
  Synthetic polypeptide
PECLAHSWCFIKENWEKT

SEQ ID NO: 10163 - protein, 18 aa, Artificial Sequence
  Synthetic polypeptide
PECLAHSWCFIKENWEKT

SEQ ID NO: 10164 - protein, 18 aa, Artificial Sequence
  Synthetic polypeptide
PECLAHSWCFIKENWEKT

SEQ ID NO: 10165 - protein, 12 aa, Artificial Sequence
  Synthetic polypeptide
LVLHKGKLGENM

SEQ ID NO: 10166 - protein, 33 aa, Artificial Sequence
  Synthetic polypeptide
LVLHKGKLGENMILKRAAWVKVPSGFYVGSYVH

SEQ ID NO: 10167 - protein, 19 aa, Artificial Sequence
  Synthetic polypeptide
SLYMLMTTWVFLHDNCHCI

SEQ ID NO: 10168 - protein, 19 aa, Artificial Sequence
  Synthetic polypeptide
SLYMLMTTWVFLHDNCHCI

SEQ ID NO: 10169 - protein, 18 aa, Artificial Sequence
  Synthetic polypeptide
QPGFFFMTTVIAYSFVPE

SEQ ID NO: 10170 - protein, 18 aa, Artificial Sequence
  Synthetic polypeptide
QPGFFFMTTVIAYSFVPE

SEQ ID NO: 10171 - protein, 146 aa, Artificial Sequence
  Synthetic polypeptide
QLSLHIVLCQNNIHNQAHMNRVVTHELIHAFDHCRAHVDWFTNIRHLACSEVRAANLSGDCSLVNEIFRLHFGLKQHHQTCVRDRATLSILAVRNISKEVAKKAVDEVFESCFNDHEPFGRIPHNKTYARYAHRDFENRDRYYSNI

SEQ ID NO: 10172 - protein, 11 aa, Artificial Sequence
  Synthetic polypeptide
QLSLHIVLCQN

SEQ ID NO: 10173 - protein, 62 aa, Artificial Sequence
  Synthetic polypeptide
LRYTRNTQMCWKWPGCSMLEIWDVEDPSNAANPPLCSVLLEDARPYFTTVFQNSVYRVLKVN

SEQ ID NO: 10174 - protein, 62 aa, Artificial Sequence; identical to SEQ ID NO: 10173
  Synthetic polypeptide

SEQ ID NO: 10175 - protein, 65 aa, Artificial Sequence
  Synthetic polypeptide
EMMPDGNSDIQEILKCAGNGLVAVCLKSGMWKTLPMQLTLPYVASCSKTPGLTSPQYFRIVCTEY

SEQ ID NO: 10176 - protein, 65 aa, Artificial Sequence; identical to SEQ ID NO: 10175
  Synthetic polypeptide

SEQ ID NO: 10177 - protein, 23 aa, Artificial Sequence
  Synthetic polypeptide
CQMVTQIYKKYSNVLEMAWLQYA

SEQ ID NO: 10178 - protein, 23 aa, Artificial Sequence
  Synthetic polypeptide
CQMVTQIYKKYSNVLEMAWLQYA

SEQ ID NO: 10179 - protein, 47 aa, Artificial Sequence
  Synthetic polypeptide
KCVAPPPLPSSSFSGHIRHACFPFTFHHDCKFPEASPAMLPIQPAEL

SEQ ID NO: 10180 - protein, 47 aa, Artificial Sequence; identical to SEQ ID NO: 10179
  Synthetic polypeptide

SEQ ID NO: 10181 - protein, 47 aa, Artificial Sequence; identical to SEQ ID NO: 10179
  Synthetic polypeptide

SEQ ID NO: 10182 - protein, 63 aa, Artificial Sequence
  Synthetic polypeptide
DMPASPSPSTMIVSFLKPPQPCFLYSLQNCDENIPYVSCREHQCREQAERGRKTRGKANWEIW

SEQ ID NO: 10183 - protein, 63 aa, Artificial Sequence; identical to SEQ ID NO: 10182
  Synthetic polypeptide

SEQ ID NO: 10184 - protein, 63 aa, Artificial Sequence; identical to SEQ ID NO: 10182
  Synthetic polypeptide

SEQ ID NO: 10185 - protein, 935 aa, Artificial Sequence
  Synthetic polypeptide
SLPSHASYTACRTVMKTYHMYHAESISAESKLKEAEKQEEKQIGRSGDPVFHIRLEERHQRRSSVKKIEKMKEKRQAKYSENKLKSIKARNEYLLTLEATNASVFKYYIHDLSDLIDCCDLGYHASLNRALRTYLSAEYNLETSRHEGLDIIENAVDNLEPRSDKQRFMEMYPAAFCPPMKFEFQSHMGDEVCQVSAQQPVQAELMLRYQQLQSRLATLKIENEEVKKTTEATLQTIQDMVTIEDYDVSECFQHSRSTESVKSTVSETYLSKPSIAKRRANQQETEQFYFMKLREYLEGSNLITKLQAKHDLLQRTLGEGHRAEYMTTRPPNVPPKPQKHRKSRPRSQYNTKLFNGDLETFVKDSGQVIPLIVESCIRFINLYGLQHQGIFRVSGSQVEVNDIKNSFERGENPLADDQSNHDINSVAGVLKLYFRGLENPLFPKERFNDLISCIRIDNLYERALHIRKLLLTLPRSVLIVMRYLFAFLNHLSQYSDENMMDPYNLAICFGPTLMPVPEIQDQVSCQAHVNEIIKTIIIHHETIFPDAKELDGPVYEKCMAGDDYCDSPYSEHGTLEEVDQDAGTEPHTSEDECEPIEAIAKFDYVGRSARELSFKKGASLLLYHRASEDWWEGRHNGIDGLVPHQYIVVQDMDDTFSDTLSQKADSEASSGPVTEDKSSSKDMNSPTDRHPDGYLARQRKRGEPPPPVRRPGRTSDGHCPLHPPHALSNSSVDLGSPSLASHPRGLLQNRGLNNDSPERRRRPGHGSLTNISRHDSLKKIDSPPIRRSTSSGQYTGFNDHKPLDPETIAQDIEETMNTALNELRELERQSTAKHAPDVVLDTLEQVKNSPTPATSTESLSPLHNVALRSSEPQIRRSTSSSSDTMSTFKPMVAPRMGVQLKPPALRPKPAVLPKTNPTIGPAPPPQGPTDKSCTM

SEQ ID NO: 10186 - protein, 912 aa, Artificial Sequence
  Synthetic polypeptide
SLPSHASYTACRTVMKTYHMYHAESISAESKLKEAEKQEEKQIGRSGDPVFHIRLEERHQRRSSVKKIEKMKEKRQAKYSENKLKSIKARNEYLLTLEATNASVFKYYIHDLSDLIDCCDLGYHASLNRALRTYLSAEYNLETSRHEGLDIIENAVDNLEPRSDKQRFMEMYPAAFCPPMKFEFQSHMGDEVCQVSAQQPVQAELMLRYQQLQSRLATLKIENEEVKKTTEATLQTIQDMVTIEDYDVSECFQHSRSTESVKSTVSETYLSKPSIAKRRANQQETEQFYFMKLREYLEGSNLITKLQAKHDLLQRTLGEGHRAEYMTTSRGRRNSHTRHQDSGQVIPLIVESCIRFINLYGLQHQGIFRVSGSQVEVNDIKNSFERGENPLADDQSNHDINSVAGVLKLYFRGLENPLFPKERFNDLISCIRIDNLYERALHIRKLLLTLPRSVLIVMRYLFAFLNHLSQYSDENMMDPYNLAICFGPTLMPVPEIQDQVSCQAHVNEIIKTIIIHHETIFPDAKELDGPVYEKCMAGDDYCDSPYSEHGTLEEVDQDAGTEPHTSEDECEPIEAIAKFDYVGRSARELSFKKGASLLLYHRASEDWWEGRHNGIDGLVPHQYIVVQDMDDTFSDTLSQKADSEASSGPVTEDKSSSKDMNSPTDRHPDGYLARQRKRGEPPPPVRRPGRTSDGHCPLHPPHALSNSSVDLGSPSLASHPRGLLQNRGLNNDSPERRRRPGHGSLTNISRHDSLKKIDSPPIRRSTSSGQYTGFNDHKPLDPETIAQDIEETMNTALNELRELERQSTAKHAPDVVLDTLEQVKNSPTPATSTESLSPLHNVALRSSEPQIRRSTSSSSDTMSTFKPMVAPRMGVQLKPPALRPKPAVLPKTNPTIGPAPPPQGPTDKSCTM

SEQ ID NO: 10187 - protein, 912 aa, Artificial Sequence; identical to SEQ ID NO: 10186
  Synthetic polypeptide

SEQ ID NO: 10188 - protein, 12 aa, Artificial Sequence
  Synthetic polypeptide
SQLLRRLMQENA

SEQ ID NO: 10189 - protein, 12 aa, Artificial Sequence
  Synthetic polypeptide
SQLLRRLMQENA

SEQ ID NO: 10190 - protein, 12 aa, Artificial Sequence
  Synthetic polypeptide
SQLLRRLMQENA

SEQ ID NO: 10191 - protein, 12 aa, Artificial Sequence
  Synthetic polypeptide
SQLLRRLMQENA

SEQ ID NO: 10192 - protein, 12 aa, Artificial Sequence
  Synthetic polypeptide
SQLLRRLMQENA

SEQ ID NO: 10193 - protein, 61 aa, Artificial Sequence
  Synthetic polypeptide
CRRMRDQLPALCWLLTMALGDIPGMGLPDAIATEQLHRQQQEKWSGQSQHLLQGAELQNQF

SEQ ID NO: 10194 - protein, 61 aa, Artificial Sequence; identical to SEQ ID NO: 10193
  Synthetic polypeptide

SEQ ID NO: 10195 - protein, 61 aa, Artificial Sequence; identical to SEQ ID NO: 10193
  Synthetic polypeptide

SEQ ID NO: 10196 - protein, 61 aa, Artificial Sequence; identical to SEQ ID NO: 10193
  Synthetic polypeptide

SEQ ID NO: 10197 - protein, 61 aa, Artificial Sequence; identical to SEQ ID NO: 10193
  Synthetic polypeptide

SEQ ID NO: 10198 - protein, 223 aa, Artificial Sequence
  Synthetic polypeptide
HRETPSLLKIRKISRAWWRAPVVPATPEADAGECVTSYQLSAGYSRWPSVTSQEWVFQMLSRQNNYTVNNKRNGVAKVNIFFKELNYKTNSESPSVTMVTLLSNLGSQWSLWFGSSVLSVVEMAELVFDLLVIMFLMLLRRFRSRYWSPGRGGRGAQEVASTLASSPPSHFCPHPMSLSLSQPGPAPSPALTAPPPAYATLGPRPSPGGSAGASSSTCPLGGP

SEQ ID NO: 10199 - protein, 223 aa, Artificial Sequence; identical to SEQ ID NO: 10198
  Synthetic polypeptide

SEQ ID NO: 10200 - protein, 223 aa, Artificial Sequence; identical to SEQ ID NO: 10198
  Synthetic polypeptide

SEQ ID NO: 10201 - protein, 223 aa, Artificial Sequence; identical to SEQ ID NO: 10198
  Synthetic polypeptide

SEQ ID NO: 10202 - protein, 223 aa, Artificial Sequence; identical to SEQ ID NO: 10198
  Synthetic polypeptide

SEQ ID NO: 10203 - protein, 283 aa, Artificial Sequence
  Synthetic polypeptide
GRSQDGQIGTAPVYSSQRERRRRRVISAFPSETSDLFYFIVNKLHEYLPESRDKNALQNQSQRVDELVACIEIIQTLVLMFRETETESSRLNTLAAKKGALFNLLVILISEPQIPKSCPVFDIQLVADSALVRMSFDAELQKLILEYTNTATALLYEILLVFQQGNLGLGSTKFAISWIMSFLQSCPPIITFVASIVKQVVRGLSASFQLLSPCQAVLLYQQFYILKSCLRHSRTLAEYIRNNYREEFRYFIHMPALQKRLPLCYPITQPTIQLFHEVLKLVE

SEQ ID NO: 10204 - protein, 283 aa, Artificial Sequence; identical to SEQ ID NO: 10203
  Synthetic polypeptide

SEQ ID NO: 10205 - protein, 14 aa, Artificial Sequence
  Synthetic polypeptide
FLHFHLRPVTFSIS

SEQ ID NO: 10206 - protein, 14 aa, Artificial Sequence
  Synthetic polypeptide
FLHFHLRPVTFSIS

SEQ ID NO: 10207 - protein, 104 aa, Artificial Sequence
  Synthetic polypeptide
NRGVPRLIGIRLTLPPPKVVDRWNEKRAMFGVYDNIGILGNFEKHPKELIRGPIWLRGWKGNELQRCIRKRKMVGSRMFADDLHNLNKRIRYLYKHFNRHGKFR

SEQ ID NO: 10208 - protein, 24 aa, Artificial Sequence
  Synthetic polypeptide
RPASHFTFRTSNLLPSSKIGVCLD

SEQ ID NO: 10209 - protein, 4 aa, Artificial Sequence
  Synthetic polypeptide
SRCA

SEQ ID NO: 10210 - protein, 111 aa, Artificial Sequence
  Synthetic polypeptide
ELEGIASNPGVPRLIGIRLTLPPPKVVDRWNEKRAMFGVYDNIGILGNFEKHPKELIRGPIWLRGWKGNELQRCIRKRKMVGSRMFADDLHNLNKRIRYLYKHFNRHGKFR

SEQ ID NO: 10211 - protein, 11 aa, Artificial Sequence
  Synthetic polypeptide
KASPLIQVCLD

SEQ ID NO: 10212 - protein, 36 aa, Artificial Sequence
  Synthetic polypeptide
FWGLPSHVELHNKLFRRSLLRRKLKRHPHKSLPKRT

SEQ ID NO: 10213 - protein, 32 aa, Artificial Sequence
  Synthetic polypeptide
EVPFASRYDSGASQAMWNSTTSCSEEACSGGN

SEQ ID NO: 10214 - protein, 65 aa, Artificial Sequence
  Synthetic polypeptide
WVYQGFPLLLLPHFLLPLPCKKCRSPPAMILGPPKPCGTPQQVVQKKPAQEETEETSSQESAEED

SEQ ID NO: 10215 - protein, 21 aa, Artificial Sequence
  Synthetic polypeptide
FWGLPSHVELHNKLFRRSLLR

SEQ ID NO: 10216 - protein, 32 aa, Artificial Sequence
  Synthetic polypeptide
EVPFASRYDSGASQAMWNSTTSCSEEACSGKT

SEQ ID NO: 10217 - protein, 55 aa, Artificial Sequence
  Synthetic polypeptide
WVYQGFPLLLLPHFLLPLPCKKCRSPPAMILGPPKPCGTPQQVVQKKPAQVRHSH

SEQ ID NO: 10218 - protein, 45 aa, Artificial Sequence
  Synthetic polypeptide
FWGLPSHVELHNKLFRRSLLRSMLPCLGRTTRAILYIYCSLKMPL

SEQ ID NO: 10219 - protein, 49 aa, Artificial Sequence
  Synthetic polypeptide
EVPFASRYDSGASQAMWNSTTSCSEEACSGQCCLAWEGPPGQSYISTVL

SEQ ID NO: 10220 - protein, 74 aa, Artificial Sequence
  Synthetic polypeptide
WVYQGFPLLLLPHFLLPLPCKKCRSPPAMILGPPKPCGTPQQVVQKKPAQVNVALPGKDHPGNLIYLLFSKNAT

SEQ ID NO: 10221 - protein, 21 aa, Artificial Sequence
  Synthetic polypeptide
LLSSLPSISNTRIIGLRYICE

SEQ ID NO: 10222 - protein, 21 aa, Artificial Sequence
  Synthetic polypeptide
LLSSLPSISNTRIIGLRYICE

SEQ ID NO: 10223 - protein, 21 aa, Artificial Sequence
  Synthetic polypeptide
LLSSLPSISNTRIIGLRYICE

SEQ ID NO: 10224 - protein, 21 aa, Artificial Sequence
  Synthetic polypeptide
LLSSLPSISNTRIIGLRYICE

SEQ ID NO: 10225 - protein, 21 aa, Artificial Sequence
  Synthetic polypeptide
LLSSLPSISNTRIIGLRYICE

SEQ ID NO: 10226 - protein, 21 aa, Artificial Sequence
  Synthetic polypeptide
LLSSLPSISNTRIIGLRYICE

SEQ ID NO: 10227 - protein, 21 aa, Artificial Sequence
  Synthetic polypeptide
LLSSLPSISNTRIIGLRYICE

SEQ ID NO: 10228 - protein, 21 aa, Artificial Sequence
  Synthetic polypeptide
LLSSLPSISNTRIIGLRYICE

SEQ ID NO: 10229 - protein, 21 aa, Artificial Sequence
  Synthetic polypeptide
LLSSLPSISNTRIIGLRYICE

SEQ ID NO: 10230 - protein, 21 aa, Artificial Sequence
  Synthetic polypeptide
LLSSLPSISNTRIIGLRYICE

SEQ ID NO: 10231 - protein, 406 aa, Artificial Sequence
  Synthetic polypeptide
MVPLIYSPKLESWNHLNSFLPCLLYQIPESSDSGTSVSENRCHLEGGSDQKDLVQELQEEKPSSSHLVSRPSTSSRRRAISETEENSDELSGERQRKRHKSDSISLSFDESLALCVIREICCERSSSSESTGTPSNPDLDAGVSEHSGDWLDQDSVSDQFSVEFEVESLDSEDYSLSEEGQELSDEDDEVYQVTVYQAGESDTDSFEEDPEISLADYWKCTSCNEMNPPLPSHCNRCWALRENWLPEDKGKDKGEISEKAKLENSTQAEEGFDVPDCKKTIVNDSRESCVEENDDKITQASQSQESEDYSQPSTSSSIIYSSQEDVKEFEREETQDKEESVESSLPLNAIEPCVICQGRPKNGCIVHGKTGHLMACFTCAKKLKKRNKPCPVCRQPIQMIVLTYFP

SEQ ID NO: 10232 - protein, 406 aa, Artificial Sequence; identical to SEQ ID NO: 10231
  Synthetic polypeptide

SEQ ID NO: 10233 - protein, 42 aa, Artificial Sequence
  Synthetic polypeptide
SFSFSEWYHSFIHPSWNLGIILTPFFLAFYIKYQNHRTQVHL

SEQ ID NO: 10234 - protein, 42 aa, Artificial Sequence; identical to SEQ ID NO: 10233
  Synthetic polypeptide

SEQ ID NO: 10235 - protein, 42 aa, Artificial Sequence; identical to SEQ ID NO: 10233
  Synthetic polypeptide

SEQ ID NO: 10236 - protein, 42 aa, Artificial Sequence; identical to SEQ ID NO: 10233
  Synthetic polypeptide

SEQ ID NO: 10237 - protein, 42 aa, Artificial Sequence; identical to SEQ ID NO: 10233
  Synthetic polypeptide

SEQ ID NO: 10238 - protein, 42 aa, Artificial Sequence; identical to SEQ ID NO: 10233
  Synthetic polypeptide

SEQ ID NO: 10239 - protein, 42 aa, Artificial Sequence; identical to SEQ ID NO: 10233
  Synthetic polypeptide

SEQ ID NO: 10240 - protein, 42 aa, Artificial Sequence; identical to SEQ ID NO: 10233
  Synthetic polypeptide

SEQ ID NO: 10241 - protein, 42 aa, Artificial Sequence; identical to SEQ ID NO: 10233
  Synthetic polypeptide

SEQ ID NO: 10242 - protein, 42 aa, Artificial Sequence; identical to SEQ ID NO: 10233
  Synthetic polypeptide

SEQ ID NO: 10243 - protein, 42 aa, Artificial Sequence; identical to SEQ ID NO: 10233
  Synthetic polypeptide

SEQ ID NO: 10244 - protein, 42 aa, Artificial Sequence; identical to SEQ ID NO: 10233
  Synthetic polypeptide

SEQ ID NO: 10245 - protein, 38 aa, Artificial Sequence
  Synthetic polypeptide
MVPLIYSPKLESWNHLNSFLPCLLYQIPESSDSGTSVS

SEQ ID NO: 10246 - protein, 38 aa, Artificial Sequence; identical to SEQ ID NO: 10245
  Synthetic polypeptide

SEQ ID NO: 10247 - protein, 38 aa, Artificial Sequence; identical to SEQ ID NO: 10245
  Synthetic polypeptide

SEQ ID NO: 10248 - protein, 38 aa, Artificial Sequence; identical to SEQ ID NO: 10245
  Synthetic polypeptide

SEQ ID NO: 10249 - protein, 172 aa, Artificial Sequence
  Synthetic polypeptide
MVPLIYSPKLESWNHLNSFLPCLLYQIPESSDSGTSVSENRCHLEGGSDQKDLVQELQEEKPSSSHLVSRPSTSSRRRAISETEENSDELSGERQRKRHKSDSISLSFDESLALCVIREICCERSSSSESTGTPSNPDLDAGVSEHSGDWLDQDSVSDQFSVEFEVESLDSE

SEQ ID NO: 10250 - protein, 171 aa, Artificial Sequence
  Synthetic polypeptide
MVPLIYSPKLESWNHLNSFLPCLLYQIPESSDSGTSVSENRCHLEGGSDQKDLVQELQEEKPSSSHLVSRPSTSSRRRAISETEENSDELSGERQRKRHKSDSISLSFDESLALCVIREICCERSSSSESTGTPSNPDLDAGVYQVTVYQAGESDTDSFEEDPEISLADYW

SEQ ID NO: 10251 - protein, 113 aa, Artificial Sequence
  Synthetic polypeptide
MVPLIYSPKLESWNHLNSFLPCLLYQIPESSDSGTSVSENRCHLEGGSDQKDLVQELQEEKPSSSHLVSRPSTSSRRRAISETEENSDELSGERQRKRHKSDSISLSFDESLA

SEQ ID NO: 10252 - protein, 20 aa, Artificial Sequence
  Synthetic polypeptide
LLSSLPSISNTRIIGLRYIC

SEQ ID NO: 10253 - protein, 20 aa, Artificial Sequence
  Synthetic polypeptide
LLSSLPSISNTRIIGLRYIC

SEQ ID NO: 10254 - protein, 37 aa, Artificial Sequence
  Synthetic polypeptide
MVPLIYSPKLESWNHLNSFLPCLLYQIPESSDSGTSV

SEQ ID NO: 10255 - protein, 37 aa, Artificial Sequence; identical to SEQ ID NO: 10254
  Synthetic polypeptide

SEQ ID NO: 10256 - protein, 85 aa, Artificial Sequence
  Synthetic polypeptide
MVPLIYSPKLESWNHLNSFLPCLLYQIPESSDSGTSVSENRCHLEGGSDQKDLVQELQEEKPSSSHLVSRPSTSSRRRAISETGS

SEQ ID NO: 10257 - protein, 21 aa, Artificial Sequence
  Synthetic polypeptide
VQPGQHGETLSLLKIQKLTRP

SEQ ID NO: 10258 - protein, 53 aa, Artificial Sequence
  Synthetic polypeptide
PDHSNLGGGAPGVCAERGGPQPGLETLAGGRDAVSGTDCKGCSVRAGLQEGQI

SEQ ID NO: 10259 - protein, 84 aa, Artificial Sequence
  Synthetic polypeptide
EAVAGGSLELRSLSPAWPTWRNPVSTKNTKINPTIVTWEEEHLVCVQKGEVPNRGWRHWLEGEMLYLELTARDAVCEQVFRKVR

SEQ ID NO: 10260 - protein, 117 aa, Artificial Sequence
  Synthetic polypeptide
GVGGANKHKPWIEAEYQGIVMENDNTVLLNPPLFALDKDAPLRYAGEICGFRLHGSGVPFEAVILDKATGEGLIRAKEPVDCEAQKEHTFTIQAYDCGEGPDGANTKKSHKATVHVR

SEQ ID NO: 10261 - protein, 43 aa, Artificial Sequence
  Synthetic polypeptide
MSMRGKAEKEKTGDEAWEGPTSTSHGLRQSTRASSWRMTTRSY

SEQ ID NO: 10262 - protein, 43 aa, Artificial Sequence; identical to SEQ ID NO: 10261
  Synthetic polypeptide

SEQ ID NO: 10263 - protein, 43 aa, Artificial Sequence; identical to SEQ ID NO: 10261
  Synthetic polypeptide

SEQ ID NO: 10264 - protein, 43 aa, Artificial Sequence; identical to SEQ ID NO: 10261
  Synthetic polypeptide

SEQ ID NO: 10265 - protein, 23 aa, Artificial Sequence
  Synthetic polypeptide
EGKLRRRRPEMRRGRGQQAQAMD

SEQ ID NO: 10266 - protein, 23 aa, Artificial Sequence
  Synthetic polypeptide
EGKLRRRRPEMRRGRGQQAQAMD

SEQ ID NO: 10267 - protein, 23 aa, Artificial Sequence
  Synthetic polypeptide
EGKLRRRRPEMRRGRGQQAQAMD

SEQ ID NO: 10268 - protein, 23 aa, Artificial Sequence
  Synthetic polypeptide
EGKLRRRRPEMRRGRGQQAQAMD

SEQ ID NO: 10269 - protein, 939 aa, Artificial Sequence
  Synthetic polypeptide
GVGGANKHKPWIEAEYQGIVMENDNTVLLNPPLFALDKDAPLRYAGEICGFRLHGSGVPFEAVILDKATGEGLIRAKEPVDCEAQKEHTFTIQAYDCGEGPDGANTKKSHKATVHVRVNDVNEFAPVFVERLYRAAVTEGKLYDRILRVEAIDGDCSPQYSQICYYEILTPNTPFLIDNDGNIENTEKLQYSGERLYKFTVTAYDCGKKRAADDAEVEIQVKPTCKPSWQGWNKRIEYAPGAGSLALFPGIRLETCDEPLWNIQATIELQTSHVAKGCDRDNYSERALRKLCGAATGEVDLLPMPGPNANWTAGLSVHYSQDSSLIYWFNGTQAVQVPLGGPSGLGSGPQDSLSDHFTLSFWMKHGVTPNKGKKEEETIVCNTVQNEDGFSHYSLTVHGCRIAFLYWPLLESARPVKFLWKLEQVCDDEWHHYALNLEFPTVTLYTDGISFDPALIHDNGLIHPPRREPALMIGACWTEEKNKEKEKGDNSTDTTQGDPLSIHHYFHGYLAGFSVRSGRLESREVIECLYACREGLDYRDFESLGKGMKVHVNPSQSLLTLEGDDVETFNHALQHVAYMNTLRFATPGVRPLRLTTAVKCFSEESCVSIPEVEGYVVVLQPDAPQILLSGTAHFARPAVDFEGTNGVPLFPDLQITCSISHQVEAKKDESWQGTVTDTRMSDEIVHNLDGCEISLVGDDLDPERESLLLDTTSLQQRGLELTNTSAYLTIAGVESITVYEEILRQARYRLRHGAALYTRKFRLSCSEMNGRYSSNEFIVEVNVLHSMNRVAHPSHVLSSQQFLHRGHQPPPEMAGHSLASSHRNSMIPSAATLIIVVCVGFLVLMVVLGLVRIHSLHRRVSGAGGPPGASSDPKDPDLFWDDSALTIIVNPMESYQNRQSCVTGAVGGQQEDEDSSDSEVADSPSSDERRIIETPPHRY

SEQ ID NO: 10270 - protein, 939 aa, Artificial Sequence; identical to SEQ ID NO: 10269
  Synthetic polypeptide

SEQ ID NO: 10271 - protein, 176 aa, Artificial Sequence
  Synthetic polypeptide
GVGGANKHKPWIEAEYQGIVMENDNTVLLNPPLFALDKDAPLRYAGEICGFRLHGSGVPFEAVILDKATGEGLIRAKEPVDCEAQKEHTFTIQAYDCGEGPDGANTKKSHKATVHVRVNDVNEFAPVFVERLYRAAVTEGKLYDRILRVEAIDGDCSPQYSQICYYEILTPNTPFL

SEQ ID NO: 10272 - protein, 65 aa, Artificial Sequence
  Synthetic polypeptide
GWAWWLTPVIPALWEAEAGRSRGQEFETSLANMVSFFTQRKFPKLPPACRSSSTLTCLPSKKGNS

SEQ ID NO: 10273 - protein, 24 aa, Artificial Sequence
  Synthetic polypeptide
PTWFLSLPKENFPSFLLPAEAPLL

SEQ ID NO: 10274 - protein, 307 aa, Artificial Sequence
  Synthetic polypeptide
MGVVAHTCNPSTLGGRGRQITRPGVRDQPSQHGFFLYPKKISQASSCLQKLLYFNLSAIKEREQLTLAQLGLDLGPNSYYNLGPELELALFLVQEPHVWGQTTPKPGKMFVLRSVPWPQGAVHFNLLDVAKDWNDNPRKNFGLFLEILVKEDRDSGVNFQPEDTCARLRCSLHASLLVVTLNPDQCHPSRKRRAAIPVPKLSCKNLCHRHQLFINFRDLGWHKWIIAPKGFMANYCHGECPFSLTISLNSSNYAFMQALMHAVDPEIPQAVCIPTKLSPISMLYQDNNDNVILRHYEDMVVDECGCG

SEQ ID NO: 10275 - protein, 8 aa, Artificial Sequence
  Synthetic polypeptide
ELCHNQCL

SEQ ID NO: 10276 - protein, 117 aa, Artificial Sequence
  Synthetic polypeptide
DKNCVTTSVSEEDVSSRYSRTDRSGFPRYNRDANVSGTLVSSSTLEKKIEDLEKEVVRERQENLRLVRLMQDKEEMIGKLKEEIDLLNRDLDDIEDENEQLKQENKTLLKVVGQLTR

SEQ ID NO: 10277 - protein, 67 aa, Artificial Sequence
  Synthetic polypeptide
AASKFLTNGNFEIRIVSQPVSLKKMSQVDILEQIEVGSLDITGMQMFQVLWFQVAHWKRKLKILKRK

SEQ ID NO: 10278 - protein, 83 aa, Artificial Sequence
  Synthetic polypeptide
GQARWLTPVIPALWEAETGGSRGQEMETIPANTLIQEDILDTGNDKNGKEEVIKRKIPYILKRQLYENKPRRPYILKRDSYYY

SEQ ID NO: 10279 - protein, 83 aa, Artificial Sequence; identical to SEQ ID NO: 10278
  Synthetic polypeptide

SEQ ID NO: 10280 - protein, 24 aa, Artificial Sequence
  Synthetic polypeptide
SQHFGRPRRADHEVKRWRPSRLTR

SEQ ID NO: 10281 - protein, 24 aa, Artificial Sequence
  Synthetic polypeptide
SQHFGRPRRADHEVKRWRPSRLTR

SEQ ID NO: 10282 - protein, 8 aa, Artificial Sequence
  Synthetic polypeptide
HVNPGRYS

SEQ ID NO: 10283 - protein, 8 aa, Artificial Sequence
  Synthetic polypeptide
HVNPGRYS

SEQ ID NO: 10284 - protein, 80 aa, Artificial Sequence
  Synthetic polypeptide
GQARWLTPVIPALWEAETGGSRGQEMETIPANTEDILDTGNDKNGKEEVIKRKIPYILKRQLYENKPRRPYILKRDSYYY

SEQ ID NO: 10285 - protein, 80 aa, Artificial Sequence; identical to SEQ ID NO: 10284
  Synthetic polypeptide

SEQ ID NO: 10286 - protein, 40 aa, Artificial Sequence
  Synthetic polypeptide
SQHFGRPRRADHEVKRWRPSRLTRKIFLILEMTKMERKKS

SEQ ID NO: 10287 - protein, 40 aa, Artificial Sequence; identical to SEQ ID NO: 10286
  Synthetic polypeptide

SEQ ID NO: 10288 - protein, 5 aa, Artificial Sequence
  Synthetic polypeptide
HGRYS

SEQ ID NO: 10289 - protein, 5 aa, Artificial Sequence
  Synthetic polypeptide
HGRYS

SEQ ID NO: 10290 - protein, 4 aa, Artificial Sequence
  Synthetic polypeptide
KLAR

SEQ ID NO: 10291 - protein, 129 aa, Artificial Sequence
  Synthetic polypeptide
LGRRYIQEEIIQARKHKLIKMCSSVAAKLWFLTDRRIREDYPQKEILRALKAKCCEEELDFRAVVMDEVVLTIEQGNLGLRINGELITAYPQVVVVRVPTPWVQSDSDITVLRHLEKMGCRLMNRPQAI

SEQ ID NO: 10292 - protein, 113 aa, Artificial Sequence
  Synthetic polypeptide
METSYKILELDYLVQKKATIAASRQASSPNTSTTQQQTTTTQASINLATTSAAQLISRSQSVSSPSATTLTQSVLLGNTTSPPLNQSQAQMYLRPQLGNLLQVNRTLGRNVPL

SEQ ID NO: 10293 - protein, 48 aa, Artificial Sequence
  Synthetic polypeptide
YKKRPQLLPVGRPAPQTPALHSSRLPPPRPRSIWPPHRPPSSSADPRV

SEQ ID NO: 10294 - protein, 48 aa, Artificial Sequence; identical to SEQ ID NO: 10293
  Synthetic polypeptide

SEQ ID NO: 10295 - protein, 48 aa, Artificial Sequence; identical to SEQ ID NO: 10293
  Synthetic polypeptide

SEQ ID NO: 10296 - protein, 48 aa, Artificial Sequence; identical to SEQ ID NO: 10293
  Synthetic polypeptide

SEQ ID NO: 10297 - protein, 48 aa, Artificial Sequence; identical to SEQ ID NO: 10293
  Synthetic polypeptide

SEQ ID NO: 10298 - protein, 48 aa, Artificial Sequence; identical to SEQ ID NO: 10293
  Synthetic polypeptide

SEQ ID NO: 10299 - protein, 48 aa, Artificial Sequence; identical to SEQ ID NO: 10293
  Synthetic polypeptide

SEQ ID NO: 10300 - protein, 108 aa, Artificial Sequence
  Synthetic polypeptide
DFRVRLLSTKKGHNCCQSAGQLPKHQHYTAADYHHPGLDQSGHHIGRPAHQPIPECELSQCYHLDPICATGEHHLPTPQPVSGPDVSTATAGKPIAGKPNPGSECASS

SEQ ID NO: 10301 - protein, 946 aa, Artificial Sequence
  Synthetic polypeptide
METSYKILELDYLVQKKATIAASRQASSPNTSTTQQQTTTTQASINLATTSAAQLISRSQSVSSPSATTLTQSVLLGNTTSPPLNQSQAQMYLRPQLGNLLQVNRTLGRNVPLASQLILMPNGAVAAVQQEVPSAQSPGVHADADQVQNLAVRNQQASAQGPQMQGSTQKAIPPGASPVSSLSQASSQALAVAQASSGATNQSLNLSQAGGGSGNSIPGSMGPGGGGQAHGGLGQLPSSGMGGGSCPRKGTGVVQPLPAAQTVTVSQGSQTEAESAAAKKAEADGSGQQNVGMNLTRTATPAPSQTLISSATYTQIQPHSLIQQQQQIHLQQKQVVIQQQIAIHHQQQFQHRQSQLLHTATHLQLAQQQQQQQQQQQQQQQPQATTLTAPQPPQVPPTQQVPPSQSQQQAQTLVVQPMLQSSPLSLPPDAAPKPPIPIQSKPPVAPIKPPQLGAAKMSAAQQPPPHIPVQVVGTRQPGTAQAQALGLAQLAAAVPTSRGMPGTVQSGQAHLASSPPSSQAPGALQECPPTLAPGMTLAPVQGTAHVVKGGATTSSPVVAQVPAAFYMQSVHLPGKPQTLAVKRKADSEEERDDVSTLGSMLPAKASPVAESPKVMDEKSSLGEKAESVANVNANTPSSELVALTPAPSVPPPTLAMVSRQMGDSKPPQAIVKPQILTHIIEGFVIQEGAEPFPVGCSQLLKESEKPLQTGLPTGLTENQSGGPLGVDSPSAELDKKANLLKCEYCGKYAPAEQFRGSKRFCSMTCAKRYNVSCSHQFRLKRKKMKEFQEANYARVRRRGPRRSSSDIARAKIQGKCHRGQEDSSRGSDNSSYDEALSPTSPGPLSVRAGHGERDLGNPNTAPPTPELHGINPVFLSSNPSRWSVEEVYEFIASLQGCQEIAEEFRSQEIDGQALLLLKEEHLMSAMNIKLGPALKICAKINVLKET

SEQ ID NO: 10302 - protein, 946 aa, Artificial Sequence; identical to SEQ ID NO: 10301
  Synthetic polypeptide

SEQ ID NO: 10303 - protein, 115 aa, Artificial Sequence
  Synthetic polypeptide
DFRVRLLSTKKGHNCCQSAGQLPKHQHYTAADYHHPGLDQSGHHIGRPAHQPIPECELSQCYHLDPICATGEHHLPTPQPVSGPDVSTATAGKPIAGKPNPGSECASSLPTHPDA

SEQ ID NO: 10304 - protein, 115 aa, Artificial Sequence; identical to SEQ ID NO: 10303
  Synthetic polypeptide

SEQ ID NO: 10305 - protein, 938 aa, Artificial Sequence
  Synthetic polypeptide
METSYKILELDYLVQKKATIAASRQASSPNTSTTQQQTTTTQASINLATTSAAQLISRSQSVSSPSATTLTQSVLLGNTTSPPLNQSQAQMYLRVNRTLGRNVPLASQLILMPNGAVAAVQQEVPSAQSPGVHADADQVQNLAVRNQQASAQGPQMQGSTQKAIPPGASPVSSLSQASSQALAVAQASSGATNQSLNLSQAGGGSGNSIPGSMGPGGGGQAHGGLGQLPSSGMGGGSCPRKGTGVVQPLPAAQTVTVSQGSQTEAESAAAKKAEADGSGQQNVGMNLTRTATPAPSQTLISSATYTQIQPHSLIQQQQQIHLQQKQVVIQQQIAIHHQQQFQHRQSQLLHTATHLQLAQQQQQQQQQQQQQQQPQATTLTAPQPPQVPPTQQVPPSQSQQQAQTLVVQPMLQSSPLSLPPDAAPKPPIPIQSKPPVAPIKPPQLGAAKMSAAQQPPPHIPVQVVGTRQPGTAQAQALGLAQLAAAVPTSRGMPGTVQSGQAHLASSPPSSQAPGALQECPPTLAPGMTLAPVQGTAHVVKGGATTSSPVVAQVPAAFYMQSVHLPGKPQTLAVKRKADSEEERDDVSTLGSMLPAKASPVAESPKVMDEKSSLGEKAESVANVNANTPSSELVALTPAPSVPPPTLAMVSRQMGDSKPPQAIVKPQILTHIIEGFVIQEGAEPFPVGCSQLLKESEKPLQTGLPTGLTENQSGGPLGVDSPSAELDKKANLLKCEYCGKYAPAEQFRGSKRFCSMTCAKRYNVSCSHQFRLKRKKMKEFQEANYARVRRRGPRRSSSDIARAKIQGKCHRGQEDSSRGSDNSSYDEALSPTSPGPLSVRAGHGERDLGNPNTAPPTPELHGINPVFLSSNPSRWSVEEVYEFIASLQGCQEIAEEFRSQEIDGQALLLLKEEHLMSAMNIKLGPALKICAKINVLKET

SEQ ID NO: 10306 - protein, 107 aa, Artificial Sequence
  Synthetic polypeptide
DFRVRLLSTKKGHNCCQSAGQLPKHQHYTAADYHHPGLDQSGHHIGRPAHQPIPECELSQCYHLDPICATGEHHLPTPQPVSGPDVSTGKPNPGSECASSLPTHPDA

SEQ ID NO: 10307 - protein, 121 aa, Artificial Sequence
  Synthetic polypeptide
METSYKILELDYLVQKKATIAASRQASSPNTSTTQQQTTTTQASINLATTSAAQLISRSQSVSSPSATTLTQSVLLGNTTSPPLNQSQAQMYLRLGNLLQVNRTLGRNVPLASQLILMPNG

SEQ ID NO: 10308 - protein, 113 aa, Artificial Sequence
  Synthetic polypeptide
DFRVRLLSTKKGHNCCQSAGQLPKHQHYTAADYHHPGLDQSGHHIGRPAHQPIPECELSQCYHLDPICATGEHHLPTPQPVSGPDVSTAGKPIAGKPNPGSECASSLPTHPDA

SEQ ID NO: 10309 - protein, 124 aa, Artificial Sequence
  Synthetic polypeptide
METSYKILELDYLVQKKATIAASRQASSPNTSTTQQQTTTTQASVNRTLGRNVPLASQLILMPNGAVAAVQQEVPSAQSPGVHADADQVQNLAVRNQQASAQGPQMQGSTQKAIPPGASPVSSL

SEQ ID NO: 10310 - protein, 31 aa, Artificial Sequence
  Synthetic polypeptide
YKKRPQLLPVGRPAPQTPALHSSRLPPPRPR

SEQ ID NO: 10311 - protein, 57 aa, Artificial Sequence
  Synthetic polypeptide
DFRVRLLSTKKGHNCCQSAGQLPKHQHYTAADYHHPGLGKPNPGSECASSLPTHPDA

SEQ ID NO: 10312 - protein, 126 aa, Artificial Sequence
  Synthetic polypeptide
METSYKILELDYLVQKKATIAASRQASSPNTSTTQQQTTTTQASINLATTSAAQLISRSQSVSSPSATTLTQSVLLGNTTSPPLNQSQAQMYLRPQLGNLLQSSRRCHLLSLLEFMQMQIRFRTWQ

SEQ ID NO: 10313 - protein, 121 aa, Artificial Sequence
  Synthetic polypeptide
DFRVRLLSTKKGHNCCQSAGQLPKHQHYTAADYHHPGLDQSGHHIGRPAHQPIPECELSQCYHLDPICATGEHHLPTPQPVSGPDVSTATAGKPIAVQQEVPSAQSPGVHADADQVQNLAV

SEQ ID NO: 10314 - protein, 83 aa, Artificial Sequence
  Synthetic polypeptide
METSYKILELDYLVQKKATIAASRQASSPNTSTTQQQTTTTQASINLATTSAAQLISRSQSVSSPSATTLTQSVLLGNTTSPP

SEQ ID NO: 10315 - protein, 77 aa, Artificial Sequence
  Synthetic polypeptide
DFRVRLLSTKKGHNCCQSAGQLPKHQHYTAADYHHPGLDQSGHHIGRPAHQPIPECELSQCYHLDPICATGEHHLPT

SEQ ID NO: 10316 - protein, 46 aa, Artificial Sequence
  Synthetic polypeptide
KVCGTFPFSFSCSGHVRHTSFLFAFHHDCIFPETSPAMLPVQPWPC

SEQ ID NO: 10317 - protein, 46 aa, Artificial Sequence; identical to SEQ ID NO: 10316
  Synthetic polypeptide

SEQ ID NO: 10318 - protein, 37 aa, Artificial Sequence
  Synthetic polypeptide
DIPPSSLPSTMIVYFLRPLQPCFPYSLGLANKFTSKL

SEQ ID NO: 10319 - protein, 37 aa, Artificial Sequence; identical to SEQ ID NO: 10318
  Synthetic polypeptide

SEQ ID NO: 10320 - protein, 64 aa, Artificial Sequence
  Synthetic polypeptide
DLSSHASRTALALLTSLPPNYEISEGKPRAISAYVRAGKGNVTRRRKKTHLGNDDGKKEAQEKM

SEQ ID NO: 10321 - protein, 64 aa, Artificial Sequence; identical to SEQ ID NO: 10320
  Synthetic polypeptide

SEQ ID NO: 10322 - protein, 171 aa, Artificial Sequence
  Synthetic polypeptide
VASQSGQIQNVRSRSSQWKPDTAVGWTRQETQRLLAEPVPGIKAEPDESNARYFHVVIAGPQDSPFEGGTFKLELFLPEEYPMAAPKVRFMTKIYHPNVDKLGRICLDILKDKWSPALQIRTVLLSIQALLSAPNPDDPLANDVAEQWKTNEAQAIETARAWTRLYAMNNI

SEQ ID NO: 10323 - protein, 66 aa, Artificial Sequence
  Synthetic polypeptide
GGRVRKPSVCWQNQFLASKPNQMRATPVIFMWSLLALRIPPLREGLLNLNYSFQKNTQWQPLKYVS

SEQ ID NO: 10324 - protein, 66 aa, Artificial Sequence; identical to SEQ ID NO: 10323
  Synthetic polypeptide

SEQ ID NO: 10325 - protein, 66 aa, Artificial Sequence; identical to SEQ ID NO: 10323
  Synthetic polypeptide

SEQ ID NO: 10326 - protein, 44 aa, Artificial Sequence
  Synthetic polypeptide
PVRTNTECEIPFQPVETGHSSRVDASGNPAFAGRTSSWHQSRTR

SEQ ID NO: 10327 - protein, 44 aa, Artificial Sequence; identical to SEQ ID NO: 10326
  Synthetic polypeptide

SEQ ID NO: 10328 - protein, 44 aa, Artificial Sequence; identical to SEQ ID NO: 10326
  Synthetic polypeptide

SEQ ID NO: 10329 - protein, 44 aa, Artificial Sequence; identical to SEQ ID NO: 10326
  Synthetic polypeptide

SEQ ID NO: 10330 - protein, 171 aa, Artificial Sequence
  Synthetic polypeptide
VASQSGQIQNVRSRSSQWKPDTAVGWTRQETQRLLAEPVPGIKAEPDESNARYFHVVIAGPQDSPFEGGTFKLELFLPEEYPMAAPKVRFMTKIYHPNVDKLGRICLDILKGKCYLYQHMLLLSFLLFLLSIPCLECKHYTKIREVCGREVKQFWACFFHALSYWACCLHR

SEQ ID NO: 10331 - protein, 106 aa, Artificial Sequence
  Synthetic polypeptide
VASQSGQIQNVRSRSSQWKPDTAVGWTRQETQRLLAEPVPGIKAEPDESNARYFHVVIAGPQDSPFEGGTFKLELFLPEEYPMAAPKISGPQHCRSAQFCYRSRPC

SEQ ID NO: 10332 - protein, 63 aa, Artificial Sequence
  Synthetic polypeptide
GGRVRKPSVCWQNQFLASKPNQMRATPVIFMWSLLALRIPPLREGLLNLNYSFQKNTQWQPLK

SEQ ID NO: 10333 - protein, 124 aa, Artificial Sequence
  Synthetic polypeptide
VASQSGQIQNVRSRSSQWKPDTAVGWTRQETQRLLAEPVPGIKAEPDESNARYFHVVIAGPQDSPFEGGTFKLELFLPEEYPMAAPKVRFMTKIYHPNVDKLGRICLDILKARAWTRLYAMNNI

SEQ ID NO: 10334 - protein, 21 aa, Artificial Sequence
  Synthetic polypeptide
GVPFTFCHDCEASPPHGTVTD

SEQ ID NO: 10335 - protein, 21 aa, Artificial Sequence
  Synthetic polypeptide
GVPFTFCHDCEASPPHGTVTD

SEQ ID NO: 10336 - protein, 34 aa, Artificial Sequence
  Synthetic polypeptide
GGVSLHKLSSGLLPCEVCLSPSAMIVKPPHHMER

SEQ ID NO: 10337 - protein, 34 aa, Artificial Sequence; identical to SEQ ID NO: 10336
  Synthetic polypeptide

SEQ ID NO: 10338 - protein, 107 aa, Artificial Sequence
  Synthetic polypeptide
SLPTTWNGDRLTGIPSHILNSSPSDRQINQLAQRLGPEWEPMVLSLGLSQTDIYRCKANHPHNVQSQVVEAFIRWRQRFGKQATFQSLHNGLRAVEVDPSLLLHMLE

SEQ ID NO: 10339 - protein, 107 aa, Artificial Sequence; identical to SEQ ID NO: 10338
  Synthetic polypeptide

SEQ ID NO: 10340 - protein, 6 aa, Artificial Sequence
  Synthetic polypeptide
NTQHFL

SEQ ID NO: 10341 - protein, 6 aa, Artificial Sequence
  Synthetic polypeptide
NTQHFL

SEQ ID NO: 10342 - protein, 115 aa, Artificial Sequence
  Synthetic polypeptide
CNQAEYPHTEIHNIFCDRLTGIPSHILNSSPSDRQINQLAQRLGPEWEPMVLSLGLSQTDIYRCKANHPHNVQSQVVEAFIRWRQRFGKQATFQSLHNGLRAVEVDPSLLLHMLE

SEQ ID NO: 10343 - protein, 115 aa, Artificial Sequence; identical to SEQ ID NO: 10342
  Synthetic polypeptide

SEQ ID NO: 10344 - protein, 50 aa, Artificial Sequence
  Synthetic polypeptide
VTKQHTYICLHCDITFVVILQVQESEPPLSFSAIKQSIHILKYTTFSVTD

SEQ ID NO: 10345 - protein, 50 aa, Artificial Sequence; identical to SEQ ID NO: 10344
  Synthetic polypeptide

SEQ ID NO: 10346 - protein, 52 aa, Artificial Sequence
  Synthetic polypeptide
EVRSPSARQPPRLGSEERLRPAATRPGGRWGCQSPAWPAASSGRFRHKKDCP

SEQ ID NO: 10347 - protein, 503 aa, Artificial Sequence
  Synthetic polypeptide
GAPLPGSHPVWEVRSVSARQPPVREGGGGVSPPPGQPPRPGGSDTKRTVHEFINDQRDRFLLEYALSTKRNTIKKFEKDIAMRERQLKKAEKKLQDDALAFEEFLRENDQRSVDALKMAAQETINKLQMTAELKKASMEVQAVKSEIAKTEFLLREYMKYGFFLLQMSPKHWQIQQALKRAQASKSKANIILPKILAKLSLHSSNKEGILEESGRTAVLSEDASQGRDSQGKPSRSLTRTPEKKKSNLAESFGSEDSLEFLLDDEMDVDLEPALYFKEPEELLQVLRELEEQNLTLFQYSQDVDENLEEVNKREKVIQDKTNSNIEFLLEQEKMLKANCVREEEKAAELQLKSKLFSFGEFNSDAQEILIDSLSKKITQVYKVCIGDAEDDGLNPIQKLVKVESRLVELCDLIESIPKENVEAIERMKQKEWRQKFRDEKMKEKQRHQQERLKAALEKAVAQPKKKLGRRLVFHSKPPSGNKQQLPLVNETKTKSQEEEYFFT

SEQ ID NO: 10348 - protein, 66 aa, Artificial Sequence
  Synthetic polypeptide
GASPPGSHPSGREVGVSVPRLASRLVREVPTQKGLSMNLLMTRETGFCSSMLCQPKETQSKSLKKT

SEQ ID NO: 10349 - protein, 39 aa, Artificial Sequence
  Synthetic polypeptide
EVPTQKGLSMNLLMTRETGFCSSMLCQPKETQSKSLKKT

SEQ ID NO: 10350 - protein, 36 aa, Artificial Sequence
  Synthetic polypeptide
EVRRPSAWQPPCLRSEEPLRPAAAPSEKFRHKKDCP

SEQ ID NO: 10351 - protein, 476 aa, Artificial Sequence
  Synthetic polypeptide
EVRSPSAQQPPRLRSSDTKRTVHEFINDQRDRFLLEYALSTKRNTIKKFEKDIAMRERQLKKAEKKLQDDALAFEEFLRENDQRSVDALKMAAQETINKLQMTAELKKASMEVQAVKSEIAKTEFLLREYMKYGFFLLQMSPKHWQIQQALKRAQASKSKANIILPKILAKLSLHSSNKEGILEESGRTAVLSEDASQGRDSQGKPSRSLTRTPEKKKSNLAESFGSEDSLEFLLDDEMDVDLEPALYFKEPEELLQVLRELEEQNLTLFQYSQDVDENLEEVNKREKVIQDKTNSNIEFLLEQEKMLKANCVREEEKAAELQLKSKLFSFGEFNSDAQEILIDSLSKKITQVYKVCIGDAEDDGLNPIQKLVKVESRLVELCDLIESIPKENVEAIERMKQKEWRQKFRDEKMKEKQRHQQERLKAALEKAVAQPKKKLGRRLVFHSKPPSGNKQQLPLVNETKTKSQEEEYFFT

SEQ ID NO: 10352 - protein, 18 aa, Artificial Sequence
  Synthetic polypeptide
EVRSLSARQPPHLGKMDL

SEQ ID NO: 10353 - protein, 18 aa, Artificial Sequence
  Synthetic polypeptide
EVRSLSARQPPHLGKMDL

SEQ ID NO: 10354 - protein, 22 aa, Artificial Sequence
  Synthetic polypeptide
GASPPGSHPIWERWIYKSYWSC

SEQ ID NO: 10355 - protein, 22 aa, Artificial Sequence
  Synthetic polypeptide
GASPPGSHPIWERWIYKSYWSC

SEQ ID NO: 10356 - protein, 408 aa, Artificial Sequence
  Synthetic polypeptide
EVRSPSARQLPRLRSEEPLRPAATPSGKDGFIKAIGPADVIQRQFSGETFEEIIDCSGKCILPGLVDAHTHPVWAGERVHEFAMKLAGATYMEIHQAGGGIHFTVERTRQATEEELFRSLQQRLQCMMRAGTTLVECKSGYGLDLETELKMLRVIERARRELDIGISATYCGAHSVPKGKTATEAADDIINNHLPKLKELGRNGEIHVDNIDVFCEKGVFDLDSTRRILQRGKDIGLQINFHGDELHPMKAAELGAELGAQAISHLEEVSDEGIVAMATARCSAILLPTTAYMLRLKQPRARKMLDEGVIVALGSDFNPNAYCFSMPMVMHLACVNMRMSMPEALAAATINAAYALGKSHTHGSLEVGKQGDLIIINSSRWEHLIYQFGGHHELIEYVIAKGKLIYKT

SEQ ID NO: 10357 - protein, 133 aa, Artificial Sequence
  Synthetic polypeptide
EVRSPSARQLPRLRSEEPLRPAATPSGKDGFIKAIGPADVIQRQFSGETFEEIIDCSGKCILPVGRSHLHGNSPGRRRDPLYRGAHAPSHRGGAVPLLAATAPVHDEGWHHAGGVQEWIWPRPGDRAQDAARD

SEQ ID NO: 10358 - protein, 72 aa, Artificial Sequence
  Synthetic polypeptide
VLMRSDSLKVALPPLFSLFSHPAKRVLAFPLLSAIITSFLSPRQPCGTAQSCRKTSDLLHQEMILKYGMLHL

SEQ ID NO: 10359 - protein, 72 aa, Artificial Sequence; identical to SEQ ID NO: 10358
  Synthetic polypeptide

SEQ ID NO: 10360 - protein, 22 aa, Artificial Sequence
  Synthetic polypeptide
VLASHVELRSHAGKPQICFIRR

SEQ ID NO: 10361 - protein, 22 aa, Artificial Sequence
  Synthetic polypeptide
VLASHVELRSHAGKPQICFIRR

SEQ ID NO: 10362 - protein, 204 aa, Artificial Sequence
  Synthetic polypeptide
FKSGSSSFVLSFLPPREEGACFPFAFCHNYKFPESSPAMWNCAVMQENLRFASSGDDIKIWDASSMTLVDKFNPHTSPHGISSICWSSNNNFLVTASSSGDKIVVSSCKCKPVPLLELAEGQKQTCVNLNSTSMYLVSGGLNNTVNIWDLKSKRVHRSLKDHKDQVTCVTYNWNDCYIASGSLSGEIILHSVTTNLSSTPFGHG

SEQ ID NO: 10363 - protein, 704 aa, Artificial Sequence
  Synthetic polypeptide
FKSGSSSFVLSFLPPREEGACFPFAFCHNYKFPESSPAMWNCAVMQENLRFASSGDDIKIWDASSMTLVDKFNPHTSPHGISSICWSSNNNFLVTASSSGDKIVVSSCKCKPVPLLELAEGQKQTCVNLNSTSMYLVSGGLNNTVNIWDLKSKRVHRSLKDHKDQVTCVTYNWNDCYIASGSLSGEIILHSVTTNLSSTPFGHGSNQSVRHLKYSLFKKSLLGSVSDNGIVTLWDVNSQSPYHNFDSVHKAPASGICFSPVNELLFVTIGLDKRIILYDTSSKKLVKTLVADTPLTAVDFMPDGATLAIGSSRGKIYQYDLRMLKSPVKTISAHKTSVQCIAFQYSTVLTKSSLNKGCSNKPTTVNKRSVNVNAASGGVQNSGIVREAPATSIATVLPQPMTSAMGKGTVAVQEKAGLPRSINTDTLSKETDSGKNQDFSSFDDTGKSSLGDMFSPIRDDAVVNKGSDESIGKGDGFDFLPQLNSVFPPRKNPVTSSTSVLHSSPLNVFMGSPGKEENENRDLTAESKKIYMGKQESKDSFKQLAKLVTSGAESGNLNTSPSSNQTRNSEKFEKPENEIEAQLICEPPINGSSTPNPKIASSVTAGVASSLSEKIADSIGNNRQNAPLTSIQIRFIQNMIQETLDDFREACHRDIVNLQVEMIKQFHMQLNEMHSLLERYSVNEGLVAEIERLREENKRLRAHF

SEQ ID NO: 10364 - protein, 63 aa, Artificial Sequence
  Synthetic polypeptide
WVYQGFLLLHLSLFLLLLPHKKCLSPPAMILRPPQPCGTAQSCRKTSDLLHQEMILKYGMLHL

SEQ ID NO: 10365 - protein, 63 aa, Artificial Sequence; identical to SEQ ID NO: 10364
  Synthetic polypeptide

SEQ ID NO: 10366 - protein, 22 aa, Artificial Sequence
  Synthetic polypeptide
GLPSHVELRSHAGKPQICFIRR

SEQ ID NO: 10367 - protein, 22 aa, Artificial Sequence
  Synthetic polypeptide
GLPSHVELRSHAGKPQICFIRR

SEQ ID NO: 10368 - protein, 181 aa, Artificial Sequence
  Synthetic polypeptide
EVPFSSCHDSEASPAMWNCAVMQENLRFASSGDDIKIWDASSMTLVDKFNPHTSPHGISSICWSSNNNFLVTASSSGDKIVVSSCKCKPVPLLELAEGQKQTCVNLNSTSMYLVSGGLNNTVNIWDLKSKRVHRSLKDHKDQVTCVTYNWNDCYIASGSLSGEIILHSVTTNLSSTPFGHG

SEQ ID NO: 10369 - protein, 681 aa, Artificial Sequence
  Synthetic polypeptide
EVPFSSCHDSEASPAMWNCAVMQENLRFASSGDDIKIWDASSMTLVDKFNPHTSPHGISSICWSSNNNFLVTASSSGDKIVVSSCKCKPVPLLELAEGQKQTCVNLNSTSMYLVSGGLNNTVNIWDLKSKRVHRSLKDHKDQVTCVTYNWNDCYIASGSLSGEIILHSVTTNLSSTPFGHGSNQSVRHLKYSLFKKSLLGSVSDNGIVTLWDVNSQSPYHNFDSVHKAPASGICFSPVNELLFVTIGLDKRIILYDTSSKKLVKTLVADTPLTAVDFMPDGATLAIGSSRGKIYQYDLRMLKSPVKTISAHKTSVQCIAFQYSTVLTKSSLNKGCSNKPTTVNKRSVNVNAASGGVQNSGIVREAPATSIATVLPQPMTSAMGKGTVAVQEKAGLPRSINTDTLSKETDSGKNQDFSSFDDTGKSSLGDMFSPIRDDAVVNKGSDESIGKGDGFDFLPQLNSVFPPRKNPVTSSTSVLHSSPLNVFMGSPGKEENENRDLTAESKKIYMGKQESKDSFKQLAKLVTSGAESGNLNTSPSSNQTRNSEKFEKPENEIEAQLICEPPINGSSTPNPKIASSVTAGVASSLSEKIADSIGNNRQNAPLTSIQIRFIQNMIQETLDDFREACHRDIVNLQVEMIKQFHMQLNEMHSLLERYSVNEGLVAEIERLREENKRLRAHF

SEQ ID NO: 10370 - protein, 622 aa, Artificial Sequence
  Synthetic polypeptide
WVYQGFLLLHLSLFLLLLPHKKCLSPPAMILRPPQPCGTQKQTCVNLNSTSMYLVSGGLNNTVNIWDLKSKRVHRSLKDHKDQVTCVTYNWNDCYIASGSLSGEIILHSVTTNLSSTPFGHGSNQSVRHLKYSLFKKSLLGSVSDNGIVTLWDVNSQSPYHNFDSVHKAPASGICFSPVNELLFVTIGLDKRIILYDTSSKKLVKTLVADTPLTAVDFMPDGATLAIGSSRGKIYQYDLRMLKSPVKTISAHKTSVQCIAFQYSTVLTKSSLNKGCSNKPTTVNKRSVNVNAASGGVQNSGIVREAPATSIATVLPQPMTSAMGKGTVAVQEKAGLPRSINTDTLSKETDSGKNQDFSSFDDTGKSSLGDMFSPIRDDAVVNKGSDESIGKGDGFDFLPQLNSVFPPRKNPVTSSTSVLHSSPLNVFMGSPGKEENENRDLTAESKKIYMGKQESKDSFKQLAKLVTSGAESGNLNTSPSSNQTRNSEKFEKPENEIEAQLICEPPINGSSTPNPKIASSVTAGVASSLSEKIADSIGNNRQNAPLTSIQIRFIQNMIQETLDDFREACHRDIVNLQVEMIKQFHMQLNEMHSLLERYSVNEGLVAEIERLREENKRLRAHF

SEQ ID NO: 10371 - protein, 622 aa, Artificial Sequence; identical to SEQ ID NO: 10370
  Synthetic polypeptide

SEQ ID NO: 10372 - protein, 622 aa, Artificial Sequence; identical to SEQ ID NO: 10370
  Synthetic polypeptide

SEQ ID NO: 10373 - protein, 15 aa, Artificial Sequence
  Synthetic polypeptide
GLPSHVELKSRHVSI

SEQ ID NO: 10374 - protein, 15 aa, Artificial Sequence
  Synthetic polypeptide
GLPSHVELKSRHVSI

SEQ ID NO: 10375 - protein, 15 aa, Artificial Sequence
  Synthetic polypeptide
GLPSHVELKSRHVSI

SEQ ID NO: 10376 - protein, 15 aa, Artificial Sequence
  Synthetic polypeptide
GLPSHVELKSRHVSI

SEQ ID NO: 10377 - protein, 15 aa, Artificial Sequence
  Synthetic polypeptide
GLPSHVELKSRHVSI

SEQ ID NO: 10378 - protein, 15 aa, Artificial Sequence
  Synthetic polypeptide
GLPSHVELKSRHVSI

SEQ ID NO: 10379 - protein, 39 aa, Artificial Sequence
  Synthetic polypeptide
EVPFSSCHDSEASPAMWNSKADMCQFKFYIYVFGKRRPK

SEQ ID NO: 10380 - protein, 39 aa, Artificial Sequence; identical to SEQ ID NO: 10379
  Synthetic polypeptide

SEQ ID NO: 10381 - protein, 39 aa, Artificial Sequence; identical to SEQ ID NO: 10379
  Synthetic polypeptide

SEQ ID NO: 10382 - protein, 39 aa, Artificial Sequence; identical to SEQ ID NO: 10379
  Synthetic polypeptide

SEQ ID NO: 10383 - protein, 39 aa, Artificial Sequence; identical to SEQ ID NO: 10379
  Synthetic polypeptide

SEQ ID NO: 10384 - protein, 39 aa, Artificial Sequence; identical to SEQ ID NO: 10379
  Synthetic polypeptide

SEQ ID NO: 10385 - protein, 122 aa, Artificial Sequence
  Synthetic polypeptide
WVYQGFLLLHLSLFLLLLPHKKCLSPPAMILRPPQPCGTQKQTCVNLNSTSMYLVSGGLNNTVNIWDLKSKRVHRSLKDHKDQVTCVTYNWNDCYIASGSLSGEIILHSVTTNLSSTPFGHG

SEQ ID NO: 10386 - protein, 126 aa, Artificial Sequence
  Synthetic polypeptide
WVYQGFLLLHLSLFLLLLPHKKCLSPPAMILRPPQPCGTQKQTCVNLNSTSMYLVSGGLNNTVNIWDLKSKRVHRSLKDHKDQVTCVTYNWNDCYIASGSLSGEIILHSVTTNLSSTPFGHGSNQS

SEQ ID NO: 10387 - protein, 62 aa, Artificial Sequence
  Synthetic polypeptide
WVYQGFLLLHLSLFLLLLPHKKCLSPPAMILRPPQPCGTQKQTCVNLNSTSMYLVSGGLNNT

SEQ ID NO: 10388 - protein, 536 aa, Artificial Sequence
  Synthetic polypeptide
WVYQGFLLLHLSLFLLLLPHKKCLSPPAMILRPPQPCGTSVRHLKYSLFKKSLLGSVSDNGIVTLWDVNSQSPYHNFDSVHKAPASGICFSPVNELLFVTIGLDKRIILYDTSSKKLVKTLVADTPLTAVDFMPDGATLAIGSSRGKIYQYDLRMLKSPVKTISAHKTSVQCIAFQYSTVLTKSSLNKGCSNKPTTVNKRSVNVNAASGGVQNSGIVREAPATSIATVLPQPMTSAMGKGTVAVQEKAGLPRSINTDTLSKETDSGKNQDFSSFDDTGKSSLGDMFSPIRDDAVVNKGSDESIGKGDGFDFLPQLNSVFPPRKNPVTSSTSVLHSSPLNVFMGSPGKEENENRDLTAESKKIYMGKQESKDSFKQLAKLVTSGAESGNLNTSPSSNQTRNSEKFEKPENEIEAQLICEPPINGSSTPNPKIASSVTAGVASSLSEKIADSIGNNRQNAPLTSIQIRFIQNMIQETLDDFREACHRDIVNLQVEMIKQFHMQLNEMHSLLERYSVNEGLVAEIERLREENKRLRAHF

SEQ ID NO: 10389 - protein, 536 aa, Artificial Sequence; identical to SEQ ID NO: 10388
  Synthetic polypeptide

SEQ ID NO: 10390 - protein, 536 aa, Artificial Sequence; identical to SEQ ID NO: 10388
  Synthetic polypeptide

SEQ ID NO: 10391 - protein, 536 aa, Artificial Sequence; identical to SEQ ID NO: 10388
  Synthetic polypeptide

SEQ ID NO: 10392 - protein, 536 aa, Artificial Sequence; identical to SEQ ID NO: 10388
  Synthetic polypeptide

SEQ ID NO: 10393 - protein, 12 aa, Artificial Sequence
  Synthetic polypeptide
GLPSHVELLFGT

SEQ ID NO: 10394 - protein, 12 aa, Artificial Sequence
  Synthetic polypeptide
GLPSHVELLFGT

SEQ ID NO: 10395 - protein, 12 aa, Artificial Sequence
  Synthetic polypeptide
GLPSHVELLFGT

SEQ ID NO: 10396 - protein, 12 aa, Artificial Sequence
  Synthetic polypeptide
GLPSHVELLFGT

SEQ ID NO: 10397 - protein, 12 aa, Artificial Sequence
  Synthetic polypeptide
GLPSHVELLFGT

SEQ ID NO: 10398 - protein, 12 aa, Artificial Sequence
  Synthetic polypeptide
GLPSHVELLFGT

SEQ ID NO: 10399 - protein, 28 aa, Artificial Sequence
  Synthetic polypeptide
EVPFSSCHDSEASPAMWNFCSALEVLLV

SEQ ID NO: 10400 - protein, 28 aa, Artificial Sequence
  Synthetic polypeptide
EVPFSSCHDSEASPAMWNFCSALEVLLV

SEQ ID NO: 10401 - protein, 28 aa, Artificial Sequence
  Synthetic polypeptide
EVPFSSCHDSEASPAMWNFCSALEVLLV

SEQ ID NO: 10402 - protein, 28 aa, Artificial Sequence
  Synthetic polypeptide
EVPFSSCHDSEASPAMWNFCSALEVLLV

SEQ ID NO: 10403 - protein, 28 aa, Artificial Sequence
  Synthetic polypeptide
EVPFSSCHDSEASPAMWNFCSALEVLLV

SEQ ID NO: 10404 - protein, 28 aa, Artificial Sequence
  Synthetic polypeptide
EVPFSSCHDSEASPAMWNFCSALEVLLV

SEQ ID NO: 10405 - protein, 40 aa, Artificial Sequence
  Synthetic polypeptide
WVYQGFLLLHLSLFLLLLPHKKCLSPPAMILRPPQPCGTS

SEQ ID NO: 10406 - protein, 9 aa, Artificial Sequence
  Synthetic polypeptide
GLPSHVELL

SEQ ID NO: 10407 - protein, 20 aa, Artificial Sequence
  Synthetic polypeptide
EVPFSSCHDSEASPAMWNFC

SEQ ID NO: 10408 - protein, 125 aa, Artificial Sequence
  Synthetic polypeptide
WVYQGFLLLHLSLFLLLLPHKKCLSPPAMILRPPQPCGTSVRHLKYSLFKKSLLGSVSDNGIVTLWDVNSQSPYHNFDSVHKAPASGICFSPVNELLFVTIGLDKRIILYDTSSKKLVKTLVADT

SEQ ID NO: 10409 - protein, 14 aa, Artificial Sequence
  Synthetic polypeptide
QVVCIQKSILLKLP

SEQ ID NO: 10410 - protein, 14 aa, Artificial Sequence
  Synthetic polypeptide
QVVCIQKSILLKLP

SEQ ID NO: 10411 - protein, 14 aa, Artificial Sequence
  Synthetic polypeptide
QVVCIQKSILLKLP

SEQ ID NO: 10412 - protein, 14 aa, Artificial Sequence
  Synthetic polypeptide
QVVCIQKSILLKLP

SEQ ID NO: 10413 - protein, 14 aa, Artificial Sequence
  Synthetic polypeptide
QVVCIQKSILLKLP

SEQ ID NO: 10414 - protein, 14 aa, Artificial Sequence
  Synthetic polypeptide
QVVCIQKSILLKLP

SEQ ID NO: 10415 - protein, 14 aa, Artificial Sequence
  Synthetic polypeptide
QVVCIQKSILLKLP

SEQ ID NO: 10416 - protein, 56 aa, Artificial Sequence
  Synthetic polypeptide
HSHLFWRMPLIASVEHVHPFPVAYKLWVWPVTEWVIPVLQPSEITLLVFLEKQVET

SEQ ID NO: 10417 - protein, 56 aa, Artificial Sequence; identical to SEQ ID NO: 10416
  Synthetic polypeptide

SEQ ID NO: 10418 - protein, 56 aa, Artificial Sequence; identical to SEQ ID NO: 10416
  Synthetic polypeptide

SEQ ID NO: 10419 - protein, 56 aa, Artificial Sequence; identical to SEQ ID NO: 10416
  Synthetic polypeptide

SEQ ID NO: 10420 - protein, 56 aa, Artificial Sequence; identical to SEQ ID NO: 10416
  Synthetic polypeptide

SEQ ID NO: 10421 - protein, 43 aa, Artificial Sequence
  Synthetic polypeptide
QSGLYLSCSHPRSRFLSFSRSRWKHEHSVSWYSGSRRSRNLCD

SEQ ID NO: 10422 - protein, 43 aa, Artificial Sequence; identical to SEQ ID NO: 10421
  Synthetic polypeptide

SEQ ID NO: 10423 - protein, 88 aa, Artificial Sequence
  Synthetic polypeptide
ALGLASNRVGYTCLAAIRDHASCLSREAGGNMSIQFLGTVVAEGQEICVIEAMKMQNSMTAGKTGTVKSVHCQAGDTVGEGDLLVELE

SEQ ID NO: 10424 - protein, 88 aa, Artificial Sequence; identical to SEQ ID NO: 10423
  Synthetic polypeptide

SEQ ID NO: 10425 - protein, 55 aa, Artificial Sequence
  Synthetic polypeptide
QSGLYLSCSHPRSRFLSFSRSRWKHEHSVSWYSVQGEYLNQTCRRIEQIYAGKSD

SEQ ID NO: 10426 - protein, 55 aa, Artificial Sequence; identical to SEQ ID NO: 10425
  Synthetic polypeptide

SEQ ID NO: 10427 - protein, 135 aa, Artificial Sequence
  Synthetic polypeptide
ALGLASNRVGYTCLAAIRDHASCLSREAGGNMSIQFLGTVYKVNILTRLAAELNKFMLEKVTEDTSSVLRSPMPGVVVAVSVKPGDAVAEGQEICVIEAMKMQNSMTAGKTGTVKSVHCQAGDTVGEGDLLVELE

SEQ ID NO: 10428 - protein, 135 aa, Artificial Sequence; identical to SEQ ID NO: 10427
  Synthetic polypeptide

SEQ ID NO: 10429 - protein, 41 aa, Artificial Sequence
  Synthetic polypeptide
QSGLYLSCSHPRSRFLSFSRSRWKHEHSVSWYSALEKASGL

SEQ ID NO: 10430 - protein, 47 aa, Artificial Sequence
  Synthetic polypeptide
ALGLASNRVGYTCLAAIRDHASCLSREAGGNMSIQFLGTVPWRKLLD

SEQ ID NO: 10431 - protein, 143 aa, Artificial Sequence
  Synthetic polypeptide
HSHLFWRMPLIASVEHVHPFPVAYKLWVWPVTEWVIPVLQPSEITLLSYKVNILTRLAAELNKFMLEKVTEDTSSVLRSPMPGVVVAVSVKPGDAVAEGQEICVIEAMKMQNSMTAGKTGTVKSVHCQAGDTVGEGDLLVELE

SEQ ID NO: 10432 - protein, 143 aa, Artificial Sequence; identical to SEQ ID NO: 10431
  Synthetic polypeptide

SEQ ID NO: 10433 - protein, 19 aa, Artificial Sequence
  Synthetic polypeptide
QSGLYLSCSHPRSRFCLTR

SEQ ID NO: 10434 - protein, 19 aa, Artificial Sequence
  Synthetic polypeptide
QSGLYLSCSHPRSRFCLTR

SEQ ID NO: 10435 - protein, 19 aa, Artificial Sequence
  Synthetic polypeptide
QSGLYLSCSHPRSRFCLTR

SEQ ID NO: 10436 - protein, 45 aa, Artificial Sequence
  Synthetic polypeptide
ALGLASNRVGYTCLAAIRDHASVLQGEYLNQTCRRIEQIYAGKSD

SEQ ID NO: 10437 - protein, 45 aa, Artificial Sequence; identical to SEQ ID NO: 10436
  Synthetic polypeptide

SEQ ID NO: 10438 - protein, 45 aa, Artificial Sequence; identical to SEQ ID NO: 10436
  Synthetic polypeptide

SEQ ID NO: 10439 - protein, 159 aa, Artificial Sequence
  Synthetic polypeptide
HSHLFWRMPLIASVEHVHPFPVAYKLWVWPVTEWVIPVLQPSEITLLSYKVNILTRLAAELNKFMLEKVTEDTSSVLRSPMPGVVVAVSVKPGDAATSSLSVEICLFWTFQVAEGQEICVIEAMKMQNSMTAGKTGTVKSVHCQAGDTVGEGDLLVELE

SEQ ID NO: 10440 - protein, 10 aa, Artificial Sequence
  Synthetic polypeptide
SPCSQVELPW

SEQ ID NO: 10441 - protein, 10 aa, Artificial Sequence
  Synthetic polypeptide
SPCSQVELPW

SEQ ID NO: 10442 - protein, 390 aa, Artificial Sequence
  Synthetic polypeptide
NCHGKCDCGKCKCDQGWYGDACQYPTNCDLTKKKSNQMCKNSQDIICSNAGTCHCGRCKCDNSDGSGLVYGKFCECDDRECIDDETEEICGGHGKCYCGNCYCKAGWHGDKCEFQCDITPWESKRRCTSPDGKICSNRGTCVCGECTCHDVDPTGDWGDIHGDTCECDERDCRAVYDRYSDDFCSGHGQCNCGRCDCKAGWYGKKCEHPQSCTLSAEESIRKCQGSSDLPCSGRGKCECGKCTCYPPGDRRVYGKTCECDDRRCEDLDGVVCGGHGTCSCGRCVCERGWFGKLCQHPRKCNMTEEQSKNLCESADGILCSGKGSCHCGKCICSAEEWYISGEFCDCDDRDCDKHDGLICTGNGICSCGNCECWDGWNGNACEIWLGSEYP

SEQ ID NO: 10443 - protein, 390 aa, Artificial Sequence; identical to SEQ ID NO: 10442
  Synthetic polypeptide

SEQ ID NO: 10444 - protein, 65 aa, Artificial Sequence
  Synthetic polypeptide
KWHFCLCSFSPAAIKDLLCFPFCHDLSFLKSLQPSRTAMVSVTVASASVTRDGMGMLASTQLTVT

SEQ ID NO: 10445 - protein, 65 aa, Artificial Sequence; identical to SEQ ID NO: 10444
  Synthetic polypeptide

SEQ ID NO: 10446 - protein, 18 aa, Artificial Sequence
  Synthetic polypeptide
VPTCSEALWTAMTAMDLC

SEQ ID NO: 10447 - protein, 18 aa, Artificial Sequence
  Synthetic polypeptide
VPTCSEALWTAMTAMDLC

SEQ ID NO: 10448 - protein, 18 aa, Artificial Sequence
  Synthetic polypeptide
VPTCSEALWTAMTAMDLC

SEQ ID NO: 10449 - protein, 14 aa, Artificial Sequence
  Synthetic polypeptide
SRESPHAQRPYGQR

SEQ ID NO: 10450 - protein, 14 aa, Artificial Sequence
  Synthetic polypeptide
SRESPHAQRPYGQR

SEQ ID NO: 10451 - protein, 14 aa, Artificial Sequence
  Synthetic polypeptide
SRESPHAQRPYGQR

SEQ ID NO: 10452 - protein, 141 aa, Artificial Sequence
  Synthetic polypeptide
GNLCKAVSPHMLRGPMDSDDSHGSVLRLSQALGNVTVVQKGERDILSNGQQVLVCSQEGSSRRCGGQGDLLSGSLGVLVHWALLAGPQKTNGSSPLLVAAFGACSLTRQCNHQAFQKHGRSTTTSDMIAEVGAAFSKLFET

SEQ ID NO: 10453 - protein, 141 aa, Artificial Sequence; identical to SEQ ID NO: 10452
  Synthetic polypeptide

SEQ ID NO: 10454 - protein, 184 aa, Artificial Sequence
  Synthetic polypeptide
GNLCKAVSPHMLRGPMDSDDSHGSVLRLSQALGNVTVVQKGERDILSNGQQVLVCSQEGSSRRCGGQGDLLSGSLGVLVHWALLAGPQKTNGGISDLKLTIWGPEIETGVKTRAQGSCGPRTTTPTSPHLLLSPSPQVQPSPGGRVWRLLSHQAVQPPSLPEARSLHHHLRHDRRGGGRLQQAL

SEQ ID NO: 10455 - protein, 27 aa, Artificial Sequence
  Synthetic polypeptide
KVCGTCPLSPFLLFWPATVSKCSILGR

SEQ ID NO: 10456 - protein, 27 aa, Artificial Sequence
  Synthetic polypeptide
KVCGTCPLSPFLLFWPATVSKCSILGR

SEQ ID NO: 10457 - protein, 27 aa, Artificial Sequence
  Synthetic polypeptide
KVCGTCPLSPFLLFWPATVSKCSILGR

SEQ ID NO: 10458 - protein, 625 aa, Artificial Sequence
  Synthetic polypeptide
GLVVEKCVAPAPSLPFSCSGQQQYQSALFWADKVASLSREEPQDIYWLAQCLYLTAQYHRAAHALRSRKLDKLYEACRYLAARCHYAAKEHQQALDVLDMEEPINKRLFEKYLKDESGFKDPSSDWEMSQSSIKSSICLLRGKIYDALDNRTLATYSYKEALKLDVYCFEAFDLLTSHHMLTAQEEKELLESLPLSKLCNEEQELLRFLFENKLKKYNKPSETVIPESVDGLQENLDVVVSLAERHYYNCDFKMCYKLTSVVMEKDPFHASCLPVHIGTLVELNKANELFYLSHKLVDLYPSNPVSWFAVGCYYLMVGHKNEHARRYLSKATTLEKTYGPAWIAYGHSFAVESEHDQAMAAYFTAAQLMKGCHLPMLYIGLEYGLTNNSKLAERFFSQALSIAPEDPFVMHEVGVVAFQNGEWKTAEKWFLDALEKIKAIGNEVTVDKWEPLLNNLGHVCRKLKKYAEALDYHRQALVLIPQNASTYSAIGYIHSLMGNFENAVDYFHTALGLRRDDTFSVTMLGHCIEMYIGDSEAYIGADIKDKLKCYDFDVHTMKTLKNIISPPWDFREFEVEKQTAEETGLTPLETSRKTPDSRPSLEETFEIEMNESDMMLETSMSDHST

SEQ ID NO: 10459 - protein, 625 aa, Artificial Sequence; identical to SEQ ID NO: 10458
  Synthetic polypeptide

SEQ ID NO: 10460 - protein, 38 aa, Artificial Sequence
  Synthetic polypeptide
VSSCEAWLLKSVWHLPPLSLSLVLASNSIKVLYFGQIK

SEQ ID NO: 10461 - protein, 38 aa, Artificial Sequence; identical to SEQ ID NO: 10460
  Synthetic polypeptide

SEQ ID NO: 10462 - protein, 38 aa, Artificial Sequence; identical to SEQ ID NO: 10460
  Synthetic polypeptide

SEQ ID NO: 10463 - protein, 624 aa, Artificial Sequence
  Synthetic polypeptide
GLVVEKCVAPAPSLPFSCSGQQQYQSALFWADKVASLSREPQDIYWLAQCLYLTAQYHRAAHALRSRKLDKLYEACRYLAARCHYAAKEHQQALDVLDMEEPINKRLFEKYLKDESGFKDPSSDWEMSQSSIKSSICLLRGKIYDALDNRTLATYSYKEALKLDVYCFEAFDLLTSHHMLTAQEEKELLESLPLSKLCNEEQELLRFLFENKLKKYNKPSETVIPESVDGLQENLDVVVSLAERHYYNCDFKMCYKLTSVVMEKDPFHASCLPVHIGTLVELNKANELFYLSHKLVDLYPSNPVSWFAVGCYYLMVGHKNEHARRYLSKATTLEKTYGPAWIAYGHSFAVESEHDQAMAAYFTAAQLMKGCHLPMLYIGLEYGLTNNSKLAERFFSQALSIAPEDPFVMHEVGVVAFQNGEWKTAEKWFLDALEKIKAIGNEVTVDKWEPLLNNLGHVCRKLKKYAEALDYHRQALVLIPQNASTYSAIGYIHSLMGNFENAVDYFHTALGLRRDDTFSVTMLGHCIEMYIGDSEAYIGADIKDKLKCYDFDVHTMKTLKNIISPPWDFREFEVEKQTAEETGLTPLETSRKTPDSRPSLEETFEIEMNESDMMLETSMSDHST

SEQ ID NO: 10464 - protein, 20 aa, Artificial Sequence
  Synthetic polypeptide
AKIAPLHSSLGNRAFWNLSV

SEQ ID NO: 10465 - protein, 87 aa, Artificial Sequence
  Synthetic polypeptide
NPVSTKNTKKKKKKNLAQRGGCPSLKSQLLRRLRQENGVNPGGGACSEPRSHHYTPAWATEHSGIYQYSSGPGQHSRRGQWTLPRDE

SEQ ID NO: 10466 - protein, 137 aa, Artificial Sequence
  Synthetic polypeptide
IREAELAVSQDRTTTLQPGQQSILEFISIAVGLVSIRGVDSGLYLGMNEKGELYGSEKLTQECVFREQFEENWYNTYSSNLYKHVDTGRRYYVALNKDGTPREGTRTKRHQKFTHFLPRPVDPDKVPELYKDILSQS

SEQ ID NO: 10467 - protein, 27 aa, Artificial Sequence
  Synthetic polypeptide
FYIMGCRGALSQGDAGPRWRQGAHAHG

SEQ ID NO: 10468 - protein, 27 aa, Artificial Sequence
  Synthetic polypeptide
FYIMGCRGALSQGDAGPRWRQGAHAHG

SEQ ID NO: 10469 - protein, 50 aa, Artificial Sequence
  Synthetic polypeptide
KNKLRAPTDSTLWAAGERYRREMLAHGGGREPMLMVEGMLQKCPSVDDFV

SEQ ID NO: 10470 - protein, 65 aa, Artificial Sequence
  Synthetic polypeptide
SVTVSHHPWMVPSSCRKTSSGLPLILHYGLPGSAIAGRCWPTVEAGSPCSWLKVCFRSVLLLMTS

SEQ ID NO: 10471 - protein, 65 aa, Artificial Sequence; identical to SEQ ID NO: 10470
  Synthetic polypeptide

SEQ ID NO: 10472 - protein, 69 aa, Artificial Sequence
  Synthetic polypeptide
KNKLRAPTDSTLWAAGERYRREMLAHGGGREPMLMVEGMLQKCPSVDDFVSALVSDLDLDFETFLMDSE

SEQ ID NO: 10473 - protein, 90 aa, Artificial Sequence
  Synthetic polypeptide
NGMKCPLASTNKRFLINTIKNTLPSHKEQDHEQKEGDKEPAKSQAQKEENPKKHRSHPYKHSFRARGSASYSPPRKRSSQDKYEKRSNRR

SEQ ID NO: 10474 - protein, 7 aa, Artificial Sequence
  Synthetic polypeptide
GTSNKMG

SEQ ID NO: 10475 - protein, 17 aa, Artificial Sequence
  Synthetic polypeptide
INRFEEHQIKWDEVSSC

SEQ ID NO: 10476 - protein, 45 aa, Artificial Sequence
  Synthetic polypeptide
CSFFSPIHFSKQASRKNSSEIIIRQLPHPLGGLTLWCSVVTFLIC

SEQ ID NO: 10477 - protein, 45 aa, Artificial Sequence; identical to SEQ ID NO: 10476
  Synthetic polypeptide

SEQ ID NO: 10478 - protein, 6 aa, Artificial Sequence
  Synthetic polypeptide
HSGAVW

SEQ ID NO: 10479 - protein, 6 aa, Artificial Sequence
  Synthetic polypeptide
HSGAVW

SEQ ID NO: 10480 - protein, 352 aa, Artificial Sequence
  Synthetic polypeptide
AGFKKELIRDNHTAASPPFGWVNTLVQCGDFPHLLVYGPSGAGKKTRIMCILRELYGVGVEKLRIEHQTITTPSKKKIEISTIASNYHLEVNPSDAGNSDRVVIQEMLKTVAQSQQLETNSQRDFKVVLLTEVDKLTKDAQHALRRTMEKYMSTCRLILCCNSTSKVIPPIRSRCLAVRVPAPSIEDICHVLSTVCKKEGLNLPSQLAHRLAEKSCRNLRKALLMCEACRVQQYPFTADQEIPETDWEVYLRETANAIVSQQTPQRLLEVRGRLYELLTHCIPPEIIMKGLLSELLHNCDGQLKGEVAQMAAYYEHRLQLGSKAIYHLEAFVAKFMALYKKFMEDGLEGMMF

SEQ ID NO: 10481 - protein, 301 aa, Artificial Sequence
  Synthetic polypeptide
AGFKKELIRDNHTAASPPFGWVNTLVQCGDFPHLLVYGPSGAGKKTRIMCILRELYGVGVEKLRIEHQTITTPSKKKIEISTIASNYHLEVNPSDAGNSDRVVIQEMLKTVAQSQQLETNSQRDFKVVLLTEVDKLTKDAQHALRRTMEKYMSTCRLILCCNSTSKVIPPIRSRCLAVRVPAPSIEDICHVLSTVCKKEGLNLPSQLAHRLAEKSCRNLRKALLMCEACRVQQYPFTADQEIPETDWEVYLRETANAIVSQQTPQRLLEVRGRLYELLTHCIPPEIIMKACKEESRSCDIF

SEQ ID NO: 10482 - protein, 8 aa, Artificial Sequence
  Synthetic polypeptide
SQHFGRPR

SEQ ID NO: 10483 - protein, 8 aa, Artificial Sequence
  Synthetic polypeptide
SQHFGRPR

SEQ ID NO: 10484 - protein, 8 aa, Artificial Sequence
  Synthetic polypeptide
SQHFGRPR

SEQ ID NO: 10485 - protein, 8 aa, Artificial Sequence
  Synthetic polypeptide
SQHFGRPR

SEQ ID NO: 10486 - protein, 8 aa, Artificial Sequence
  Synthetic polypeptide
SQHFGRPR

SEQ ID NO: 10487 - protein, 8 aa, Artificial Sequence
  Synthetic polypeptide
SQHFGRPR

SEQ ID NO: 10488 - protein, 8 aa, Artificial Sequence
  Synthetic polypeptide
SQHFGRPR

SEQ ID NO: 10489 - protein, 8 aa, Artificial Sequence
  Synthetic polypeptide
SQHFGRPR

SEQ ID NO: 10490 - protein, 8 aa, Artificial Sequence
  Synthetic polypeptide
SQHFGRPR

SEQ ID NO: 10491 - protein, 72 aa, Artificial Sequence
  Synthetic polypeptide
AQWLMPVIPTLWEAKVTILHHNRQAAFSNLQLLLLLLSHQVFLGNHLWISIKLACFLQLPYHLPAHHKDMKA

SEQ ID NO: 10492 - protein, 72 aa, Artificial Sequence; identical to SEQ ID NO: 10491
  Synthetic polypeptide

SEQ ID NO: 10493 - protein, 72 aa, Artificial Sequence; identical to SEQ ID NO: 10491
  Synthetic polypeptide

SEQ ID NO: 10494 - protein, 73 aa, Artificial Sequence
  Synthetic polypeptide
LGTVAHACNPNTLGGQGNYFTPQQTSSFLKSPTPPPSSKPSSIPRKSSVDLNQVSMLSPAALSPASSSQRHES

SEQ ID NO: 10495 - protein, 73 aa, Artificial Sequence; identical to SEQ ID NO: 10494
  Synthetic polypeptide

SEQ ID NO: 10496 - protein, 73 aa, Artificial Sequence; identical to SEQ ID NO: 10494
  Synthetic polypeptide

SEQ ID NO: 10497 - protein, 86 aa, Artificial Sequence
  Synthetic polypeptide
AQWLMPVIPTLWEAKVTILHHNRQAAFSNLQLLLLLLSHQVFLGNHLWISIKLACFLQLPYHLPAHHKEPRPPRSWQTLLDLTSSM

SEQ ID NO: 10498 - protein, 86 aa, Artificial Sequence; identical to SEQ ID NO: 10497
  Synthetic polypeptide

SEQ ID NO: 10499 - protein, 86 aa, Artificial Sequence; identical to SEQ ID NO: 10497
  Synthetic polypeptide

SEQ ID NO: 10500 - protein, 86 aa, Artificial Sequence; identical to SEQ ID NO: 10497
  Synthetic polypeptide

SEQ ID NO: 10501 - protein, 86 aa, Artificial Sequence; identical to SEQ ID NO: 10497
  Synthetic polypeptide

SEQ ID NO: 10502 - protein, 271 aa, Artificial Sequence
  Synthetic polypeptide
LGTVAHACNPNTLGGQGNYFTPQQTSSFLKSPTPPPSSKPSSIPRKSSVDLNQVSMLSPAALSPASSSQRTTATQVMANSAGLNFINVVGSVCGAQALMSGSNPMLGCNTGAITPAGINLSGLLPSGGLLPNALPSAMQAASQAGVPFGLKNTSSLRPLNLLQLPGGSLIFNTLQQQQQQLSQFTPQQPQQPTTCSPQQPGEQGSEQGSTSQEQALSAQQAAVINLTGVGSFMQSQAAAVAILAASNGYGSSSSTNSSATSSSAYRQPVKK

SEQ ID NO: 10503 - protein, 271 aa, Artificial Sequence; identical to SEQ ID NO: 10502
  Synthetic polypeptide

SEQ ID NO: 10504 - protein, 271 aa, Artificial Sequence; identical to SEQ ID NO: 10502
  Synthetic polypeptide

SEQ ID NO: 10505 - protein, 116 aa, Artificial Sequence
  Synthetic polypeptide
AQWLMPVIPTLWEAKVTILHHNRQAAFSNLQLLLLLLSHQVFLGNHLWISIKLACFLQLPYHLPAHHKDLELLSHLLLHQPLHRPHTLLMLRAQLLVPLQPPLLPKIQASPLSPLC

SEQ ID NO: 10506 - protein, 350 aa, Artificial Sequence
  Synthetic polypeptide
LGTVAHACNPNTLGGQGNYFTPQQTSSFLKSPTPPPSSKPSSIPRKSSVDLNQVSMLSPAALSPASSSQRSGTPKPSTPTPTPSSTPHPPDAQSSTPSTPSATPTPQDSGFTPQPTLLTQFAQQQRSLSQAMPVTTIPLSTMVTSITPGTTATQVMANSAGLNFINVVGSVCGAQALMSGSNPMLGCNTGAITPAGINLSGLLPSGGLLPNALPSAMQAASQAGVPFGLKNTSSLRPLNLLQLPGGSLIFNTLQQQQQQLSQFTPQQPQQPTTCSPQQPGEQGSEQGSTSQEQALSAQQAAVINLTGVGSFMQSQAAAVAILAASNGYGSSSSTNSSATSSSAYRQPVKK

SEQ ID NO: 10507 - protein, 306 aa, Artificial Sequence
  Synthetic polypeptide
LGTVAHACNPNTLGGQGNYFTPQQTSSFLKSPTPPPSSKPSSIPRKSSVDLNQVSMLSPAALSPASSSQRTTATQVMANSAGLNFINVVGSVCGAQALMSGSNPMLGCNTGAITPAGINLSGLLPSGGLLPNALPSAMQAASQAGVPFGLKNTSSLRPLNLLQQQQQQLSQFTPQQPQQPTTCSPQQPGEQGSEQGSTSQEQALSAQQAAVINLTGVGSFMQSQAAVLSQLGSAENRPEQSLPQQRFQLSSAFQQQQQQIQQLRFLQHQMAMAAAAAQTAQLHHHRHTGSQSKSKMKRGTPTTPKF

SEQ ID NO: 10508 - protein, 318 aa, Artificial Sequence
  Synthetic polypeptide
LGTVAHACNPNTLGGQGNYFTPQQTSSFLKSPTPPPSSKPSSIPRKSSVDLNQVSMLSPAALSPASSSQRTTATQVMANSAGLNFINVVGSVCGAQALMSGSNPMLGCNTGAITPAGINLSGLLPSGGLLPNALPSAMQAASQAGVPFGLKNTSSLRPLNLLQLPGGSLIFNTLQQQQQQLSQFTPQQPQQPTTCSPQQPGEQGSEQGSTSQEQALSAQQAAVINLTGVGSFMQSQAAVLSQLGSAENRPEQSLPQQRFQLSSAFQQQQQQIQQLRFLQHQMAMAAAAAQTAQLHHHRHTGSQSKSKMKRGTPTTPKF

SEQ ID NO: 10509 - protein, 459 aa, Artificial Sequence
  Synthetic polypeptide
LNAEMNRHLCVWLFRHPSLNGYLQCHIQLHSHQFRQIHLDTRLQVFRQNRNCILHLLSKNWSRRYCHQDTKMLWKHKALQKYMENLSKEYQTLEQCLQHIPVNEENRRSLNRRHAELAPLAAIYQEIQETEQAIEELESMCKSLNKQDEKQLQELALEERQTIDQKINMLYNELFQSLVPKEKYDKNDVILEVTAGRTTGGDICQQFTREIFDMYQNYSCYKHWQFELLNYTPADYGGLHHAAARISGDGVYKHLKYEGGIHRVQRIPEVGLSSRMQRIHTGTMSVIVLPQPDEVDVKLDPKDLRIDTFRAKGAGGQHVNKTDSAVRLVHIPTGLVVECQQERSQIKNKEIAFRVLRARLYQQIIEKDKRQQQSARKLQVGTRAQSERIRTYNFTQDRVSDHRIAYEVRDIKAQSHSTGGSRDPAHSTFLSLDSVRSPGILIMTSSVRNFYVVGRAWIS

SEQ ID NO: 10510 - protein, 6 aa, Artificial Sequence
  Synthetic polypeptide
IVVIKC

SEQ ID NO: 10511 - protein, 88 aa, Artificial Sequence
  Synthetic polypeptide
ATHSGPISSRESCSFFLPIQLCSKLKSVCVVCVRDLRLLDCSTKSLGKKFDSCRTGCCSSCICRSLRISDLETSRTSYHRNCKEDFNS

SEQ ID NO: 10512 - protein, 130 aa, Artificial Sequence
  Synthetic polypeptide
CVFATSVSLTVRPRALVRSLIAVGLGVAALAFAGRYAFRIWKPLEQVITETAKKISTPSFSSYYKGGFEQKMSRREAGLILGVSPSAGKAKIRTAHRRVMILNHPDKGGSPYVAAKINEAKDLLETTTKH

SEQ ID NO: 10513 - protein, 7 aa, Artificial Sequence
  Synthetic polypeptide
LFDQEPW

SEQ ID NO: 10514 - protein, 143 aa, Artificial Sequence
  Synthetic polypeptide
ATHSGPISSRESCSFFLPIQLCSKLKSVCVVCVRDLRLLDCSTKSLGRYAFRIWKPLEQVITETAKKISTPSFSSYYKGGFEQKMSRREAGLILGVSPSAGKAKIRTAHRRVMILNHPDKGGSPYVAAKINEAKDLLETTTKH

SEQ ID NO: 10515 - protein, 26 aa, Artificial Sequence
  Synthetic polypeptide
CVFATSVSLTVRPRALVATHFGSGNL

SEQ ID NO: 10516 - protein, 31 aa, Artificial Sequence
  Synthetic polypeptide
LFDQEPWSLRISDLETSRTSYHRNCKEDFNS

SEQ ID NO: 10517 - protein, 69 aa, Artificial Sequence
  Synthetic polypeptide
ATHSGPISSRESCSFFLPIQLCSKLKSVCVVCVRDLRLLDCSTKSLGGSPYVAAKINEAKDLLETTTKH

SEQ ID NO: 10518 - protein, 21 aa, Artificial Sequence
  Synthetic polypeptide
CVFATSVSLTVRPRALVDLLT

SEQ ID NO: 10519 - protein, 17 aa, Artificial Sequence
  Synthetic polypeptide
LFDQEPWWISLRSSQNK

SEQ ID NO: 10520 - protein, 52 aa, Artificial Sequence
  Synthetic polypeptide
HFGRPSPSAGKAKIRTAHRRVMILNHPDKGGSPYVAAKINEAKDLLETTTKH

SEQ ID NO: 10521 - protein, 32 aa, Artificial Sequence
  Synthetic polypeptide
PGVEAYTCNPSILGGQAHLLARLRLEQLIGES

SEQ ID NO: 10522 - protein, 22 aa, Artificial Sequence
  Synthetic polypeptide
QAWRLTPVILAFWEAKPICWQG

SEQ ID NO: 10523 - protein, 63 aa, Artificial Sequence
  Synthetic polypeptide
ALLLTEETPSRERPSYPSLGPSEAILDYPAQNNHPTNPQKSGSPYVAAKINEAKDLLETTTKH

SEQ ID NO: 10524 - protein, 26 aa, Artificial Sequence
  Synthetic polypeptide
ALVRPSWTTQLRITTLPIHRKVDLLT

SEQ ID NO: 10525 - protein, 18 aa, Artificial Sequence
  Synthetic polypeptide
PPYQSTEKWISLRSSQNK

SEQ ID NO: 10526 - protein, 142 aa, Artificial Sequence
  Synthetic polypeptide
SNLAFVSSKEGNIDDSLIGGNASAEGPEGEGTESTVITGVDIVMNHHLQETSFTKEAYKKYIKDYMKSIKGKLEEQRPERVKPFMTGAAEQIKHILANFKNYQFFIGENMNPDGMVALLDYREDGVTPYMIFFKDGLEMEKC

SEQ ID NO: 10527 - protein, 142 aa, Artificial Sequence; identical to SEQ ID NO: 10526
  Synthetic polypeptide

SEQ ID NO: 10528 - protein, 142 aa, Artificial Sequence; identical to SEQ ID NO: 10526
  Synthetic polypeptide

SEQ ID NO: 10529 - protein, 142 aa, Artificial Sequence; identical to SEQ ID NO: 10526
  Synthetic polypeptide

SEQ ID NO: 10530 - protein, 32 aa, Artificial Sequence
  Synthetic polypeptide
PLSVVKKVTLMTRSLVEMPPLKAPRAKVPKAQ

SEQ ID NO: 10531 - protein, 32 aa, Artificial Sequence; identical to SEQ ID NO: 10530
  Synthetic polypeptide

SEQ ID NO: 10532 - protein, 32 aa, Artificial Sequence; identical to SEQ ID NO: 10530
  Synthetic polypeptide

SEQ ID NO: 10533 - protein, 32 aa, Artificial Sequence; identical to SEQ ID NO: 10530
  Synthetic polypeptide

SEQ ID NO: 10534 - protein, 32 aa, Artificial Sequence; identical to SEQ ID NO: 10530
  Synthetic polypeptide

SEQ ID NO: 10535 - protein, 32 aa, Artificial Sequence; identical to SEQ ID NO: 10530
  Synthetic polypeptide

SEQ ID NO: 10536 - protein, 158 aa, Artificial Sequence
  Synthetic polypeptide
SNLAFVSSKEGNIDDSLIGGNASAEGPEGEGTESTVITGVDIVMNHHLQETSFTKEAYKKYIKDYMKSIKGKLEEQRPERVKPFMTGAAEQIKHILANFKNYQFFIGENMNPDGMVALLDYREDGVTPYMIFFKDGLEMEKCVSTRKWVKINNVKKTF

SEQ ID NO: 10537 - protein, 133 aa, Artificial Sequence
  Synthetic polypeptide
SNLAFVSSKEGNIDDSLIGGNASAEGPEGEGTESTVITGVDIVMNHHLQETSFTKEAYKKYIKDYMKSIKGKLEEQRPERVKPFMTGAAEQIKHILANFKNYQFFIGENMNPDGMVALLDYREDGVTPYMIFF

SEQ ID NO: 10538 - protein, 24 aa, Artificial Sequence
  Synthetic polypeptide
SPHTSRAHWTSNLQNCELQLLANE

SEQ ID NO: 10539 - protein, 41 aa, Artificial Sequence
  Synthetic polypeptide
EGVQPGQHLDFSPVRLEAHTPAAPTGLLTYRTVSFNSWLMS

SEQ ID NO: 10540 - protein, 96 aa, Artificial Sequence
  Synthetic polypeptide
CSGESIAQQSSPMEHFKPTLPLPVIGPWDSVEFRNICSHLALQIEGQQFDRDLNAAHQCLKTIVKKLIQSLANFPSDAHMVACASLRQILQNLPDI

SEQ ID NO: 10541 - protein, 46 aa, Artificial Sequence
  Synthetic polypeptide
HSSQVPWSISNLLFHFLSLALGIVLSLETSAVIWLYRLKDSSLTET

SEQ ID NO: 10542 - protein, 28 aa, Artificial Sequence
  Synthetic polypeptide
QWREHSTAVKSHGAFQTYSSTSCHWPLG

SEQ ID NO: 10543 - protein, 62 aa, Artificial Sequence
  Synthetic polypeptide
GKKEITSWLGPLTTWSLHILPMSARVFPGYSSFLSPPREPRIRIFKRCFKEDEKWANVCKTG

SEQ ID NO: 10544 - protein, 62 aa, Artificial Sequence; identical to SEQ ID NO: 10543
  Synthetic polypeptide

SEQ ID NO: 10545 - protein, 321 aa, Artificial Sequence
  Synthetic polypeptide
PRGVCTFCPCLHGFSLGTPVSSHLPESRALEYLKDASKKMKNGLMFVKLVNPCSGEGAIYLFNMCLQQLFEVKVFKEKHHSWFINQSVQSGGLLHFATPVDPLFLLLHYLIKADKEGKFQPLDQVVVDNVFPNCILLLKLPGLEKLLHHVTEEKGNPEIDNKKYYKYSKEKTLKWLEKKVNQTVAALKTNNVNVSSRVQSTAFFSGDQASTDKEEDYIRYAHGLISDYIPKELSDDLSKYLKLPEPSASLPNPPSKKIKLSDEPVEAKEDYTKFNTKDLKTEKKNSKMTAAQKALAKVDKSGMKSIDTFFGVKNKKKIGKV

SEQ ID NO: 10546 - protein, 266 aa, Artificial Sequence
  Synthetic polypeptide
PRGVCTFCPCLHGFSLGTPVSSHLPESRALEYLKDASKKMKNGLMFVKLVNPCSGEGAIYLFNMCLQQLFEVKVFKEKHHSWFINQSVQSGGLLHFATPVDPLFLLLHYLIKADKEGKFQPLDQVVVDNVFPNCILLLKLPGLEKLLHHVTEEKGNPEIDNKKYYKYSKEKTLKWLEKKVNQTVAALKTNNVNVSSRVQSTAFFSGDQASTDKEEDYIRYAHGLISDYIPKELSDDLSKYLKLPEPSASLPNPPSKMAAQRQKRGK

SEQ ID NO: 10547 - protein, 67 aa, Artificial Sequence
  Synthetic polypeptide
MGLTRSDGFKNGRCPAQALFLPAAIHIRCGLSLFAICHDCEASPAMWNCIFQMKALKLAQALQTKSM

SEQ ID NO: 10548 - protein, 25 aa, Artificial Sequence
  Synthetic polypeptide
DVACPSLPSAMIVRPPQPCGTVSFR

SEQ ID NO: 10549 - protein, 738 aa, Artificial Sequence
  Synthetic polypeptide
GLPSHVELYLSDEGIEACTSSPDKVNVNDIILIALNTDLRTIGKKFLPSDINSGKVEKLEGPCVLQIQKIRNVAAPKDNEESQAAPRMLRLQMTDGHISCTAVEFSYMSKISLNTPPGTKVKLSGIVDIKNGFLLLNDSNTTVLGGEVEHLIEKWELQRSLSKHNRSNIGTEGGPPPFVPFGQKCVSHVQVDSRELDRRKTLQVTMPVKPTNDNDEFEKQRTAAIAEVAKSKETKTFGGGGGGARSNLNMNAAGNRNREVLQKEKSTKSEGKHEGVYRELVDEKALKHITEMGFSKEASRQALMDNGNNLEAALNVLLTSNKQKPVMGPPLRGRGKGRGRIRSEDEEDLGNARPSAPSTLFDFLESKMGTLNVEEPKSQPQQLHQGQYRSSNTEQNGVKDNNHLRHPPRNDTRQPRNEKPPRFQRDSQNSKSVLEGSGLPRNRGSERPSTSSVSEVWAEDRIKCDRPYSRYDRTKDTSYPLGSQHSDGAFKKRDNSMQSRSGKGPSFAEAKENPLPQGSVDYNNQKRGKRESQTSIPDYFYDRKSQTINNEAFSGIKIEKHFNVNTDYQNPVRSNSFIGVPNGEVEMPLKGRRIGPIKPAGPVTAVPCDDKIFYNSGPKRRSGPIKPEKILESSIPMEYAKMWKPGDECFALYWEDNKFYRAEVEALHSSGMTAVVKFIDYGNYEEVLLSNIKPIQTEAWEEEGTYDQTLEFRRGGDGQPRRSTRPTQQFYQPPRARN

SEQ ID NO: 10550 - protein, 49 aa, Artificial Sequence
  Synthetic polypeptide
VFDGSSCVYSPFCCLVKKMSCFPFTFYHNYKFPEASPAMLNCCHQPAIQ

SEQ ID NO: 10551 - protein, 13 aa, Artificial Sequence
  Synthetic polypeptide
IAVINRPFNDTSK

SEQ ID NO: 10552 - protein, 590 aa, Artificial Sequence
  Synthetic polypeptide
GLPSHAELLSSTGHSMTPQSDLDSSSSEEFYQAVHHAEQTFRKMESYLKQQQLCDVILIVGNRKIPAHRLVLSSVSDYFAAMFTSDVCEAKQEEIKMEGIDPNALWDLVQFAYTGCLELKEDTIENLLAAACLLQLPQVVEVCCHFLMKLLHPSNCLGIRAFADAQGCIELMKVAHSYTMENIMEVIRNQEFLLLPAEELHKLLASDDVNVPDEETIFHALMMWVKYDMQSRCNDLSMLLAFIRLPLLPPQILADLENHALFKNDLECQKLILEAMKYHLLPERRTLMQSPRTKPRKSTVGTLYAVGGMDNNKGATTIEKYDLRTNLWIQAGMMNGRRLQFGVAVIDDKLFVIGGRDGLKTLNTVECYNPKTKTWTVLPPMSTHRHGLGVTVLEGPIYAVGGHDGWSYLNTVERWDPQSQQWTFVASMSIARSTVGVAALNGKLYSVGGRDGSSCLSSMEYYDPHTNKWNMCAPMCKRRGGVGVATCDGFLYAVGGHDAPASNHCSRLLDYVERYDPKTDTWTMVAPLSMPRDAVGVCLLGDRLYAVGGYDGQTYLNTMESYDPQTNEWTQMASLNIGRAGACVVVIKQP

SEQ ID NO: 10553 - protein, 18 aa, Artificial Sequence
  Synthetic polypeptide
QRLDLCFYLKQPRKLSSA

SEQ ID NO: 10554 - protein, 62 aa, Artificial Sequence
  Synthetic polypeptide
NNQENSVLLEISRILNTGLDMETLSICVRLCEQGINPEALSSVIKELRKATEALKAAENMTS

SEQ ID NO: 10555 - protein, 30 aa, Artificial Sequence
  Synthetic polypeptide
SSQDGVTEIRFMLLLETTKKTQFCLRFQEF

SEQ ID NO: 10556 - protein, 31 aa, Artificial Sequence
  Synthetic polypeptide
SLAFLGIKCFLIKMGGSHFQLTMVKLVMKLY

SEQ ID NO: 10557 - protein, 31 aa, Artificial Sequence; identical to SEQ ID NO: 10556
  Synthetic polypeptide

SEQ ID NO: 10558 - protein, 9 aa, Artificial Sequence
  Synthetic polypeptide
LRWAEAISN

SEQ ID NO: 10559 - protein, 9 aa, Artificial Sequence
  Synthetic polypeptide
LRWAEAISN

SEQ ID NO: 10560 - protein, 176 aa, Artificial Sequence
  Synthetic polypeptide
PGGKTDKLRRSMPNLARMPSTTAISSNISSPVTVRNSQSFDSSLHGAGNGISRIQSCIPSPGQLQHRVHSVGHFPVSIRQPLKATAYVSPTVQGSSNMPLSNGLQLYSNTGIPTPNKAAASGIMGRSALPRPSLAINGSNLPRSKIAQPVRSFLQPPKPLSSLSTLRDGNWRDGCY

SEQ ID NO: 10561 - protein, 176 aa, Artificial Sequence; identical to SEQ ID NO: 10560
  Synthetic polypeptide

SEQ ID NO: 10562 - protein, 176 aa, Artificial Sequence; identical to SEQ ID NO: 10560
  Synthetic polypeptide

SEQ ID NO: 10563 - protein, 176 aa, Artificial Sequence; identical to SEQ ID NO: 10560
  Synthetic polypeptide

SEQ ID NO: 10564 - protein, 176 aa, Artificial Sequence; identical to SEQ ID NO: 10560
  Synthetic polypeptide

SEQ ID NO: 10565 - protein, 176 aa, Artificial Sequence; identical to SEQ ID NO: 10560
  Synthetic polypeptide

SEQ ID NO: 10566 - protein, 176 aa, Artificial Sequence; identical to SEQ ID NO: 10560
  Synthetic polypeptide

SEQ ID NO: 10567 - protein, 24 aa, Artificial Sequence
  Synthetic polypeptide
IWQNGNNQYSQVEKQISSEEVCLT

SEQ ID NO: 10568 - protein, 24 aa, Artificial Sequence
  Synthetic polypeptide
IWQNGNNQYSQVEKQISSEEVCLT

SEQ ID NO: 10569 - protein, 24 aa, Artificial Sequence
  Synthetic polypeptide
IWQNGNNQYSQVEKQISSEEVCLT

SEQ ID NO: 10570 - protein, 24 aa, Artificial Sequence
  Synthetic polypeptide
IWQNGNNQYSQVEKQISSEEVCLT

SEQ ID NO: 10571 - protein, 24 aa, Artificial Sequence
  Synthetic polypeptide
IWQNGNNQYSQVEKQISSEEVCLT

SEQ ID NO: 10572 - protein, 24 aa, Artificial Sequence
  Synthetic polypeptide
IWQNGNNQYSQVEKQISSEEVCLT

SEQ ID NO: 10573 - protein, 24 aa, Artificial Sequence
  Synthetic polypeptide
IWQNGNNQYSQVEKQISSEEVCLT

SEQ ID NO: 10574 - protein, 24 aa, Artificial Sequence
  Synthetic polypeptide
IWQNGNNQYSQVEKQISSEEVCLT

SEQ ID NO: 10575 - protein, 24 aa, Artificial Sequence
  Synthetic polypeptide
IWQNGNNQYSQVEKQISSEEVCLT

SEQ ID NO: 10576 - protein, 24 aa, Artificial Sequence
  Synthetic polypeptide
IWQNGNNQYSQVEKQISSEEVCLT

SEQ ID NO: 10577 - protein, 17 aa, Artificial Sequence
  Synthetic polypeptide
IKYGKMETTSIARWKNR

SEQ ID NO: 10578 - protein, 17 aa, Artificial Sequence
  Synthetic polypeptide
IKYGKMETTSIARWKNR

SEQ ID NO: 10579 - protein, 17 aa, Artificial Sequence
  Synthetic polypeptide
IKYGKMETTSIARWKNR

SEQ ID NO: 10580 - protein, 17 aa, Artificial Sequence
  Synthetic polypeptide
IKYGKMETTSIARWKNR

SEQ ID NO: 10581 - protein, 17 aa, Artificial Sequence
  Synthetic polypeptide
IKYGKMETTSIARWKNR

SEQ ID NO: 10582 - protein, 17 aa, Artificial Sequence
  Synthetic polypeptide
IKYGKMETTSIARWKNR

SEQ ID NO: 10583 - protein, 17 aa, Artificial Sequence
  Synthetic polypeptide
IKYGKMETTSIARWKNR

SEQ ID NO: 10584 - protein, 17 aa, Artificial Sequence
  Synthetic polypeptide
IKYGKMETTSIARWKNR

SEQ ID NO: 10585 - protein, 17 aa, Artificial Sequence
  Synthetic polypeptide
IKYGKMETTSIARWKNR

SEQ ID NO: 10586 - protein, 17 aa, Artificial Sequence
  Synthetic polypeptide
IKYGKMETTSIARWKNR

SEQ ID NO: 10587 - protein, 32 aa, Artificial Sequence
  Synthetic polypeptide
PGGKTDKLRRSMPNLARMPSTTAISSNISSPV

SEQ ID NO: 10588 - protein, 111 aa, Artificial Sequence
  Synthetic polypeptide
PGGKTDKLRRSMPNLARMPSTTAISSNISSPVTVRNSQSFDSSLHGAGNGISRIQSCIPSPGQLQHRVHSVGHFPVSIRQPLKATAYVSPTVQGSSNMPLSNGLQLYSNTG

SEQ ID NO: 10589 - protein, 18 aa, Artificial Sequence
  Synthetic polypeptide
PGGKTDKLRRSMPNLARM

SEQ ID NO: 10590 - protein, 67 aa, Artificial Sequence
  Synthetic polypeptide
ACPVEHSGGGLWPARATWILRALPGRHLPRWDALPEQCVAGPRGGSTQWLNTGKELVLGVWTSETWL

SEQ ID NO: 10591 - protein, 30 aa, Artificial Sequence
  Synthetic polypeptide
TLGRNWYLESGHLKLGSETAERPPDAFWSR

SEQ ID NO: 10592 - protein, 461 aa, Artificial Sequence
  Synthetic polypeptide
NLALKLRSGHRTPSGAGSSMQPPPSLCGRALVALVLACGLSRIWGEERGFPPDRATPLLQTAEIMTPPTKTLWPKGSNASLARSLAPAEVPKGDRTAGSPPRTISPPPCQGPIEIKETFKYINTVVSCLVFVLGIIGNSTLLRIIYKNKCMRNGPNILIASLALGDLLHIVIDIPINVYKLLAEDWPFGAEMCKLVPFIQKASVGITVLSLCALSIDRYRAVASWSRIKGIGVPKWTAVEIVLIWVVSVVLAVPEAIGFDIITMDYKGSYLRICLLHPVQKTAFMQFYKTAKDWWLFSFYFCLPLAITAFFYTLMTCEMLRKKSGMQIALNDHLKQRREVAKTVFCLVLVFALCWLPLHLSRILKLTLYNQNDPNRCELLSFLLVLDYIGINMASLNSCINPIALYLVSKRFKNCFKSCLCCWCQSFEEKQSLEEKQSCLKFKANDHGYDNFRSSNKYSSS

SEQ ID NO: 10593 - protein, 39 aa, Artificial Sequence
  Synthetic polypeptide
ACPVEHSGGGLWPARATWILRALPGSETAERPPDAFWSR

SEQ ID NO: 10594 - protein, 463 aa, Artificial Sequence
  Synthetic polypeptide
EHSQALKLRSGHRTPSGAGSSMQPPPSLCGRALVALVLACGLSRIWGEERGFPPDRATPLLQTAEIMTPPTKTLWPKGSNASLARSLAPAEVPKGDRTAGSPPRTISPPPCQGPIEIKETFKYINTVVSCLVFVLGIIGNSTLLRIIYKNKCMRNGPNILIASLALGDLLHIVIDIPINVYKLLAEDWPFGAEMCKLVPFIQKASVGITVLSLCALSIDRYRAVASWSRIKGIGVPKWTAVEIVLIWVVSVVLAVPEAIGFDIITMDYKGSYLRICLLHPVQKTAFMQFYKTAKDWWLFSFYFCLPLAITAFFYTLMTCEMLRKKSGMQIALNDHLKQRREVAKTVFCLVLVFALCWLPLHLSRILKLTLYNQNDPNRCELLSFLLVLDYIGINMASLNSCINPIALYLVSKRFKNCFKSCLCCWCQSFEEKQSLEEKQSCLKFKANDHGYDNFRSSNKYSSS

SEQ ID NO: 10595 - protein, 38 aa, Artificial Sequence
  Synthetic polypeptide
LVDGRGSSLGDLSLPCGTFRWGTLASPSNVDPESTPRL

SEQ ID NO: 10596 - protein, 121 aa, Artificial Sequence
  Synthetic polypeptide
PFFNSLQFLSGKLLSSCTLPPYIRSNTVARVIFKMNLMNLHPNNLQILMHHLKQLLNVLYSLTGNNISFQLSSQEAVMFMDHINIQKRLFQNLYLCYSTTGNVAFMGQGFKQETSFMLLML

SEQ ID NO: 10597 - protein, 199 aa, Artificial Sequence
  Synthetic polypeptide
NEFDESSPKQPTNPYASSKAAAECFVQSYWEQYKFPVVITRSSNVYGPHQYPEKVIPKFISLLQHNRKCCIHGSGLQTRNFLYATDVVEAFLTVLKKGKPGEIYNIGTNFEMSVVQLAKELIQLIKETNSESEMENWVDYVNDRPTNDMRYPMKSEKIHGLGWRPKVPWKEGIKKTIEWYRENFHNWKNVEKALEPFPV

SEQ ID NO: 10598 - protein, 19 aa, Artificial Sequence
  Synthetic polypeptide
SSSSEILARGFRFRKTERI

SEQ ID NO: 10599 - protein, 19 aa, Artificial Sequence
  Synthetic polypeptide
SSSSEILARGFRFRKTERI

SEQ ID NO: 10600 - protein, 113 aa, Artificial Sequence
  Synthetic polypeptide
STTISTCLSLSIPQGPVCYFLLPEAPPQKFWPEVLDSGRLKEYDEPYVLLQNKESLFYKMVQQLGKAEAAALTETAKQVYFKRNYPHIGHTDHMVTNTSNGQPSTLTIFETAL

SEQ ID NO: 10601 - protein, 113 aa, Artificial Sequence; identical to SEQ ID NO: 10600
  Synthetic polypeptide

SEQ ID NO: 10602 - protein, 26 aa, Artificial Sequence
  Synthetic polypeptide
VCPFLKAQFAIFSSLKLLLRNFGQRF

SEQ ID NO: 10603 - protein, 26 aa, Artificial Sequence
  Synthetic polypeptide
VCPFLKAQFAIFSSLKLLLRNFGQRF

SEQ ID NO: 10604 - protein, 45 aa, Artificial Sequence
  Synthetic polypeptide
RSIQLRRSSVLRLALWEEPELEKVPSSQPFLDCQNPKVKFGLIRS

SEQ ID NO: 10605 - protein, 45 aa, Artificial Sequence; identical to SEQ ID NO: 10604
  Synthetic polypeptide

SEQ ID NO: 10606 - protein, 318 aa, Artificial Sequence
  Synthetic polypeptide
VDLNQGQFCPRGRLSVTFLVVSFWECAPGIYAVGSRDASEPPTMPGAASKMKKYPAQKVISAEVGIVGRTGAGKSSLISALFRLSEPEGKIWIDKILTTEIGLHDLRKKMSIIPQEPVLFTGTMRKNLDPFNEHTDEELWNALQEVQLKETIEDLPGKMDTELAESGSNFSVGQRQLVCLARAILRKNQILIIDEATANVDPRTDELIQKKIREKFAHCTVLTIAHRLNTIIDSDKIMVLDSGRLKEYDEPYVLLQNKESLFYKMVQQLGKAEAAALTETAKQVYFKRNYPHIGHTDHMVTNTSNGQPSTLTIFETAL

SEQ ID NO: 10607 - protein, 318 aa, Artificial Sequence; identical to SEQ ID NO: 10606
  Synthetic polypeptide

SEQ ID NO: 10608 - protein, 111 aa, Artificial Sequence
  Synthetic polypeptide
SSVIVSHHPQMGPSSCRKTSSGIPLILHYDIATSGWCGLCGCGRDSLDRNTLGSPWNHFHFSSAIFFGNVKRCEAPGIYNSESSVFPLIIFSPGALDHPGIQSRREVSGTV

SEQ ID NO: 10609 - protein, 111 aa, Artificial Sequence; identical to SEQ ID NO: 10608
  Synthetic polypeptide

SEQ ID NO: 10610 - protein, 484 aa, Artificial Sequence
  Synthetic polypeptide
FYIMTLLQVVGVVSVAVAVIPWIAIPLVPLGIIFIFLRRYFLETSRDVKRLESTTRSPVFSHLSSSLQGLWTIRAYKAEERCQELFDAHQDLHSEAWFLFLTTSRWFAVRLDAICAMFVIIVAFGSLILAKTLDAGQVGLALSYALTLMGMFQWCVRQSAEVENMMISVERVIEYTDLEKEAPWEYQKRPPPAWPHEGVIIFDNVNFMYSPGGPLVLKHLTALIKSQEKVGIVGRTGAGKSSLISALFRLSEPEGKIWIDKILTTEIGLHDLRKKMSIIPQEPVLFTGTMRKNLDPFNEHTDEELWNALQEVQLKETIEDLPGKMDTELAESGSNFSVGQRQLVCLARAILRKNQILIIDEATANVDPRTDELIQKKIREKFAHCTVLTIAHRLNTIIDSDKIMVLDSGRLKEYDEPYVLLQNKESLFYKMVQQLGKAEAAALTETAKQVYFKRNYPHIGHTDHMVTNTSNGQPSTLTIFETAL

SEQ ID NO: 10611 - protein, 484 aa, Artificial Sequence; identical to SEQ ID NO: 10610
  Synthetic polypeptide

SEQ ID NO: 10612 - protein, 44 aa, Artificial Sequence
  Synthetic polypeptide
SSVIVSHHPQMGPSSCRKTSSGIPLILHYEMGSRCVVLAGLKLL

SEQ ID NO: 10613 - protein, 44 aa, Artificial Sequence; identical to SEQ ID NO: 10612
  Synthetic polypeptide

SEQ ID NO: 10614 - protein, 18 aa, Artificial Sequence
  Synthetic polypeptide
FYIMRWDLAVLSWLVSNS

SEQ ID NO: 10615 - protein, 18 aa, Artificial Sequence
  Synthetic polypeptide
FYIMRWDLAVLSWLVSNS

SEQ ID NO: 10616 - protein, 1114 aa, Artificial Sequence
  Synthetic polypeptide
WRMPVIPATWEAKALRLSNMAMGKTTTGQIVNLLSNDVNKFDQVTVFLHFLWAGPLQAIAVTALLWMEIGISCLAGMAVLIILLPLQSCFGKLFSSLRSKTATFTDARIRTMNEVITGIRIIKMYAWEKSFSNLITNLRKKEISKILRSSCLRGMNLASFFSASKIIVFVTFTTYVLLGSVITASRVFVAVTLYGAVRLTVTLFFPSAIERVSEAIVSIRRIQTFLLLDEISQRNRQLPSDGKKMVHVQDFTAFWDKASETPTLQGLSFTVRPGELLAVVGPVGAGKSSLLSAVLGELAPSHGLVSVHGRIAYVSQQPWVFSGTLRSNILFGKKYEKERYEKVIKACALKKDLQLLEDGDLTVIGDRGTTLSGGQKARVNLARAVYQDADIYLLDDPLSAVDAEVSRHLFELCICQILHEKITILVTHQLQYLKAASQILILKDGKMVQKGTYTEFLKSGIDFGSLLKKDNEESEQPPVPGTPTLRNRTFSESSVWSQQSSRPSLKDGALESQDVAYVLQDWWLSYWANKQSMLNVTVNGGGNVTEKLDLNWYLGIYSGLTVATVLFGIARSLLVFYVLVNSSQTLHNKMFESILKAPVLFFDRNPIGRILNRFSKDIGHLDDLLPLTFLDFIQTLLQVVGVVSVAVAVIPWIAIPLVPLGIIFIFLRRYFLETSRDVKRLESTTRSPVFSHLSSSLQGLWTIRAYKAEERCQELFDAHQDLHSEAWFLFLTTSRWFAVRLDAICAMFVIIVAFGSLILAKTLDAGQVGLALSYALTLMGMFQWCVRQSAEVENMMISVERVIEYTDLEKEAPWEYQKRPPPAWPHEGVIIFDNVNFMYSPGGPLVLKHLTALIKSQEKVGIVGRTGAGKSSLISALFRLSEPEGKIWIDKILTTEIGLHDLRKKMSIIPQEPVLFTGTMRKNLDPFNEHTDEELWNALQEVQLKETIEDLPGKMDTELAESGSNFSVGQRQLVCLARAILRKNQILIIDEATANVDPRTDELIQKKIREKFAHCTVLTIAHRLNTIIDSDKIMVLDSGRLKEYDEPYVLLQNKESLFYKMVQQLGKAEAAALTETAKQVYFKRNYPHIGHTDHMVTNTSNGQPSTLTIFETAL

SEQ ID NO: 10617 - protein, 24 aa, Artificial Sequence
  Synthetic polypeptide
SQLLGRLRHFVLVTWPWGRQPQAR

SEQ ID NO: 10618 - protein, 24 aa, Artificial Sequence
  Synthetic polypeptide
SQLLGRLRHFVLVTWPWGRQPQAR

SEQ ID NO: 10619 - protein, 24 aa, Artificial Sequence
  Synthetic polypeptide
SQLLGRLRHFVLVTWPWGRQPQAR

SEQ ID NO: 10620 - protein, 24 aa, Artificial Sequence
  Synthetic polypeptide
SQLLGRLRHFVLVTWPWGRQPQAR

SEQ ID NO: 10621 - protein, 1161 aa, Artificial Sequence
  Synthetic polypeptide
WRMPVIPATWEAKALRLSNMAMGKTTTGQIVNLLSNDVNKFDQVTVFLHFLWAGPLQAIAVTALLWMEIGISCLAGMAVLIILLPLQSCFGKLFSSLRSKTATFTDARIRTMNEVITGIRIIKMYAWEKSFSNLITNLRKKEISKILRSSCLRGMNLASFFSASKIIVFVTFTTYVLLGSVITASRVFVAVTLYGAVRLTVTLFFPSAIERVSEAIVSIRRIQTFLLLDEISQRNRQLPSDGKKMVHVQDFTAFWDKASETPTLQGLSFTVRPGELLAVVGPVGAGKSSLLSAVLGELAPSHGLVSVHGRIAYVSQQPWVFSGTLRSNILFGKKYEKERYEKVIKACALKKDLQLLEDGDLTVIGDRGTTLSGGQKARVNLARAVYQDADIYLLDDPLSAVDAEVSRHLFELCICQILHEKITILVTHQLQYLKAASQILILKDGKMVQKGTYTEFLKSGIDFGSLLKKDNEESEQPPVPGTPTLRNRTFSESSVWSQQSSRPSLKDGALESQDTENVPVTLSEENRSEGKVGFQAYKNYFRAGAHWIVFIFLILLNTAAQVAYVLQDWWLSYWANKQSMLNVTVNGGGNVTEKLDLNWYLGIYSGLTVATVLFGIARSLLVFYVLVNSSQTLHNKMFESILKAPVLFFDRNPIGRILNRFSKDIGHLDDLLPLTFLDFIQTLLQVVGVVSVAVAVIPWIAIPLVPLGIIFIFLRRYFLETSRDVKRLESTTRSPVFSHLSSSLQGLWTIRAYKAEERCQELFDAHQDLHSEAWFLFLTTSRWFAVRLDAICAMFVIIVAFGSLILAKTLDAGQVGLALSYALTLMGMFQWCVRQSAEVENMMISVERVIEYTDLEKEAPWEYQKRPPPAWPHEGVIIFDNVNFMYSPGGPLVLKHLTALIKSQEKVGIVGRTGAGKSSLISALFRLSEPEGKIWIDKILTTEIGLHDLRKKMSIIPQEPVLFTGTMRKNLDPFNEHTDEELWNALQEVQLKETIEDLPGKMDTELAESGSNFSVGQRQLVCLARAILRKNQILIIDEATANVDPRTDELIQKKIREKFAHCTVLTIAHRLNTIIDSDKIMVLDSGRLKEYDEPYVLLQNKESLFYKMVQQLGKAEAAALTETAKQVYFKRNYPHIGHTDHMVTNTSNGQPSTLTIFETAL

SEQ ID NO: 10622 - protein, 695 aa, Artificial Sequence
  Synthetic polypeptide
WRMPVIPATWEAKALRLSNMAMGKTTTGQIVNLLSNDVNKFDQVTVFLHFLWAGPLQAIAVTALLWMEIGISCLAGMAVLIILLPLQSCFGKLFSSLRSKTATFTDARIRTMNEVITGIRIIKMYAWEKSFSNLITNLRKKEISKILRSSCLRGMNLASFFSASKIIVFVTFTTYVLLGSVITASRVFVAVTLYGAVRLTVTLFFPSAIERVSEAIVSIRRIQTFLLLDEISQRNRQLPSDGKKMVHVQDFTAFWDKASETPTLQGLSFTVRPGELLAVVGPVGAGKSSLLSAVLGELAPSHGLVSVHGRIAYVSQQPWVFSGTLRSNILFGKKYEKERYEKVIKACALKKDLQLLEDGDLTVIGDRGTTLSGGQKARVNLARAVYQDADIYLLDDPLSAVDAEVSRHLFELCICQILHEKITILVTHQLQYLKAASQILILKDGKMVQKGTYTEFLKSGIDFGSLLKKDNEESEQPPVPGTPTLRNRTFSESSVWSQQSSRPSLKDGALESQDTENVPVTLSEENRSEGKVGFQAYKNYFRAGAHWIVFIFLILLNTAAQVAYVLQDWWLSYWANKQSMLNVTVNGGGNVTEKLDLNWYLGIYSGLTVATVLFGIARSLLVFYVLVNSSQTLHNKMFESILKAPVLFFDRNPIGRILNRFSKDIGHLDDLLPLTFLDFIQRWDLAVLSWLVSNS

SEQ ID NO: 10623 - protein, 695 aa, Artificial Sequence; identical to SEQ ID NO: 10622
  Synthetic polypeptide

SEQ ID NO: 10624 - protein, 43 aa, Artificial Sequence
  Synthetic polypeptide
GAGAGGRGGRNGGGRGGAATVLPAPGKPAQPRQCGPETGRGNL

SEQ ID NO: 10625 - protein, 43 aa, Artificial Sequence; identical to SEQ ID NO: 10624
  Synthetic polypeptide

SEQ ID NO: 10626 - protein, 43 aa, Artificial Sequence; identical to SEQ ID NO: 10624
  Synthetic polypeptide

SEQ ID NO: 10627 - protein, 43 aa, Artificial Sequence; identical to SEQ ID NO: 10624
  Synthetic polypeptide

SEQ ID NO: 10628 - protein, 43 aa, Artificial Sequence; identical to SEQ ID NO: 10624
  Synthetic polypeptide

SEQ ID NO: 10629 - protein, 43 aa, Artificial Sequence; identical to SEQ ID NO: 10624
  Synthetic polypeptide

SEQ ID NO: 10630 - protein, 43 aa, Artificial Sequence; identical to SEQ ID NO: 10624
  Synthetic polypeptide

SEQ ID NO: 10631 - protein, 43 aa, Artificial Sequence; identical to SEQ ID NO: 10624
  Synthetic polypeptide

SEQ ID NO: 10632 - protein, 43 aa, Artificial Sequence; identical to SEQ ID NO: 10624
  Synthetic polypeptide

SEQ ID NO: 10633 - protein, 43 aa, Artificial Sequence; identical to SEQ ID NO: 10624
  Synthetic polypeptide

SEQ ID NO: 10634 - protein, 134 aa, Artificial Sequence
  Synthetic polypeptide
APAPAAAAGAMAAAAAEQQQFYLLLGNLLSPDNVVRKQAEETYENIPGQSKITFLLQAIRNTTAAEEARQMAAVLLRRLLSSAFDEVYPALPSDVQTAIKSELLMIIQMETQSSMRKKVCDIAAELARNLIGVY

SEQ ID NO: 10635 - protein, 75 aa, Artificial Sequence
  Synthetic polypeptide
RRRRRPRRAQWRRPRRSSNSSTCSWETCSAPTMWSGNRQRKPMRISQASQRSHSSYKPSEIQQLLKRLDKWPPFS

SEQ ID NO: 10636 - protein, 75 aa, Artificial Sequence; identical to SEQ ID NO: 10635
  Synthetic polypeptide

SEQ ID NO: 10637 - protein, 75 aa, Artificial Sequence; identical to SEQ ID NO: 10635
  Synthetic polypeptide

SEQ ID NO: 10638 - protein, 75 aa, Artificial Sequence; identical to SEQ ID NO: 10635
  Synthetic polypeptide

SEQ ID NO: 10639 - protein, 75 aa, Artificial Sequence; identical to SEQ ID NO: 10635
  Synthetic polypeptide

SEQ ID NO: 10640 - protein, 75 aa, Artificial Sequence; identical to SEQ ID NO: 10635
  Synthetic polypeptide

SEQ ID NO: 10641 - protein, 75 aa, Artificial Sequence; identical to SEQ ID NO: 10635
  Synthetic polypeptide

SEQ ID NO: 10642 - protein, 75 aa, Artificial Sequence; identical to SEQ ID NO: 10635
  Synthetic polypeptide

SEQ ID NO: 10643 - protein, 111 aa, Artificial Sequence
  Synthetic polypeptide
APAPAAAAGAMAAAAAEQQQFYLLLGNLLSPDNVVRKQAEETYENIPGQSKITFLLQAIRNTTAAEEARQMAAVLLRRLLSSAFDEVYPALPSDVQTAIKSELLMIIQMET

SEQ ID NO: 10644 - protein, 1107 aa, Artificial Sequence
  Synthetic polypeptide
APAPAAAAGAMAAAAAEQQQFYLLLGNLLSPDNVVRKQAEETYENIPGQSKITFLLQAIRNTTAAEEARQMAAVLLRRLLSSAFDEVYPALPSDVQTAIKSELLMIIQMETQSSMRKKVCDIAAELARNLIDEDGNNQWPEGLKFLFDSVSSQNVGLREAALHIFWNFPGIFGNQQQHYLDVIKRMLVQCMQDQEHPSIRTLSARATAAFILANEHNVALFKHFADLLPGFLQAVNDSCYQNDDSVLKSLVEIADTVPKYLRPHLEATLQLSLKLCGDTSLNNMQRQLALEVIVTLSETAAAMLRKHTNIVAQTIPQMLAMMVDLEEDEDWANADELEDDDFDSNAVAGESALDRMACGLGGKLVLPMIKEHIMQMLQNPDWKYRHAGLMALSAIGEGCHQQMEGILNEIVNFVLLFLQDPHPRVRYAACNAVGQMATDFAPGFQKKFHEKVIAALLQTMEDQGNQRVQAHAAAALINFTEDCPKSLLIPYLDNLVKHLHSIMVLKLQELIQKGTKLVLEQVVTSIASVADTAEEKFVPYYDLFMPSLKHIVENAVQKELRLLRGKTIECISLIGLAVGKEKFMQDASDVMQLLLKTQTDFNDMEDDDPQISYMISAWARMCKILGKEFQQYLPVVMGPLMKTASIKPEVALLDTQDMENMSDDDGWEFVNLGDQQSFGIKTAGLEEKSTACQMLVCYAKELKEGFVEYTEQVVKLMVPLLKFYFHDGVRVAAAESMPLLLECARVRGPEYLTQMWHFMCDALIKAIGTEPDSDVLSEIMHSFAKCIEVMGDGCLNNEHFEELGGILKAKLEEHFKNQELRQVKRQDEDYDEQVEESLQDEDDNDVYILTKVSDILHSIFSSYKEKVLPWFEQLLPLIVNLICPHRPWPDRQWGLCIFDDVIEHCSPASFKYAEYFLRPMLQYVCDNSPEVRQAAAYGLGVMAQYGGDNYRPFCTEALPLLVRVIQSADSKTKENVNATENCISAVGKIMKFKPDCVNVEEVLPHWLSWLPLHEDKEEAVQTFNYLCDLIESNHPIVLGPNNTNLPKIFSIIAEGEMHEAIKHEDPCAKRLANVVRQVQTSGGLWTECIAQLSPEQQAAIQELLNSA

SEQ ID NO: 10645 - protein, 56 aa, Artificial Sequence
  Synthetic polypeptide
APAPAAAAGAMAAAAAEQQQFYLLLGNLLSPDNVVRKQAEETYENIPGQSKITFLL

SEQ ID NO: 10646 - protein, 55 aa, Artificial Sequence
  Synthetic polypeptide
RRRRRPRRAQWRRPRRSSNSSTCSWETCSAPTMWSGNRQRKPMRISQASQRSHSS

SEQ ID NO: 10647 - protein, 44 aa, Artificial Sequence
  Synthetic polypeptide
GAGAGGRGGRNGGGRGGAATVLPAPGKPAQPRQCGPETGRDRYV

SEQ ID NO: 10648 - protein, 55 aa, Artificial Sequence
  Synthetic polypeptide
APAPAAAAGAMAAAAAEQQQFYLLLGNLLSPDNVVRKQAETDMFEKFETCVALHK

SEQ ID NO: 10649 - protein, 50 aa, Artificial Sequence
  Synthetic polypeptide
RRRRRPRRAQWRRPRRSSNSSTCSWETCSAPTMWSGNRQRQICLKSLKPV

SEQ ID NO: 10650 - protein, 80 aa, Artificial Sequence
  Synthetic polypeptide
APAPAAAAGAMAAAAAEQQQFYLLLGNLLSPDNVVRKQAEETYENIPGQSKITFLLQAIRNTTAAEEARQMAAVLLRRLL

SEQ ID NO: 10651 - protein, 42 aa, Artificial Sequence
  Synthetic polypeptide
GAGAGGRGGRNGGGRGGAATVLPAPGKPAQPRQCGPETGRGN

SEQ ID NO: 10652 - protein, 42 aa, Artificial Sequence
  Synthetic polypeptide
APAPAAAAGAMAAAAAEQQQFYLLLGNLLSPDNVVRKQAEVT

SEQ ID NO: 10653 - protein, 40 aa, Artificial Sequence
  Synthetic polypeptide
RRRRRPRRAQWRRPRRSSNSSTCSWETCSAPTMWSGNRQR

SEQ ID NO: 10654 - protein, 90 aa, Artificial Sequence
  Synthetic polypeptide
APAPAAAAGAMAAAAAEQQQFYLLLGNLLSPDNVVRKQAEETYENIPGQSKITFLLQAIRNTTAAEEARQMAAVLLRRLLSSAFDEVYPA

SEQ ID NO: 10655 - protein, 90 aa, Artificial Sequence; identical to SEQ ID NO: 10654
  Synthetic polypeptide

SEQ ID NO: 10656 - protein, 109 aa, Artificial Sequence
  Synthetic polypeptide
APAPAAAAGAMAAAAAEQQQFYLLLGNLLSPDNVVRKQAEETYENIPGQSKITFLLQAIRNTTAAEEARQMAAVLLRRLLSSAFDEVYPALPSDVQTAIKSELLMIIQM

SEQ ID NO: 10657 - protein, 67 aa, Artificial Sequence
  Synthetic polypeptide
APAPAAAAGAMAAAAAEQQQFYLLLGNLLSPDNVVRKQAEETYENIPGQSKITFLLQAIRNTTAAEE

SEQ ID NO: 10658 - protein, 67 aa, Artificial Sequence
  Synthetic polypeptide
RRRRRPRRAQWRRPRRSSNSSTCSWETCSAPTMWSGNRQRKPMRISQASQRSHSSYKPSEIQQLLKR

SEQ ID NO: 10659 - protein, 98 aa, Artificial Sequence
  Synthetic polypeptide
APAPAAAAGAMAAAAAEQQQFYLLLGNLLSPDNVVRKQAEETYENIPGQSKITFLLQAIRNTTAAEEARQMAAVLLRRLLSSAFDEVYPALPSDVQTA

SEQ ID NO: 10660 - protein, 213 aa, Artificial Sequence
  Synthetic polypeptide
AVFEADIWSLGITAIELARGEPPHSELHPMKVLFLIPKNNPPTLEGNYSKPLKEFVEACLNKEPSFRPTAKELLKHKFILRNAKKTSYLTELIDRYKRWKAEQSHDDSSSEDSDAETDGQASGGSDSGDWIFTIREKDPKNLENGALQPSDLDRNKLKEKSQACGGNLGSIEELRGAIYLAEEACPGISDTMVAQLVQRLQRYSLSGGGTSSH

SEQ ID NO: 10661 - protein, 25 aa, Artificial Sequence
  Synthetic polypeptide
PEEKIWNIPAQRNEPCLRQTSGPWA

SEQ ID NO: 10662 - protein, 25 aa, Artificial Sequence
  Synthetic polypeptide
PEEKIWNIPAQRNEPCLRQTSGPWA

SEQ ID NO: 10663 - protein, 25 aa, Artificial Sequence
  Synthetic polypeptide
PEEKIWNIPAQRNEPCLRQTSGPWA

SEQ ID NO: 10664 - protein, 25 aa, Artificial Sequence
  Synthetic polypeptide
PEEKIWNIPAQRNEPCLRQTSGPWA

SEQ ID NO: 10665 - protein, 25 aa, Artificial Sequence
  Synthetic polypeptide
PEEKIWNIPAQRNEPCLRQTSGPWA

SEQ ID NO: 10666 - protein, 236 aa, Artificial Sequence
  Synthetic polypeptide
AVFEADIWSLGITAIELARGEPPHSELHPMKVLFLIPKNNPPTLEGNYSKPLKEFVEACLNKEPSFRPTAKELLKHKFILRNAKKTSYLTELIDRYKRWKAEQSHDDSSSEDSDAETDGQASGGSDSGDWIFTIREKDPKNLENGALQPSDLDRNKMKDIPKRPFSQCLSTIISPLFAELKEKSQACGGNLGSIEELRGAIYLAEEACPGISDTMVAQLVQRLQRYSLSGGGTSSH

SEQ ID NO: 10667 - protein, 236 aa, Artificial Sequence; identical to SEQ ID NO: 10666
  Synthetic polypeptide

SEQ ID NO: 10668 - protein, 236 aa, Artificial Sequence; identical to SEQ ID NO: 10666
  Synthetic polypeptide

SEQ ID NO: 10669 - protein, 256 aa, Artificial Sequence
  Synthetic polypeptide
AVFEADIWSLGITAIELARGEPPHSELHPMKVLFLIPKNNPPTLEGNYSKPLKEFVEACLNKEPSFRPTAKELLKHKFILRNAKKTSYLTELIDRYKRWKAEQSHDDSSSEDSDAETDGQASGGSDSGDWIFTIREKDPKNLENGALQPSDLDRNKMKDIPKRPFSQCLSTIISPLFAELKEKSQACGGNLGSIEELRGAIYLAEEACPGISDTMVAQLVQRLQRSIHGNQAPPDCHLAQVQAFGGSGCVLGSRSV

SEQ ID NO: 10670 - protein, 304 aa, Artificial Sequence
  Synthetic polypeptide
GTAGTGPSSQRQVQNGPSPDEMDIQRRQVMEQHQQQRQESLERRTSATGPILPPGHPSSAASAPVSCSGPPPPPPPPVPPPPTGATPPPPPPLPAGGAQGSSHDESSMSGLAAAIAGAKLRRVQRPEDASGGSSPSGTSKSDANRASSGGGGGGLMEEMNKLLAKRRKAASQSDKPAEKKEDESQMEDPSTSPSPGTRAASQPPNSSEAGRKPWERSNSVEKPVSSILSRTPSVAKSPEAKSPLQSQPHSRMKPAGSVNDMALDAFDLDRMKQEILEEVVRELHKVKEEIIDAIRQELSGISTT

SEQ ID NO: 10671 - protein, 304 aa, Artificial Sequence; identical to SEQ ID NO: 10670
  Synthetic polypeptide

SEQ ID NO: 10672 - protein, 35 aa, Artificial Sequence
  Synthetic polypeptide
ESCWRFRGQRGQAPPASVRCRMAPLLMRWTSREDK

SEQ ID NO: 10673 - protein, 35 aa, Artificial Sequence; identical to SEQ ID NO: 10672
  Synthetic polypeptide

SEQ ID NO: 10674 - protein, 35 aa, Artificial Sequence; identical to SEQ ID NO: 10672
  Synthetic polypeptide

SEQ ID NO: 10675 - protein, 35 aa, Artificial Sequence; identical to SEQ ID NO: 10672
  Synthetic polypeptide

SEQ ID NO: 10676 - protein, 35 aa, Artificial Sequence; identical to SEQ ID NO: 10672
  Synthetic polypeptide

SEQ ID NO: 10677 - protein, 25 aa, Artificial Sequence
  Synthetic polypeptide
RAVGDLGDSGDRPLQPASGAEWPLS

SEQ ID NO: 10678 - protein, 25 aa, Artificial Sequence
  Synthetic polypeptide
RAVGDLGDSGDRPLQPASGAEWPLS

SEQ ID NO: 10679 - protein, 25 aa, Artificial Sequence
  Synthetic polypeptide
RAVGDLGDSGDRPLQPASGAEWPLS

SEQ ID NO: 10680 - protein, 25 aa, Artificial Sequence
  Synthetic polypeptide
RAVGDLGDSGDRPLQPASGAEWPLS

SEQ ID NO: 10681 - protein, 25 aa, Artificial Sequence
  Synthetic polypeptide
RAVGDLGDSGDRPLQPASGAEWPLS

SEQ ID NO: 10682 - protein, 272 aa, Artificial Sequence
  Synthetic polypeptide
GTAGTGPSSQRQVQNGPSPDEMDIQRRQVMEQHQQQRQESLERRTSATGPILPPGHPSSAASAPVSCSGPPPPPPPPVPPPPTGATPPPPPPLPAGGAQGSSHDESSMSGLAAAIAGAKLRRVQRPEDASGGSSPSGTSKSDANRASSGGGGGGLMEEMNKLLAKRRKAASQSDKPAEKKEDESQMEDPSTSPSPGTRAASQPPNSSEAGRKPWERSNSVEKPVSSILSRTPSVAKSPEAKSPLQSQPHSRYRTTLLLTCPPGFGAPLSPVP

SEQ ID NO: 10683 - protein, 16 aa, Artificial Sequence
  Synthetic polypeptide
GTAGTGPSSQRQVQNG

SEQ ID NO: 10684 - protein, 22 aa, Artificial Sequence
  Synthetic polypeptide
ESCWRFRGQRGQAPPASVRCRM

SEQ ID NO: 10685 - protein, 22 aa, Artificial Sequence
  Synthetic polypeptide
RAVGDLGDSGDRPLQPASGAEW

SEQ ID NO: 10686 - protein, 69 aa, Artificial Sequence
  Synthetic polypeptide
GTAGTGPSSQRQVQNGPSPDEMDIQRRQVMEQHQQQRQESLERRTSATGPILPPGHPSSAASAPVSCSG

SEQ ID NO: 10687 - protein, 207 aa, Artificial Sequence
  Synthetic polypeptide
GTAGTGPSSQRQVQNGPSPDEMDIQRRQVMEQHQQQRQESLERRTSATGPILPPGHPSSAASAPVSCSGPPPPPPPPVPPPPTGATPPPPPPLPAGGAQGSSHDESSMSGLAAAIAGAKLRRVQRPEDASGGSSPSGTSKSDANRASSGGGGGGLMEEMNKLLAKRRKAASQSDKPAEKKEDESQMEDPSTSPSPGTRAASQPPNSS

SEQ ID NO: 10688 - protein, 25 aa, Artificial Sequence
  Synthetic polypeptide
PRAPPASVRCRMAPLLMRWTSREDK

SEQ ID NO: 10689 - protein, 25 aa, Artificial Sequence
  Synthetic polypeptide
PRAPPASVRCRMAPLLMRWTSREDK

SEQ ID NO: 10690 - protein, 25 aa, Artificial Sequence
  Synthetic polypeptide
PRAPPASVRCRMAPLLMRWTSREDK

SEQ ID NO: 10691 - protein, 25 aa, Artificial Sequence
  Synthetic polypeptide
PRAPPASVRCRMAPLLMRWTSREDK

SEQ ID NO: 10692 - protein, 25 aa, Artificial Sequence
  Synthetic polypeptide
PRAPPASVRCRMAPLLMRWTSREDK

SEQ ID NO: 10693 - protein, 39 aa, Artificial Sequence
  Synthetic polypeptide
WKQQLGTGRPELLFQQHRSLEAHDLGPLQPASGAEWPLS

SEQ ID NO: 10694 - protein, 39 aa, Artificial Sequence; identical to SEQ ID NO: 10693
  Synthetic polypeptide

SEQ ID NO: 10695 - protein, 39 aa, Artificial Sequence; identical to SEQ ID NO: 10693
  Synthetic polypeptide

SEQ ID NO: 10696 - protein, 39 aa, Artificial Sequence; identical to SEQ ID NO: 10693
  Synthetic polypeptide

SEQ ID NO: 10697 - protein, 39 aa, Artificial Sequence; identical to SEQ ID NO: 10693
  Synthetic polypeptide

SEQ ID NO: 10698 - protein, 324 aa, Artificial Sequence
  Synthetic polypeptide
GSSSWVLGGLSFCSSSTVHWRHMTSGPSSQRQVQNGPSPDEMDIQRRQVMEQHQQQRQESLERRTSATGPILPPGHPSSAASAPVSCSGPPPPPPPPVPPPPTGATPPPPPPLPAGGAQGSSHDESSMSGLAAAIAGAKLRRVQRPEDASGGSSPSGTSKSDANRASSGGGGGGLMEEMNKLLAKRRKAASQSDKPAEKKEDESQMEDPSTSPSPGTRAASQPPNSSEAGRKPWERSNSVEKPVSSILSRTPSVAKSPEAKSPLQSQPHSRMKPAGSVNDMALDAFDLDRMKQEILEEVVRELHKVKEEIIDAIRQELSGISTT

SEQ ID NO: 10699 - protein, 324 aa, Artificial Sequence; identical to SEQ ID NO: 10698
  Synthetic polypeptide

SEQ ID NO: 10700 - protein, 292 aa, Artificial Sequence
  Synthetic polypeptide
GSSSWVLGGLSFCSSSTVHWRHMTSGPSSQRQVQNGPSPDEMDIQRRQVMEQHQQQRQESLERRTSATGPILPPGHPSSAASAPVSCSGPPPPPPPPVPPPPTGATPPPPPPLPAGGAQGSSHDESSMSGLAAAIAGAKLRRVQRPEDASGGSSPSGTSKSDANRASSGGGGGGLMEEMNKLLAKRRKAASQSDKPAEKKEDESQMEDPSTSPSPGTRAASQPPNSSEAGRKPWERSNSVEKPVSSILSRTPSVAKSPEAKSPLQSQPHSRYRTTLLLTCPPGFGAPLSPVP

SEQ ID NO: 10701 - protein, 12 aa, Artificial Sequence
  Synthetic polypeptide
PRAPPASVRCRM

SEQ ID NO: 10702 - protein, 36 aa, Artificial Sequence
  Synthetic polypeptide
WKQQLGTGRPELLFQQHRSLEAHDLGPLQPASGAEW

SEQ ID NO: 10703 - protein, 36 aa, Artificial Sequence
  Synthetic polypeptide
GSSSWVLGGLSFCSSSTVHWRHMTSGPSSQRQVQNG

SEQ ID NO: 10704 - protein, 89 aa, Artificial Sequence
  Synthetic polypeptide
GSSSWVLGGLSFCSSSTVHWRHMTSGPSSQRQVQNGPSPDEMDIQRRQVMEQHQQQRQESLERRTSATGPILPPGHPSSAASAPVSCSG

SEQ ID NO: 10705 - protein, 227 aa, Artificial Sequence
  Synthetic polypeptide
GSSSWVLGGLSFCSSSTVHWRHMTSGPSSQRQVQNGPSPDEMDIQRRQVMEQHQQQRQESLERRTSATGPILPPGHPSSAASAPVSCSGPPPPPPPPVPPPPTGATPPPPPPLPAGGAQGSSHDESSMSGLAAAIAGAKLRRVQRPEDASGGSSPSGTSKSDANRASSGGGGGGLMEEMNKLLAKRRKAASQSDKPAEKKEDESQMEDPSTSPSPGTRAASQPPNSS

SEQ ID NO: 10706 - protein, 26 aa, Artificial Sequence
  Synthetic polypeptide
LKIQKWHMPVMPATGEAEDEACWERE

SEQ ID NO: 10707 - protein, 26 aa, Artificial Sequence
  Synthetic polypeptide
LKIQKWHMPVMPATGEAEDEACWERE

SEQ ID NO: 10708 - protein, 26 aa, Artificial Sequence
  Synthetic polypeptide
LKIQKWHMPVMPATGEAEDEACWERE

SEQ ID NO: 10709 - protein, 61 aa, Artificial Sequence
  Synthetic polypeptide
CQLLGRLRMKPAGSVNDMALDAFDLDRMKQEILEEVVRELHKVKEEIIDAIRQELSGISTT

SEQ ID NO: 10710 - protein, 61 aa, Artificial Sequence; identical to SEQ ID NO: 10709
  Synthetic polypeptide

SEQ ID NO: 10711 - protein, 61 aa, Artificial Sequence; identical to SEQ ID NO: 10709
  Synthetic polypeptide

SEQ ID NO: 10712 - protein, 6 aa, Artificial Sequence
  Synthetic polypeptide
ARNPAI

SEQ ID NO: 10713 - protein, 6 aa, Artificial Sequence
  Synthetic polypeptide
ARNPAI

SEQ ID NO: 10714 - protein, 6 aa, Artificial Sequence
  Synthetic polypeptide
ARNPAI

SEQ ID NO: 10715 - protein, 6 aa, Artificial Sequence
  Synthetic polypeptide
ARNPAI

SEQ ID NO: 10716 - protein, 6 aa, Artificial Sequence
  Synthetic polypeptide
ARNPAI

SEQ ID NO: 10717 - protein, 222 aa, Artificial Sequence
  Synthetic polypeptide
QGTQLFSGRSDFRITTLKFHPKDHNIFLCGGFSSEMKAWDIRTGKVMRSYKATIQQTLDILFLREGSEFLSSTDASTRDSADRTIIAWDFRTSAKISNQIFHERFTCPSLALHPREPVFLAQTNGNYLALFSTVWPYRMSRRRRYEGHKVEGYSVGCECSPGGDLLVTGSADGRVLMYSFRTASRACTLQGHTQACVGTTYHPVLPSVLATCSWGGDMKIWH

SEQ ID NO: 10718 - protein, 222 aa, Artificial Sequence; identical to SEQ ID NO: 10717
  Synthetic polypeptide

SEQ ID NO: 10719 - protein, 222 aa, Artificial Sequence; identical to SEQ ID NO: 10717
  Synthetic polypeptide

SEQ ID NO: 10720 - protein, 222 aa, Artificial Sequence; identical to SEQ ID NO: 10717
  Synthetic polypeptide

SEQ ID NO: 10721 - protein, 16 aa, Artificial Sequence
  Synthetic polypeptide
KEPSYLVVEVTLESLP

SEQ ID NO: 10722 - protein, 16 aa, Artificial Sequence
  Synthetic polypeptide
KEPSYLVVEVTLESLP

SEQ ID NO: 10723 - protein, 16 aa, Artificial Sequence
  Synthetic polypeptide
KEPSYLVVEVTLESLP

SEQ ID NO: 10724 - protein, 16 aa, Artificial Sequence
  Synthetic polypeptide
KEPSYLVVEVTLESLP

SEQ ID NO: 10725 - protein, 16 aa, Artificial Sequence
  Synthetic polypeptide
KEPSYLVVEVTLESLP

SEQ ID NO: 10726 - protein, 17 aa, Artificial Sequence
  Synthetic polypeptide
QGTQLFSGRSDFRITTL

SEQ ID NO: 10727 - protein, 25 aa, Artificial Sequence
  Synthetic polypeptide
RSVYKFPVGTECLLRDVRACSSAPC

SEQ ID NO: 10728 - protein, 53 aa, Artificial Sequence
  Synthetic polypeptide
PSPYHLLPVSCCWCSSLPHSCTLRALYSKDLFINFLWVPNASSEMFGPAPRPP

SEQ ID NO: 10729 - protein, 20 aa, Artificial Sequence
  Synthetic polypeptide
ISCGYRMPPQRCSGLLLGPL

SEQ ID NO: 10730 - protein, 311 aa, Artificial Sequence
  Synthetic polypeptide
RSVYKFPVGTECLLRDVRACSSAPCANNRTCVSLDDGLYECSCAPGYSGKDCQKKDGPCVINGSPCQHGGTCVDDEGRASHASCLCPPGFSGNFCEIVANSCTPNPCENDGVCTDIGGDFRCRCPAGFIDKTCSRPVTNCASSPCQNGGTCLQHTQVSYECLCKPEFTGLTCVKKRALSPQQVTRLPSGYGLAYRLTPGVHELPVQQPEHRILKVSMKELNKKTPLLTEGQAICFTILGVLTSLVVLGTVGIVFLNKCETWVSNLRYNHMLRKKKNLLLQYNSGEDLAVNIIFPEKIDMTTFSKEAGDEEI

SEQ ID NO: 10731 - protein, 60 aa, Artificial Sequence
  Synthetic polypeptide
PSPYHLLPVSCCWCSSLPHSCTLRALYSKDLFINFLWVPNASSEMFGPAPRPPVPTTGPA

SEQ ID NO: 10732 - protein, 60 aa, Artificial Sequence; identical to SEQ ID NO: 10731
  Synthetic polypeptide

SEQ ID NO: 10733 - protein, 34 aa, Artificial Sequence
  Synthetic polypeptide
ISCGYRMPPQRCSGLLLGPLCQQQDLREPGRWPL

SEQ ID NO: 10734 - protein, 34 aa, Artificial Sequence; identical to SEQ ID NO: 10733
  Synthetic polypeptide

SEQ ID NO: 10735 - protein, 238 aa, Artificial Sequence
  Synthetic polypeptide
RSVYKFPVGTECLLRDVRACSSAPCANNRTCVSLDDGLYECSCAPGYSGKDCQKKDGPCVINGSPCQHGGTCVDDEGRASHASCLCPPGFSGNFCEIVANSCTPNPCENDGVCTDIGGDFRCRCPAGFIDKTCSRPVTNCASSPCQNGGTCLQHTQGQAICFTILGVLTSLVVLGTVGIVFLNKCETWVSNLRYNHMLRKKKNLLLQYNSGEDLAVNIIFPEKIDMTTFSKEAGDEEI

SEQ ID NO: 10736 - protein, 17 aa, Artificial Sequence
  Synthetic polypeptide
AMIAPLHSSLDDRRLTP

SEQ ID NO: 10737 - protein, 15 aa, Artificial Sequence
  Synthetic polypeptide
SHHFIPAWMTEDSLH

SEQ ID NO: 10738 - protein, 6 aa, Artificial Sequence
  Synthetic polypeptide
QKTHSI

SEQ ID NO: 10739 - protein, 18 aa, Artificial Sequence
  Synthetic polypeptide
GDPISTKYQKITQKTHSI

SEQ ID NO: 10740 - protein, 24 aa, Artificial Sequence
  Synthetic polypeptide
DQPRQHKETPSLQNIKKLPRRLTP

SEQ ID NO: 10741 - protein, 29 aa, Artificial Sequence
  Synthetic polypeptide
AQEFETSLGNIRRPHLYKISKNYPEDSLH

SEQ ID NO: 10742 - protein, 23 aa, Artificial Sequence
  Synthetic polypeptide
NQNRWGGPQAPAISSTLQVRKQH

SEQ ID NO: 10743 - protein, 23 aa, Artificial Sequence
  Synthetic polypeptide
NQNRWGGPQAPAISSTLQVRKQH

SEQ ID NO: 10744 - protein, 23 aa, Artificial Sequence
  Synthetic polypeptide
NQNRWGGPQAPAISSTLQVRKQH

SEQ ID NO: 10745 - protein, 23 aa, Artificial Sequence
  Synthetic polypeptide
NQNRWGGPQAPAISSTLQVRKQH

SEQ ID NO: 10746 - protein, 23 aa, Artificial Sequence
  Synthetic polypeptide
NQNRWGGPQAPAISSTLQVRKQH

SEQ ID NO: 10747 - protein, 23 aa, Artificial Sequence
  Synthetic polypeptide
NQNRWGGPQAPAISSTLQVRKQH

SEQ ID NO: 10748 - protein, 53 aa, Artificial Sequence
  Synthetic polypeptide
GAFRNPDVQTVPYPDETRIAGVGPKHQPFLQLSRSESNIECRRNGGLLQGIFK

SEQ ID NO: 10749 - protein, 53 aa, Artificial Sequence; identical to SEQ ID NO: 10748
  Synthetic polypeptide

SEQ ID NO: 10750 - protein, 53 aa, Artificial Sequence; identical to SEQ ID NO: 10748
  Synthetic polypeptide

SEQ ID NO: 10751 - protein, 53 aa, Artificial Sequence; identical to SEQ ID NO: 10748
  Synthetic polypeptide

SEQ ID NO: 10752 - protein, 53 aa, Artificial Sequence; identical to SEQ ID NO: 10748
  Synthetic polypeptide

SEQ ID NO: 10753 - protein, 98 aa, Artificial Sequence
  Synthetic polypeptide
ELSEILMSRLYPIPMKPESLGWAPSTSHFFNSPGQKATLNAEEMADFYKEFLSKNFQKHMYYNRDWYKRNFAITFFMGKVALERIWNKLKQKQKKRSN

SEQ ID NO: 10754 - protein, 98 aa, Artificial Sequence; identical to SEQ ID NO: 10753
  Synthetic polypeptide

SEQ ID NO: 10755 - protein, 98 aa, Artificial Sequence; identical to SEQ ID NO: 10753
  Synthetic polypeptide

SEQ ID NO: 10756 - protein, 624 aa, Artificial Sequence
  Synthetic polypeptide
ELSEILMSRLYPIPMKPESLGWAPSTSHFFNSPGQKATLNAEEMADFYKEFLSKNFQKHMYYNRMYDNMSTMVYIKEDKLEKLTQDEIISKTKQVIQGLEALKNEHNSILQSLLETLKCLKKDDESNLVEEKSNMIRKSLEMLELGLSEAQVMMALSNHLNAVESEKQKLRAQVRRLCQENQWLRDELANTQQKLQKSEQSVAQLEEEKKHLEFMNQLKKYDDDISPSEDKDTDSTKEPLDDLFPNDEDDPGQGIQQQHSSAAAAAQQGGYEIPARLRTLHNLVIQYASQGRYEVAVPLCKQALEDLEKTSGHDHPDVATMLNILALVYRDQNKYKDAANLLNDALAIREKTLGKDHPAVAATLNNLAVLYGKRGKYKEAEPLCKRALEIREKVLGKDHPDVAKQLNNLALLCQNQGKYEEVEYYYQRALEIYQTKLGPDDPNVAKTKNNLASCYLKQGKFKQAETLYKEILTRAHEREFGSVDDENKPIWMHAEEREECKGKQKDGTSFGEYGGWYKACKVDSPTVTTTLKNLGALYRRQGKFEAAETLEEAAMRSRKQGLDNVHKQRVAEVLNDPENMEKRRSRESLNVDVVKYESGPDGGEEVSMSVEWNGMRKMKLGLVN

SEQ ID NO: 10757 - protein, 39 aa, Artificial Sequence
  Synthetic polypeptide
GAFRNPDVQTVPYPDETRIAGVGPKHQPFLQLSRSESNI

SEQ ID NO: 10758 - protein, 39 aa, Artificial Sequence
  Synthetic polypeptide
ELSEILMSRLYPIPMKPESLGWAPSTSHFFNSPGQKATL

SEQ ID NO: 10759 - protein, 53 aa, Artificial Sequence
  Synthetic polypeptide
ELSEILMSRLYPIPMKPESLGWAPSTSHFFNSPGQKATLNAEEMADFYKEFLS

SEQ ID NO: 10760 - protein, 58 aa, Artificial Sequence
  Synthetic polypeptide
VGELLPGVCPAPVGAAGPPAPGAHPPLQPAALGGPGEPREPGRAPGQRCPGMHPGGSG

SEQ ID NO: 10761 - protein, 58 aa, Artificial Sequence; identical to SEQ ID NO: 10760
  Synthetic polypeptide

SEQ ID NO: 10762 - protein, 34 aa, Artificial Sequence
  Synthetic polypeptide
SHLGAVVSPGGIWQHLKTFLAATAGQGVLLALSR

SEQ ID NO: 10763 - protein, 34 aa, Artificial Sequence; identical to SEQ ID NO: 10762
  Synthetic polypeptide

SEQ ID NO: 10764 - protein, 29 aa, Artificial Sequence
  Synthetic polypeptide
TQEAEVAVWSGTDWLQTDHVLHRGDRCPA

SEQ ID NO: 10765 - protein, 113 aa, Artificial Sequence
  Synthetic polypeptide
KYKISQAWWQEPVIPATQETEAGESLEPRRRRLRSGVGLTGSRQTMFYTEVTDAQRSGPGGGLVEEGELIEVVHLPLEGAQAFADDPDIPKTLGVIFGVSWFLSQVAPNLDLQ

SEQ ID NO: 10766 - protein, 25 aa, Artificial Sequence
  Synthetic polypeptide
FQLLRRLRQENRLNPGGGGCGLEWD

SEQ ID NO: 10767 - protein, 41 aa, Artificial Sequence
  Synthetic polypeptide
GGRCVGGSGREGELPGEGLAQVLPQVRALQQDADARGPRRA

SEQ ID NO: 10768 - protein, 41 aa, Artificial Sequence; identical to SEQ ID NO: 10767
  Synthetic polypeptide

SEQ ID NO: 10769 - protein, 202 aa, Artificial Sequence
  Synthetic polypeptide
EAGVWGEAAEKVSSLGKDWHKFCLKCERCSKTLTPGGHAEHDGKPFCHKPCYATLFGPKGVNIGGAGSYIYEKPLAEGPQVTGPIEVPAARAEERKASGPPKGPSRASSVTTFTGEPNTCPRCSKKVYFAEKVTSLGKDWHRPCLRCERCGKTLTPGGHAEHDGQPYCHKPCYGILFGPKGVNTGAVGSYIYDRDPEGKVQP

SEQ ID NO: 10770 - protein, 202 aa, Artificial Sequence; identical to SEQ ID NO: 10769
  Synthetic polypeptide

SEQ ID NO: 10771 - protein, 11 aa, Artificial Sequence
  Synthetic polypeptide
RQVCGGKRPRR

SEQ ID NO: 10772 - protein, 11 aa, Artificial Sequence
  Synthetic polypeptide
RQVCGGKRPRR

SEQ ID NO: 10773 - protein, 25 aa, Artificial Sequence
  Synthetic polypeptide
GGRCVGGSGCVSEEAGVCGGKRPRR

SEQ ID NO: 10774 - protein, 25 aa, Artificial Sequence
  Synthetic polypeptide
GGRCVGGSGCVSEEAGVCGGKRPRR

SEQ ID NO: 10775 - protein, 54 aa, Artificial Sequence
  Synthetic polypeptide
EAGVWGEAGVCLRKRVCVGGSGREGELPGEGLAQVLPQVRALQQDADARGPRRA

SEQ ID NO: 10776 - protein, 54 aa, Artificial Sequence; identical to SEQ ID NO: 10775
  Synthetic polypeptide

SEQ ID NO: 10777 - protein, 203 aa, Artificial Sequence
  Synthetic polypeptide
GSGCVWGEAAEKVSSLGKDWHKFCLKCERCSKTLTPGGHAEHDGKPFCHKPCYATLFGPKGVNIGGAGSYIYEKPLAEGPQVTGPIEVPAARAEERKASGPPKGPSRASSVTTFTGEPNTCPRCSKKVYFAEKVTSLGKDWHRPCLRCERCGKTLTPGGHAEHDGQPYCHKPCYGILFGPKGVNTGAVGSYIYDRDPEGKVQP

SEQ ID NO: 10778 - protein, 203 aa, Artificial Sequence; identical to SEQ ID NO: 10777
  Synthetic polypeptide

SEQ ID NO: 10779 - protein, 68 aa, Artificial Sequence
  Synthetic polypeptide
GGRCVGGSGCVSEEAGVCGGKRVCGGGRVGEAGVCVRGRCVGGGRFVGGGGRVGEAGVRRVSGRQPRR

SEQ ID NO: 10780 - protein, 68 aa, Artificial Sequence; identical to SEQ ID NO: 10779
  Synthetic polypeptide

SEQ ID NO: 10781 - protein, 39 aa, Artificial Sequence
  Synthetic polypeptide
GGCPGGSREGELPGEGLAQVLPQVRALQQDADARGPRRA

SEQ ID NO: 10782 - protein, 39 aa, Artificial Sequence; identical to SEQ ID NO: 10781
  Synthetic polypeptide

SEQ ID NO: 10783 - protein, 246 aa, Artificial Sequence
  Synthetic polypeptide
GSGCVWGEAGVWRRACGGGGCVCERKVCGRRQICGGRRACGGGGCEAGVREAAEKVSSLGKDWHKFCLKCERCSKTLTPGGHAEHDGKPFCHKPCYATLFGPKGVNIGGAGSYIYEKPLAEGPQVTGPIEVPAARAEERKASGPPKGPSRASSVTTFTGEPNTCPRCSKKVYFAEKVTSLGKDWHRPCLRCERCGKTLTPGGHAEHDGQPYCHKPCYGILFGPKGVNTGAVGSYIYDRDPEGKVQP

SEQ ID NO: 10784 - protein, 246 aa, Artificial Sequence; identical to SEQ ID NO: 10783
  Synthetic polypeptide

SEQ ID NO: 10785 - protein, 74 aa, Artificial Sequence
  Synthetic polypeptide
GGRCVGGSGCVSEEAGVCGGKRVCGGGRVGEAGVCVRGRCVGGGRFVGGGGRVGEAGVRRVSGRQVLERGQPRR

SEQ ID NO: 10786 - protein, 74 aa, Artificial Sequence; identical to SEQ ID NO: 10785
  Synthetic polypeptide

SEQ ID NO: 10787 - protein, 45 aa, Artificial Sequence
  Synthetic polypeptide
GGCPGGRCWSAGSREGELPGEGLAQVLPQVRALQQDADARGPRRA

SEQ ID NO: 10788 - protein, 45 aa, Artificial Sequence; identical to SEQ ID NO: 10787
  Synthetic polypeptide

SEQ ID NO: 10789 - protein, 252 aa, Artificial Sequence
  Synthetic polypeptide
GSGCVWGEAGVWRRACGGGGCVCERKVCGRRQICGGRRACGGGGCEAGVREAGVGARAAEKVSSLGKDWHKFCLKCERCSKTLTPGGHAEHDGKPFCHKPCYATLFGPKGVNIGGAGSYIYEKPLAEGPQVTGPIEVPAARAEERKASGPPKGPSRASSVTTFTGEPNTCPRCSKKVYFAEKVTSLGKDWHRPCLRCERCGKTLTPGGHAEHDGQPYCHKPCYGILFGPKGVNTGAVGSYIYDRDPEGKVQP

SEQ ID NO: 10790 - protein, 252 aa, Artificial Sequence; identical to SEQ ID NO: 10789
  Synthetic polypeptide

SEQ ID NO: 10791 - protein, 80 aa, Artificial Sequence
  Synthetic polypeptide
GGRCVGGSGCVSEEAGVCGGKRVCGGGRVGEAGVCVRGRCVGGGRFVGGGGRVGEAGVRRVSGRQVLERGQVLERGQPRR

SEQ ID NO: 10792 - protein, 80 aa, Artificial Sequence; identical to SEQ ID NO: 10791
  Synthetic polypeptide

SEQ ID NO: 10793 - protein, 51 aa, Artificial Sequence
  Synthetic polypeptide
GGCPGGRCWSAGRCWSAGSREGELPGEGLAQVLPQVRALQQDADARGPRRA

SEQ ID NO: 10794 - protein, 51 aa, Artificial Sequence; identical to SEQ ID NO: 10793
  Synthetic polypeptide

SEQ ID NO: 10795 - protein, 258 aa, Artificial Sequence
  Synthetic polypeptide
GSGCVWGEAGVWRRACGGGGCVCERKVCGRRQICGGRRACGGGGCEAGVREAGVGARAGVGARAAEKVSSLGKDWHKFCLKCERCSKTLTPGGHAEHDGKPFCHKPCYATLFGPKGVNIGGAGSYIYEKPLAEGPQVTGPIEVPAARAEERKASGPPKGPSRASSVTTFTGEPNTCPRCSKKVYFAEKVTSLGKDWHRPCLRCERCGKTLTPGGHAEHDGQPYCHKPCYGILFGPKGVNTGAVGSYIYDRDPEGKVQP

SEQ ID NO: 10796 - protein, 258 aa, Artificial Sequence; identical to SEQ ID NO: 10795
  Synthetic polypeptide

SEQ ID NO: 10797 - protein, 86 aa, Artificial Sequence
  Synthetic polypeptide
GGRCVGGSGCVSEEAGVCGGKRVCGGGRVGEAGVCVRGRCVGGGRFVGGGGRVGEAGVRRVSGRQVLERGQVLERGQVLERGQPRR

SEQ ID NO: 10798 - protein, 86 aa, Artificial Sequence; identical to SEQ ID NO: 10797
  Synthetic polypeptide

SEQ ID NO: 10799 - protein, 57 aa, Artificial Sequence
  Synthetic polypeptide
GGCPGGRCWSAGRCWSAGRCWSAGSREGELPGEGLAQVLPQVRALQQDADARGPRRA

SEQ ID NO: 10800 - protein, 57 aa, Artificial Sequence; identical to SEQ ID NO: 10799
  Synthetic polypeptide

SEQ ID NO: 10801 - protein, 264 aa, Artificial Sequence
  Synthetic polypeptide
GSGCVWGEAGVWRRACGGGGCVCERKVCGRRQICGGRRACGGGGCEAGVREAGVGARAGVGARAGVGARAAEKVSSLGKDWHKFCLKCERCSKTLTPGGHAEHDGKPFCHKPCYATLFGPKGVNIGGAGSYIYEKPLAEGPQVTGPIEVPAARAEERKASGPPKGPSRASSVTTFTGEPNTCPRCSKKVYFAEKVTSLGKDWHRPCLRCERCGKTLTPGGHAEHDGQPYCHKPCYGILFGPKGVNTGAVGSYIYDRDPEGKVQP

SEQ ID NO: 10802 - protein, 264 aa, Artificial Sequence; identical to SEQ ID NO: 10801
  Synthetic polypeptide

SEQ ID NO: 10803 - protein, 92 aa, Artificial Sequence
  Synthetic polypeptide
GGRCVGGSGCVSEEAGVCGGKRVCGGGRVGEAGVCVRGRCVGGGRFVGGGGRVGEAGVRRVSGRQVLERGQVLERGQVLERGQVLERGQPRR

SEQ ID NO: 10804 - protein, 92 aa, Artificial Sequence; identical to SEQ ID NO: 10803
  Synthetic polypeptide

SEQ ID NO: 10805 - protein, 63 aa, Artificial Sequence
  Synthetic polypeptide
GGCPGGRCWSAGRCWSAGRCWSAGRCWSAGSREGELPGEGLAQVLPQVRALQQDADARGPRRA

SEQ ID NO: 10806 - protein, 63 aa, Artificial Sequence; identical to SEQ ID NO: 10805
  Synthetic polypeptide

SEQ ID NO: 10807 - protein, 270 aa, Artificial Sequence
  Synthetic polypeptide
GSGCVWGEAGVWRRACGGGGCVCERKVCGRRQICGGRRACGGGGCEAGVREAGVGARAGVGARAGVGARAGVGARAAEKVSSLGKDWHKFCLKCERCSKTLTPGGHAEHDGKPFCHKPCYATLFGPKGVNIGGAGSYIYEKPLAEGPQVTGPIEVPAARAEERKASGPPKGPSRASSVTTFTGEPNTCPRCSKKVYFAEKVTSLGKDWHRPCLRCERCGKTLTPGGHAEHDGQPYCHKPCYGILFGPKGVNTGAVGSYIYDRDPEGKVQP

SEQ ID NO: 10808 - protein, 270 aa, Artificial Sequence; identical to SEQ ID NO: 10807
  Synthetic polypeptide

SEQ ID NO: 10809 - protein, 101 aa, Artificial Sequence
  Synthetic polypeptide
EGDGVGGVEGDGVEGSQELPREKYLTWASRQEPSQGTTTFAVTSILRVAAEDWKKGDTFSCMVGHEALPLAFTQKTIDRLAGKPTHVNVSVVMAEVDGTCY

SEQ ID NO: 10810 - protein, 73 aa, Artificial Sequence
  Synthetic polypeptide
GRWGRGVTGAAPREVPDLGIPAGAQPGHHHLRCDQHTARGSRGLEEGGHLLLHGGPRGPAAGLHTEDHRPLGG

SEQ ID NO: 10811 - protein, 355 aa, Artificial Sequence
  Synthetic polypeptide
LPLYIYFPEFAALQSSGLYSLSSVVTVPSSSLGTQTYICNVNHKPSNTKVDKKVEPKSCDKTHTCPPCPAPELLGGPSVFLFPPKPKDTLMISRTPEVTCVVVDVSHEDPEVKFNWYVDGVEVHNAKTKPREEQYNSTYRVVSVLTVLHQDWLNGKEYKCKVSNKALPAPIEKTISKAKGQPREPQVYTLPPSRDELTKNQVSLTCLVKGFYPSDIAVEWESNGQPENNYKTTPPVLDSDGSFFLYSKLTVDKSRWQQGNVFSCSVMHEALHNHYTQKSLSLSPELQLEESCAEAQDGELDGLWTTITIFITLFLLSVCYSATVTFFKVKWIFSSVVDLKQTIIPDYRNMIGQGA

SEQ ID NO: 10812 - protein, 47 aa, Artificial Sequence
  Synthetic polypeptide
MLISPEKALEESTQQTSKLSSVSFPYIFTSQNLLPYSPQDSTPSAAW

SEQ ID NO: 10813 - protein, 47 aa, Artificial Sequence; identical to SEQ ID NO: 10812
  Synthetic polypeptide

SEQ ID NO: 10814 - protein, 47 aa, Artificial Sequence; identical to SEQ ID NO: 10812
  Synthetic polypeptide

SEQ ID NO: 10815 - protein, 67 aa, Artificial Sequence
  Synthetic polypeptide
RNLHNKLASYLLLASPIYLLPRICCPTVLRTLLPQQRGDRALQQLGHPDLHLQRESQAQQHQGGQES

SEQ ID NO: 10816 - protein, 67 aa, Artificial Sequence; identical to SEQ ID NO: 10815
  Synthetic polypeptide

SEQ ID NO: 10817 - protein, 67 aa, Artificial Sequence; identical to SEQ ID NO: 10815
  Synthetic polypeptide

SEQ ID NO: 10818 - protein, 286 aa, Artificial Sequence
  Synthetic polypeptide
LPLYIYFPEFAALQSSGLYSLSSVVTVPSSSLGTQTYICNVNHKPSNTKVDKKVEPKSCDKTHTCPPCPAPELLGGPSVFLFPPKPKDTLMISRTPEVTCVVVDVSHEDPEVKFNWYVDGVEVHNAKTKPREEQYNSTYRVVSVLTVLHQDWLNGKEYKCKVSNKALPAPIEKTISKAKGQPREPQVYTLPPSRDELTKNQVSLTCLVKGFYPSDIAVEWESNGQPENNYKTTPPVLDSDGSFFLYSKLTVDKSRWQQGNVFSCSVMHEALHNHYTQKSLSLSPGK

SEQ ID NO: 10819 - protein, 251 aa, Artificial Sequence
  Synthetic polypeptide
LPLYIYFPEFAALQSSGLYSLSSVVTVPSSSLGTQTYICNVNHKPSNTKVDKKVEPKSCDKTHTCPPCPAPELLGGPSVFLFPPKPKDTLMISRTPEVTCVVVDVSHEDPEVKFNWYVDGVEYKCKVSNKALPAPIEKTISKAKGQPREPQVYTLPPSRDELTKNQVSLTCLVKGFYPSDIAVEWESNGQPENNYKTTPPVLDSDGSFFLYSKLTVDKSRWQQGNVFSCSVMHEALHNHYTQKSLSLSPGK

SEQ ID NO: 10820 - protein, 47 aa, Artificial Sequence; identical to SEQ ID NO: 10812
  Synthetic polypeptide

SEQ ID NO: 10821 - protein, 67 aa, Artificial Sequence; identical to SEQ ID NO: 10815
  Synthetic polypeptide

SEQ ID NO: 10822 - protein, 333 aa, Artificial Sequence
  Synthetic polypeptide
LPLYIYFPEFAALQSSGLYSLSSVVTVPSSSLGTQTYTCNVNHKPSNTKVDKRVELKTPLGDTTHTCPRCPEPKSCDTPPPCPRCPEPKSCDTPPPCPRCPEPKSCDTPPPCPRCPAPELLGGPSVFLFPPKPKDTLMISRTPEVTCVVVDVSHEDPEVQFKWYVDGVEVHNAKTKPREEQYNSTFRVVSVLTVLHQDWLNGKEYKCKVSNKALPAPIEKTISKTKGQPREPQVYTLPPSREEMTKNQVSLTCLVKGFYPSDIAVEWESSGQPENNYNTTPPMLDSDGSFFLYSKLTVDKSRWQQGNIFSCSVMHEALHNRFTQKSLSLSPGK

SEQ ID NO: 10823 - protein, 33 aa, Artificial Sequence
  Synthetic polypeptide
GWAWWRTPVIPARWEAEASLQLLETSLSYYVFV

SEQ ID NO: 10824 - protein, 56 aa, Artificial Sequence
  Synthetic polypeptide
SRHVGRPRPLFSFWRPHYPIMSLCEDMLLCNYRKCRIKLSGYAWVTACSHIFCDQH

SEQ ID NO: 10825 - protein, 65 aa, Artificial Sequence
  Synthetic polypeptide
MGMVAHACNPGTLGGRGLSSASGDLTILLCLCVKTCCFVIIESVASNSLAMHGSLPALTSSVISM

SEQ ID NO: 10826 - protein, 3 aa, Artificial Sequence
  Synthetic polypeptide
EAK

SEQ ID NO: 10827 - protein, 76 aa, Artificial Sequence
  Synthetic polypeptide
GAPLLGRNPVWEVRSVSARPPRLRSEETLCLATAPSEKQNEAESGADLFHVADAAAGPGDGPGVGTSYGYSSLGGE

SEQ ID NO: 10828 - protein, 232 aa, Artificial Sequence
  Synthetic polypeptide
EVRKPSAWQPPRLRSKMKLNLVQIFFMLLMLLLGLGMGLGLGLHMATAVLEESDQPLNEFWSSDSQDKAEATEEGDGTQTTETLVLSNKEVVQPGWPEDPILGEDEVGGNKMLRASALFQSNKDYLRLDQTDRECNDMMAHKMKEPSQSCIAQYAFIHEDLNTVKAVCNSPVIACELKGGKCHKSSRPFDLTLCELSQPDQVTPNCNYLTSVIKKHIIITCNDMKRQLPTGQ

SEQ ID NO: 10829 - protein, 232 aa, Artificial Sequence
  Synthetic polypeptide
EVRSPSVRQPPRLGSKMKLNLVQIFFMLLMLLLGLGMGLGLGLHMATAVLEESDQPLNEFWSSDSQDKAEATEEGDGTQTTETLVLSNKEVVQPGWPEDPILGEDEVGGNKMLRASALFQSNKDYLRLDQTDRECNDMMAHKMKEPSQSCIAQYAFIHEDLNTVKAVCNSPVIACELKGGKCHKSSRPFDLTLCELSQPDQVTPNCNYLTSVIKKHIIITCNDMKRQLPTGQ

SEQ ID NO: 10830 - protein, 14 aa, Artificial Sequence
  Synthetic polypeptide
GAPPSGSHPVWEAK

SEQ ID NO: 10831 - protein, 66 aa, Artificial Sequence
  Synthetic polypeptide
EVRKPSAWQPPRLRSEEPLRPAATPSGKQNEAESGADLFHVADAAAGPGDGPGVGTSYGYSSLGGE

SEQ ID NO: 10832 - protein, 44 aa, Artificial Sequence
  Synthetic polypeptide
AAPSGRQNEAESGADLFHVADAAAGPGDGPGVGTSYGYSSLGGE

SEQ ID NO: 10833 - protein, 223 aa, Artificial Sequence
  Synthetic polypeptide
PPRPGGKMKLNLVQIFFMLLMLLLGLGMGLGLGLHMATAVLEESDQPLNEFWSSDSQDKAEATEEGDGTQTTETLVLSNKEVVQPGWPEDPILGEDEVGGNKMLRASALFQSNKDYLRLDQTDRECNDMMAHKMKEPSQSCIAQYAFIHEDLNTVKAVCNSPVIACELKGGKCHKSSRPFDLTLCELSQPDQVTPNCNYLTSVIKKHIIITCNDMKRQLPTGQ

SEQ ID NO: 10834 - protein, 7 aa, Artificial Sequence
  Synthetic polypeptide
RPVREAK

SEQ ID NO: 10835 - protein, 25 aa, Artificial Sequence
  Synthetic polypeptide
TNSHHGGAAGGADHRGEATVARTDA

SEQ ID NO: 10836 - protein, 366 aa, Artificial Sequence
  Synthetic polypeptide
ATSTKRIATMAELQEVQITEEKPLLPGQTPEAAKTHSVETPYGSVTFTVYGTPKPKRPAILTYHDVGLNYKSCFQPLFQFEDMQEIIQNFVRVHVDAPGMEEGAPVFPLGYQYPSLDQLADMIPCVLQYLNFSTIIGVGVGAGAYILARYALNHPDTVEGLVLINIDPNAKGWMDWAAHKLTGLTSSIPEMILGHLFSQEELSGNSELIQKYRNIITHAPNLDNIELYWNSYNNRRDLNFERGGDITLRCPVMLVVGDQAPHEDAVVECNSKLDPTQTSFLKMADSGGQPQLTQPGKLTEAFKYFLQGMGYMASSCMTRLSRSRTASLTSAASVDGNRSRSRTLSQSSESGTLSSGPPGHTMEVSC

SEQ ID NO: 10837 - protein, 23 aa, Artificial Sequence
  Synthetic polypeptide
ARWLMPVIPAFWEAEVHSLNFLD

SEQ ID NO: 10838 - protein, 11 aa, Artificial Sequence
  Synthetic polypeptide
SQHFGRPRFTL

SEQ ID NO: 10839 - protein, 24 aa, Artificial Sequence
  Synthetic polypeptide
MSTVADACNPSILGGRGSLFEFPG

SEQ ID NO: 10840 - protein, 101 aa, Artificial Sequence
  Synthetic polypeptide
TTLDTPSLRTVILTARILSVNVKSPALLLSQLLPYMENRRGAVILVSSIAAYNPVVALGVYNVSKTALLGLTRTLALELAPKDIRVNCVVPGIIKTDFSKV

SEQ ID NO: 10841 - protein, 6 aa, Artificial Sequence
  Synthetic polypeptide
YSPQGS

SEQ ID NO: 10842 - protein, 6 aa, Artificial Sequence
  Synthetic polypeptide
YSPQGS

SEQ ID NO: 10843 - protein, 6 aa, Artificial Sequence
  Synthetic polypeptide
YSPQGS

SEQ ID NO: 10844 - protein, 6 aa, Artificial Sequence
  Synthetic polypeptide
YSPQGS

SEQ ID NO: 10845 - protein, 6 aa, Artificial Sequence
  Synthetic polypeptide
YSPQGS

SEQ ID NO: 10846 - protein, 115 aa, Artificial Sequence
  Synthetic polypeptide
AGSSNLLWFPSTLWKLCSFGLHDKSCCCSLVGSVPPLRAVTLTAKVCNFTPGASKTTNAPRGMNNSGHTIFKNRNTHRKDPKCEREVPSPAAEPVAALHGEQEGCCHPGLFHCSL

SEQ ID NO: 10847 - protein, 115 aa, Artificial Sequence; identical to SEQ ID NO: 10846
  Synthetic polypeptide

SEQ ID NO: 10848 - protein, 115 aa, Artificial Sequence; identical to SEQ ID NO: 10846
  Synthetic polypeptide

SEQ ID NO: 10849 - protein, 115 aa, Artificial Sequence; identical to SEQ ID NO: 10846
  Synthetic polypeptide

SEQ ID NO: 10850 - protein, 115 aa, Artificial Sequence; identical to SEQ ID NO: 10846
  Synthetic polypeptide

SEQ ID NO: 10851 - protein, 156 aa, Artificial Sequence
  Synthetic polypeptide
TTLDTPSLRTVILTARILSVNVKSPALLLSQLLPYMENRRGAVILVSSIAAYNPVVALGVYNVSKTALLGLTRTLALELAPKDIRVNCVVPGIIKTDFSKVFHGNESLWKNFKEHHQLQRIGESEDCAGIVSFLCSPDASYVNGENIAVAGYSTRL

SEQ ID NO: 10852 - protein, 176 aa, Artificial Sequence
  Synthetic polypeptide
TTLDTPSLRTVILTARILSVNVKSPALLLSQLLPYMENRRGAVILVSSIAAYNPVVALGVYNVSKTALLGLTRTLALELAPKDIRVNCVVPGIIKTDFSKVVRIGFMGMSLSGRTSRNIISCRGLGSQRTVQESCPSCALQMPATSTGRTLRWQATPLGSERSGGGCVAVVPGPGA

SEQ ID NO: 10853 - protein, 140 aa, Artificial Sequence
  Synthetic polypeptide
TTLDTPSLRTVILTARILSVNVKSPALLLSQLLPYMENRRGAVILVSSIAAYNPVVALGVYNVSKTALLGLTRTLALELAPKDIRFHGNESLWKNFKEHHQLQRIGESEDCAGIVSFLCSPDASYVNGENIAVAGYSTRL

SEQ ID NO: 10854 - protein, 137 aa, Artificial Sequence
  Synthetic polypeptide
TTLDTPSLRTVILTARILSVNVKSPALLLSQLLPYMENRRGAVILVSSIAAYNPVVALGVYNVSKTALLGLTRTLALELAPKDIRVNCVVPGIIKTDFSKVFHGNESLWKNFKEHHQLQRQVGFGDLVVHVWLGRGS

SEQ ID NO: 10855 - protein, 44 aa, Artificial Sequence
  Synthetic polypeptide
RDCHLSPSDPKCEREVPSPAAEPVAALHGEQEGCCHPGLFHCSL

SEQ ID NO: 10856 - protein, 44 aa, Artificial Sequence; identical to SEQ ID NO: 10855
  Synthetic polypeptide

SEQ ID NO: 10857 - protein, 44 aa, Artificial Sequence; identical to SEQ ID NO: 10855
  Synthetic polypeptide

SEQ ID NO: 10858 - protein, 44 aa, Artificial Sequence; identical to SEQ ID NO: 10855
  Synthetic polypeptide

SEQ ID NO: 10859 - protein, 44 aa, Artificial Sequence; identical to SEQ ID NO: 10855
  Synthetic polypeptide

SEQ ID NO: 10860 - protein, 97 aa, Artificial Sequence
  Synthetic polypeptide
GDFEETVTYHQVILSVNVKSPALLLSQLLPYMENRRGAVILVSSIAAYNPVVALGVYNVSKTALLGLTRTLALELAPKDIRVNCVVPGIIKTDFSKV

SEQ ID NO: 10861 - protein, 152 aa, Artificial Sequence
  Synthetic polypeptide
GDFEETVTYHQVILSVNVKSPALLLSQLLPYMENRRGAVILVSSIAAYNPVVALGVYNVSKTALLGLTRTLALELAPKDIRVNCVVPGIIKTDFSKVFHGNESLWKNFKEHHQLQRIGESEDCAGIVSFLCSPDASYVNGENIAVAGYSTRL

SEQ ID NO: 10862 - protein, 172 aa, Artificial Sequence
  Synthetic polypeptide
GDFEETVTYHQVILSVNVKSPALLLSQLLPYMENRRGAVILVSSIAAYNPVVALGVYNVSKTALLGLTRTLALELAPKDIRVNCVVPGIIKTDFSKVVRIGFMGMSLSGRTSRNIISCRGLGSQRTVQESCPSCALQMPATSTGRTLRWQATPLGSERSGGGCVAVVPGPGA

SEQ ID NO: 10863 - protein, 136 aa, Artificial Sequence
  Synthetic polypeptide
GDFEETVTYHQVILSVNVKSPALLLSQLLPYMENRRGAVILVSSIAAYNPVVALGVYNVSKTALLGLTRTLALELAPKDIRFHGNESLWKNFKEHHQLQRIGESEDCAGIVSFLCSPDASYVNGENIAVAGYSTRL

SEQ ID NO: 10864 - protein, 133 aa, Artificial Sequence
  Synthetic polypeptide
GDFEETVTYHQVILSVNVKSPALLLSQLLPYMENRRGAVILVSSIAAYNPVVALGVYNVSKTALLGLTRTLALELAPKDIRVNCVVPGIIKTDFSKVFHGNESLWKNFKEHHQLQRQVGFGDLVVHVWLGRGS

SEQ ID NO: 10865 - protein, 40 aa, Artificial Sequence
  Synthetic polypeptide
PSPSDPKCEREVPSPAAEPVAALHGEQEGCCHPGLFHCSL

SEQ ID NO: 10866 - protein, 40 aa, Artificial Sequence; identical to SEQ ID NO: 10865
  Synthetic polypeptide

SEQ ID NO: 10867 - protein, 40 aa, Artificial Sequence; identical to SEQ ID NO: 10865
  Synthetic polypeptide

SEQ ID NO: 10868 - protein, 40 aa, Artificial Sequence; identical to SEQ ID NO: 10865
  Synthetic polypeptide

SEQ ID NO: 10869 - protein, 40 aa, Artificial Sequence; identical to SEQ ID NO: 10865
  Synthetic polypeptide

SEQ ID NO: 10870 - protein, 89 aa, Artificial Sequence
  Synthetic polypeptide
HHQAILSVNVKSPALLLSQLLPYMENRRGAVILVSSIAAYNPVVALGVYNVSKTALLGLTRTLALELAPKDIRVNCVVPGIIKTDFSKV

SEQ ID NO: 10871 - protein, 5 aa, Artificial Sequence
  Synthetic polypeptide
ITKRS

SEQ ID NO: 10872 - protein, 5 aa, Artificial Sequence
  Synthetic polypeptide
ITKRS

SEQ ID NO: 10873 - protein, 5 aa, Artificial Sequence
  Synthetic polypeptide
ITKRS

SEQ ID NO: 10874 - protein, 5 aa, Artificial Sequence
  Synthetic polypeptide
ITKRS

SEQ ID NO: 10875 - protein, 5 aa, Artificial Sequence
  Synthetic polypeptide
ITKRS

SEQ ID NO: 10876 - protein, 144 aa, Artificial Sequence
  Synthetic polypeptide
HHQAILSVNVKSPALLLSQLLPYMENRRGAVILVSSIAAYNPVVALGVYNVSKTALLGLTRTLALELAPKDIRVNCVVPGIIKTDFSKVFHGNESLWKNFKEHHQLQRIGESEDCAGIVSFLCSPDASYVNGENIAVAGYSTRL

SEQ ID NO: 10877 - protein, 164 aa, Artificial Sequence
  Synthetic polypeptide
HHQAILSVNVKSPALLLSQLLPYMENRRGAVILVSSIAAYNPVVALGVYNVSKTALLGLTRTLALELAPKDIRVNCVVPGIIKTDFSKVVRIGFMGMSLSGRTSRNIISCRGLGSQRTVQESCPSCALQMPATSTGRTLRWQATPLGSERSGGGCVAVVPGPGA

SEQ ID NO: 10878 - protein, 128 aa, Artificial Sequence
  Synthetic polypeptide
HHQAILSVNVKSPALLLSQLLPYMENRRGAVILVSSIAAYNPVVALGVYNVSKTALLGLTRTLALELAPKDIRFHGNESLWKNFKEHHQLQRIGESEDCAGIVSFLCSPDASYVNGENIAVAGYSTRL

SEQ ID NO: 10879 - protein, 125 aa, Artificial Sequence
  Synthetic polypeptide
HHQAILSVNVKSPALLLSQLLPYMENRRGAVILVSSIAAYNPVVALGVYNVSKTALLGLTRTLALELAPKDIRVNCVVPGIIKTDFSKVFHGNESLWKNFKEHHQLQRQVGFGDLVVHVWLGRGS

SEQ ID NO: 10880 - protein, 30 aa, Artificial Sequence
  Synthetic polypeptide
PSPSGETITYRQVAFCEDEQHRDRQEGRPG

SEQ ID NO: 10881 - protein, 30 aa, Artificial Sequence; identical to SEQ ID NO: 10880
  Synthetic polypeptide

SEQ ID NO: 10882 - protein, 30 aa, Artificial Sequence; identical to SEQ ID NO: 10880
  Synthetic polypeptide

SEQ ID NO: 10883 - protein, 220 aa, Artificial Sequence
  Synthetic polypeptide
HHQAVRLSPIAKWLSVRMSSTGIDRKGVLANRVAVVTGSTSGIGFAIARRLARDGAHVVISSRKQQNVDRAMAKLQGEGLSVAGIVCHVGKAEDREQLVAKALEHCGGVDFLVCSAGVNPLVGSTLGTSEQIWDKILSVNVKSPALLLSQLLPYMENRRGAVILVSSIAAYNPVVALGVYNVSKTALLGLTRTLALELAPKDIRVNCVVPGIIKTDFSKV

SEQ ID NO: 10884 - protein, 10 aa, Artificial Sequence
  Synthetic polypeptide
DYHLSPSGFL

SEQ ID NO: 10885 - protein, 10 aa, Artificial Sequence
  Synthetic polypeptide
DYHLSPSGFL

SEQ ID NO: 10886 - protein, 10 aa, Artificial Sequence
  Synthetic polypeptide
DYHLSPSGFL

SEQ ID NO: 10887 - protein, 275 aa, Artificial Sequence
  Synthetic polypeptide
HHQAVRLSPIAKWLSVRMSSTGIDRKGVLANRVAVVTGSTSGIGFAIARRLARDGAHVVISSRKQQNVDRAMAKLQGEGLSVAGIVCHVGKAEDREQLVAKALEHCGGVDFLVCSAGVNPLVGSTLGTSEQIWDKILSVNVKSPALLLSQLLPYMENRRGAVILVSSIAAYNPVVALGVYNVSKTALLGLTRTLALELAPKDIRVNCVVPGIIKTDFSKVFHGNESLWKNFKEHHQLQRIGESEDCAGIVSFLCSPDASYVNGENIAVAGYSTRL

SEQ ID NO: 10888 - protein, 295 aa, Artificial Sequence
  Synthetic polypeptide
HHQAVRLSPIAKWLSVRMSSTGIDRKGVLANRVAVVTGSTSGIGFAIARRLARDGAHVVISSRKQQNVDRAMAKLQGEGLSVAGIVCHVGKAEDREQLVAKALEHCGGVDFLVCSAGVNPLVGSTLGTSEQIWDKILSVNVKSPALLLSQLLPYMENRRGAVILVSSIAAYNPVVALGVYNVSKTALLGLTRTLALELAPKDIRVNCVVPGIIKTDFSKVVRIGFMGMSLSGRTSRNIISCRGLGSQRTVQESCPSCALQMPATSTGRTLRWQATPLGSERSGGGCVAVVPGPGA

SEQ ID NO: 10889 - protein, 132 aa, Artificial Sequence
  Synthetic polypeptide
PSPSGETITYRQVALEHCGGVDFLVCSAGVNPLVGSTLGTSEQIWDKILSVNVKSPALLLSQLLPYMENRRGAVILVSSIAAYNPVVALGVYNVSKTALLGLTRTLALELAPKDIRVNCVVPGIIKTDFSKV

SEQ ID NO: 10890 - protein, 33 aa, Artificial Sequence
  Synthetic polypeptide
HHQAVRLSPIAKWPWSTVGASTSWCAAQGSTLW

SEQ ID NO: 10891 - protein, 33 aa, Artificial Sequence; identical to SEQ ID NO: 10890
  Synthetic polypeptide

SEQ ID NO: 10892 - protein, 33 aa, Artificial Sequence; identical to SEQ ID NO: 10890
  Synthetic polypeptide

SEQ ID NO: 10893 - protein, 33 aa, Artificial Sequence; identical to SEQ ID NO: 10890
  Synthetic polypeptide

SEQ ID NO: 10894 - protein, 33 aa, Artificial Sequence; identical to SEQ ID NO: 10890
  Synthetic polypeptide

SEQ ID NO: 10895 - protein, 35 aa, Artificial Sequence
  Synthetic polypeptide
DYHLSPSGPGALWGRRLPGVQRRGQPSGREHSGDQ

SEQ ID NO: 10896 - protein, 35 aa, Artificial Sequence; identical to SEQ ID NO: 10895
  Synthetic polypeptide

SEQ ID NO: 10897 - protein, 35 aa, Artificial Sequence; identical to SEQ ID NO: 10895
  Synthetic polypeptide

SEQ ID NO: 10898 - protein, 35 aa, Artificial Sequence; identical to SEQ ID NO: 10895
  Synthetic polypeptide

SEQ ID NO: 10899 - protein, 35 aa, Artificial Sequence; identical to SEQ ID NO: 10895
  Synthetic polypeptide

SEQ ID NO: 10900 - protein, 187 aa, Artificial Sequence
  Synthetic polypeptide
PSPSGETITYRQVALEHCGGVDFLVCSAGVNPLVGSTLGTSEQIWDKILSVNVKSPALLLSQLLPYMENRRGAVILVSSIAAYNPVVALGVYNVSKTALLGLTRTLALELAPKDIRVNCVVPGIIKTDFSKVFHGNESLWKNFKEHHQLQRIGESEDCAGIVSFLCSPDASYVNGENIAVAGYSTRL

SEQ ID NO: 10901 - protein, 207 aa, Artificial Sequence
  Synthetic polypeptide
PSPSGETITYRQVALEHCGGVDFLVCSAGVNPLVGSTLGTSEQIWDKILSVNVKSPALLLSQLLPYMENRRGAVILVSSIAAYNPVVALGVYNVSKTALLGLTRTLALELAPKDIRVNCVVPGIIKTDFSKVVRIGFMGMSLSGRTSRNIISCRGLGSQRTVQESCPSCALQMPATSTGRTLRWQATPLGSERSGGGCVAVVPGPGA

SEQ ID NO: 10902 - protein, 171 aa, Artificial Sequence
  Synthetic polypeptide
PSPSGETITYRQVALEHCGGVDFLVCSAGVNPLVGSTLGTSEQIWDKILSVNVKSPALLLSQLLPYMENRRGAVILVSSIAAYNPVVALGVYNVSKTALLGLTRTLALELAPKDIRFHGNESLWKNFKEHHQLQRIGESEDCAGIVSFLCSPDASYVNGENIAVAGYSTRL

SEQ ID NO: 10903 - protein, 168 aa, Artificial Sequence
  Synthetic polypeptide
PSPSGETITYRQVALEHCGGVDFLVCSAGVNPLVGSTLGTSEQIWDKILSVNVKSPALLLSQLLPYMENRRGAVILVSSIAAYNPVVALGVYNVSKTALLGLTRTLALELAPKDIRVNCVVPGIIKTDFSKVFHGNESLWKNFKEHHQLQRQVGFGDLVVHVWLGRGS

SEQ ID NO: 10904 - protein, 98 aa, Artificial Sequence
  Synthetic polypeptide
PSPSGETITYRQVILSVNVKSPALLLSQLLPYMENRRGAVILVSSIAAYNPVVALGVYNVSKTALLGLTRTLALELAPKDIRVNCVVPGIIKTDFSKV

SEQ ID NO: 10905 - protein, 43 aa, Artificial Sequence
  Synthetic polypeptide
DYHLSPSDPKCEREVPSPAAEPVAALHGEQEGCCHPGLFHCSL

SEQ ID NO: 10906 - protein, 43 aa, Artificial Sequence; identical to SEQ ID NO: 10905
  Synthetic polypeptide

SEQ ID NO: 10907 - protein, 43 aa, Artificial Sequence; identical to SEQ ID NO: 10905
  Synthetic polypeptide

SEQ ID NO: 10908 - protein, 43 aa, Artificial Sequence; identical to SEQ ID NO: 10905
  Synthetic polypeptide

SEQ ID NO: 10909 - protein, 43 aa, Artificial Sequence; identical to SEQ ID NO: 10905
  Synthetic polypeptide

SEQ ID NO: 10910 - protein, 153 aa, Artificial Sequence
  Synthetic polypeptide
PSPSGETITYRQVILSVNVKSPALLLSQLLPYMENRRGAVILVSSIAAYNPVVALGVYNVSKTALLGLTRTLALELAPKDIRVNCVVPGIIKTDFSKVFHGNESLWKNFKEHHQLQRIGESEDCAGIVSFLCSPDASYVNGENIAVAGYSTRL

SEQ ID NO: 10911 - protein, 173 aa, Artificial Sequence
  Synthetic polypeptide
PSPSGETITYRQVILSVNVKSPALLLSQLLPYMENRRGAVILVSSIAAYNPVVALGVYNVSKTALLGLTRTLALELAPKDIRVNCVVPGIIKTDFSKVVRIGFMGMSLSGRTSRNIISCRGLGSQRTVQESCPSCALQMPATSTGRTLRWQATPLGSERSGGGCVAVVPGPGA

SEQ ID NO: 10912 - protein, 137 aa, Artificial Sequence
  Synthetic polypeptide
PSPSGETITYRQVILSVNVKSPALLLSQLLPYMENRRGAVILVSSIAAYNPVVALGVYNVSKTALLGLTRTLALELAPKDIRFHGNESLWKNFKEHHQLQRIGESEDCAGIVSFLCSPDASYVNGENIAVAGYSTRL

SEQ ID NO: 10913 - protein, 134 aa, Artificial Sequence
  Synthetic polypeptide
PSPSGETITYRQVILSVNVKSPALLLSQLLPYMENRRGAVILVSSIAAYNPVVALGVYNVSKTALLGLTRTLALELAPKDIRVNCVVPGIIKTDFSKVFHGNESLWKNFKEHHQLQRQVGFGDLVVHVWLGRGS

SEQ ID NO: 10914 - protein, 26 aa, Artificial Sequence
  Synthetic polypeptide
PSPSGETITYRQVEGCCHPGLFHCSL

SEQ ID NO: 10915 - protein, 26 aa, Artificial Sequence
  Synthetic polypeptide
PSPSGETITYRQVEGCCHPGLFHCSL

SEQ ID NO: 10916 - protein, 26 aa, Artificial Sequence
  Synthetic polypeptide
PSPSGETITYRQVEGCCHPGLFHCSL

SEQ ID NO: 10917 - protein, 26 aa, Artificial Sequence
  Synthetic polypeptide
PSPSGETITYRQVEGCCHPGLFHCSL

SEQ ID NO: 10918 - protein, 26 aa, Artificial Sequence
  Synthetic polypeptide
PSPSGETITYRQVEGCCHPGLFHCSL

SEQ ID NO: 10919 - protein, 75 aa, Artificial Sequence
  Synthetic polypeptide
HHQAVRLSPIAKWRGAVILVSSIAAYNPVVALGVYNVSKTALLGLTRTLALELAPKDIRVNCVVPGIIKTDFSKV

SEQ ID NO: 10920 - protein, 23 aa, Artificial Sequence
  Synthetic polypeptide
DYHLSPSGGVLSSWSLPLQLIIQ

SEQ ID NO: 10921 - protein, 23 aa, Artificial Sequence
  Synthetic polypeptide
DYHLSPSGGVLSSWSLPLQLIIQ

SEQ ID NO: 10922 - protein, 23 aa, Artificial Sequence
  Synthetic polypeptide
DYHLSPSGGVLSSWSLPLQLIIQ

SEQ ID NO: 10923 - protein, 23 aa, Artificial Sequence
  Synthetic polypeptide
DYHLSPSGGVLSSWSLPLQLIIQ

SEQ ID NO: 10924 - protein, 23 aa, Artificial Sequence
  Synthetic polypeptide
DYHLSPSGGVLSSWSLPLQLIIQ

SEQ ID NO: 10925 - protein, 130 aa, Artificial Sequence
  Synthetic polypeptide
HHQAVRLSPIAKWRGAVILVSSIAAYNPVVALGVYNVSKTALLGLTRTLALELAPKDIRVNCVVPGIIKTDFSKVFHGNESLWKNFKEHHQLQRIGESEDCAGIVSFLCSPDASYVNGENIAVAGYSTRL

SEQ ID NO: 10926 - protein, 150 aa, Artificial Sequence
  Synthetic polypeptide
HHQAVRLSPIAKWRGAVILVSSIAAYNPVVALGVYNVSKTALLGLTRTLALELAPKDIRVNCVVPGIIKTDFSKVVRIGFMGMSLSGRTSRNIISCRGLGSQRTVQESCPSCALQMPATSTGRTLRWQATPLGSERSGGGCVAVVPGPGA

SEQ ID NO: 10927 - protein, 114 aa, Artificial Sequence
  Synthetic polypeptide
HHQAVRLSPIAKWRGAVILVSSIAAYNPVVALGVYNVSKTALLGLTRTLALELAPKDIRFHGNESLWKNFKEHHQLQRIGESEDCAGIVSFLCSPDASYVNGENIAVAGYSTRL

SEQ ID NO: 10928 - protein, 111 aa, Artificial Sequence
  Synthetic polypeptide
HHQAVRLSPIAKWRGAVILVSSIAAYNPVVALGVYNVSKTALLGLTRTLALELAPKDIRVNCVVPGIIKTDFSKVFHGNESLWKNFKEHHQLQRQVGFGDLVVHVWLGRGS

SEQ ID NO: 10929 - protein, 58 aa, Artificial Sequence
  Synthetic polypeptide
PSPSGETITYRQVALGVYNVSKTALLGLTRTLALELAPKDIRVNCVVPGIIKTDFSKV

SEQ ID NO: 10930 - protein, 42 aa, Artificial Sequence
  Synthetic polypeptide
HHQAVRLSPIAKWRWVSTMSARQRCWVSLEHWHWSWPPRTSG

SEQ ID NO: 10931 - protein, 42 aa, Artificial Sequence; identical to SEQ ID NO: 10930
  Synthetic polypeptide

SEQ ID NO: 10932 - protein, 42 aa, Artificial Sequence; identical to SEQ ID NO: 10930
  Synthetic polypeptide

SEQ ID NO: 10933 - protein, 42 aa, Artificial Sequence; identical to SEQ ID NO: 10930
  Synthetic polypeptide

SEQ ID NO: 10934 - protein, 23 aa, Artificial Sequence
  Synthetic polypeptide
DYHLSPSGAGCLQCQQDSAAGSH

SEQ ID NO: 10935 - protein, 23 aa, Artificial Sequence
  Synthetic polypeptide
DYHLSPSGAGCLQCQQDSAAGSH

SEQ ID NO: 10936 - protein, 23 aa, Artificial Sequence
  Synthetic polypeptide
DYHLSPSGAGCLQCQQDSAAGSH

SEQ ID NO: 10937 - protein, 23 aa, Artificial Sequence
  Synthetic polypeptide
DYHLSPSGAGCLQCQQDSAAGSH

SEQ ID NO: 10938 - protein, 23 aa, Artificial Sequence
  Synthetic polypeptide
DYHLSPSGAGCLQCQQDSAAGSH

SEQ ID NO: 10939 - protein, 113 aa, Artificial Sequence
  Synthetic polypeptide
PSPSGETITYRQVALGVYNVSKTALLGLTRTLALELAPKDIRVNCVVPGIIKTDFSKVFHGNESLWKNFKEHHQLQRIGESEDCAGIVSFLCSPDASYVNGENIAVAGYSTRL

SEQ ID NO: 10940 - protein, 133 aa, Artificial Sequence
  Synthetic polypeptide
PSPSGETITYRQVALGVYNVSKTALLGLTRTLALELAPKDIRVNCVVPGIIKTDFSKVVRIGFMGMSLSGRTSRNIISCRGLGSQRTVQESCPSCALQMPATSTGRTLRWQATPLGSERSGGGCVAVVPGPGA

SEQ ID NO: 10941 - protein, 97 aa, Artificial Sequence
  Synthetic polypeptide
PSPSGETITYRQVALGVYNVSKTALLGLTRTLALELAPKDIRFHGNESLWKNFKEHHQLQRIGESEDCAGIVSFLCSPDASYVNGENIAVAGYSTRL

SEQ ID NO: 10942 - protein, 97 aa, Artificial Sequence
  Synthetic polypeptide
HHQAVRLSPIAKWRWVSTMSARQRCWVSLEHWHWSWPPRTSGFMGMSLSGRTSRNIISCRGLGSQRTVQESCPSCALQMPATSTGRTLRWQATPLGS

SEQ ID NO: 10943 - protein, 94 aa, Artificial Sequence
  Synthetic polypeptide
PSPSGETITYRQVALGVYNVSKTALLGLTRTLALELAPKDIRVNCVVPGIIKTDFSKVFHGNESLWKNFKEHHQLQRQVGFGDLVVHVWLGRGS

SEQ ID NO: 10944 - protein, 51 aa, Artificial Sequence
  Synthetic polypeptide
MDRLCHRPTSGPGRGPRGHQQPEAAERGPGHGQAAGGGAECGGHCVPRGEG

SEQ ID NO: 10945 - protein, 51 aa, Artificial Sequence; identical to SEQ ID NO: 10944
  Synthetic polypeptide

SEQ ID NO: 10946 - protein, 51 aa, Artificial Sequence; identical to SEQ ID NO: 10944
  Synthetic polypeptide

SEQ ID NO: 10947 - protein, 24 aa, Artificial Sequence
  Synthetic polypeptide
AWNPSSAVYWLEGCCHPGLFHCSL

SEQ ID NO: 10948 - protein, 24 aa, Artificial Sequence
  Synthetic polypeptide
AWNPSSAVYWLEGCCHPGLFHCSL

SEQ ID NO: 10949 - protein, 24 aa, Artificial Sequence
  Synthetic polypeptide
AWNPSSAVYWLEGCCHPGLFHCSL

SEQ ID NO: 10950 - protein, 24 aa, Artificial Sequence
  Synthetic polypeptide
AWNPSSAVYWLEGCCHPGLFHCSL

SEQ ID NO: 10951 - protein, 24 aa, Artificial Sequence
  Synthetic polypeptide
AWNPSSAVYWLEGCCHPGLFHCSL

SEQ ID NO: 10952 - protein, 83 aa, Artificial Sequence
  Synthetic polypeptide
SMDIVFMRNRHGILALPCIGWRGAVILVSSIAAYNPVVALGVYNVSKTALLGLTRTLALELAPKDIRVNCVVPGIIKTDFSKV

SEQ ID NO: 10953 - protein, 22 aa, Artificial Sequence
  Synthetic polypeptide
LCRVLAGGVLSSWSLPLQLIIQ

SEQ ID NO: 10954 - protein, 22 aa, Artificial Sequence
  Synthetic polypeptide
LCRVLAGGVLSSWSLPLQLIIQ

SEQ ID NO: 10955 - protein, 22 aa, Artificial Sequence
  Synthetic polypeptide
LCRVLAGGVLSSWSLPLQLIIQ

SEQ ID NO: 10956 - protein, 22 aa, Artificial Sequence
  Synthetic polypeptide
LCRVLAGGVLSSWSLPLQLIIQ

SEQ ID NO: 10957 - protein, 22 aa, Artificial Sequence
  Synthetic polypeptide
LCRVLAGGVLSSWSLPLQLIIQ

SEQ ID NO: 10958 - protein, 138 aa, Artificial Sequence
  Synthetic polypeptide
SMDIVFMRNRHGILALPCIGWRGAVILVSSIAAYNPVVALGVYNVSKTALLGLTRTLALELAPKDIRVNCVVPGIIKTDFSKVFHGNESLWKNFKEHHQLQRIGESEDCAGIVSFLCSPDASYVNGENIAVAGYSTRL

SEQ ID NO: 10959 - protein, 158 aa, Artificial Sequence
  Synthetic polypeptide
SMDIVFMRNRHGILALPCIGWRGAVILVSSIAAYNPVVALGVYNVSKTALLGLTRTLALELAPKDIRVNCVVPGIIKTDFSKVVRIGFMGMSLSGRTSRNIISCRGLGSQRTVQESCPSCALQMPATSTGRTLRWQATPLGSERSGGGCVAVVPGPGA

SEQ ID NO: 10960 - protein, 122 aa, Artificial Sequence
  Synthetic polypeptide
SMDIVFMRNRHGILALPCIGWRGAVILVSSIAAYNPVVALGVYNVSKTALLGLTRTLALELAPKDIRFHGNESLWKNFKEHHQLQRIGESEDCAGIVSFLCSPDASYVNGENIAVAGYSTRL

SEQ ID NO: 10961 - protein, 119 aa, Artificial Sequence
  Synthetic polypeptide
SMDIVFMRNRHGILALPCIGWRGAVILVSSIAAYNPVVALGVYNVSKTALLGLTRTLALELAPKDIRVNCVVPGIIKTDFSKVFHGNESLWKNFKEHHQLQRQVGFGDLVVHVWLGRGS

SEQ ID NO: 10962 - protein, 350 aa, Artificial Sequence
  Synthetic polypeptide
GQARWLTPVIPALREAKAWAIFKGKYKEGDTGGPAVWKTRLRCALNKSSEFKEVPERGRMDVAEPYKVYQLLPPGIVSGQPGTQKVPSKRQHSSVSSERKEEEDAMQNCTLSPSVLQDSLNNEEEGASGGAVHSDIGSSSSSSSPEPQEVTDTTEAPFQGDQRSLEFLLPPEPDYSLLLTFIYNGRVVGEAQVQSLDCRLVAEPSGSESSMEQVLFPKPGPLEPTQRLLSQLERGILVASNPRGLFVQRLCPIPISWNAPQAPPGPGPHLLPSNECVELFRTAYFCRDLVRYFQGLGPPPKFQVTLNFWEESHGSSHTPQNLITVKMEQAFARYLLEQTPEQQAAILSLV

SEQ ID NO: 10963 - protein, 219 aa, Artificial Sequence
  Synthetic polypeptide
SQHFGRPRPGQYLRESIRRGTQEVQLSGRLACAVHSTRVLNLRRFLRGAAWMLLSPTRCISCCHQESSLASQGLRKYHQSDSTVLCPLRGRRKRMPCRTAHSVPLCSRTPSIMRRRGPVGEQSIQTLGAAAAAAALSHRKLQTQLRPPFKGIRGPWSFCFLQSQTTHCCSPSSTTGAWWARPRCKAWIAALWLSPQALRAAWSRCCSPSLAHWSPRSAC

SEQ ID NO: 10964 - protein, 21 aa, Artificial Sequence
  Synthetic polypeptide
PGTVAHACNPSTSGGQGLGNI

SEQ ID NO: 10965 - protein, 21 aa, Artificial Sequence
  Synthetic polypeptide
PGTVAHACNPSTSGGQGLGNI

SEQ ID NO: 10966 - protein, 21 aa, Artificial Sequence
  Synthetic polypeptide
PGTVAHACNPSTSGGQGLGNI

SEQ ID NO: 10967 - protein, 21 aa, Artificial Sequence
  Synthetic polypeptide
PGTVAHACNPSTSGGQGLGNI

SEQ ID NO: 10968 - protein, 21 aa, Artificial Sequence
  Synthetic polypeptide
PGTVAHACNPSTSGGQGLGNI

SEQ ID NO: 10969 - protein, 22 aa, Artificial Sequence
  Synthetic polypeptide
GQARWLTPVIPALREAKAWAIF

SEQ ID NO: 10970 - protein, 22 aa, Artificial Sequence
  Synthetic polypeptide
GQARWLTPVIPALREAKAWAIF

SEQ ID NO: 10971 - protein, 13 aa, Artificial Sequence
  Synthetic polypeptide
SQHFGRPRPGQYL

SEQ ID NO: 10972 - protein, 13 aa, Artificial Sequence
  Synthetic polypeptide
SQHFGRPRPGQYL

SEQ ID NO: 10973 - protein, 135 aa, Artificial Sequence
  Synthetic polypeptide
GQARWLTPVIPALREAKAWAIFKGKYKEGDTGGPAVWKTRLRCALNKSSEFKEVPERGRMDVAEPYKVYQLLPPGIVSGQPGTQKVPSKRQHSSVSSERKEEEDAMQNCTLSPSVLQDSLNNLQTQLRPPFKGIR

SEQ ID NO: 10974 - protein, 117 aa, Artificial Sequence
  Synthetic polypeptide
SQHFGRPRPGQYLRESIRRGTQEVQLSGRLACAVHSTRVLNLRRFLRGAAWMLLSPTRCISCCHQESSLASQGLRKYHQSDSTVLCPLRGRRKRMPCRTAHSVPLCSRTPSIIYRHN

SEQ ID NO: 10975 - protein, 224 aa, Artificial Sequence
  Synthetic polypeptide
GQARWLTPVIPALREAKAWAIFKGKYKEGDTGGPAVWKTRLRCALNKSSEFKEVPERGRMDVAEPYKVYQLLPPGIVSGQPGTQKVPSKRQHSSVSSERKEEEDAMQNCTLSPSVLQDSLNNEEEGASGGAVHSDIGSSSSSSSPEPQEVTDTTEAPFQGDQRSLEFLLPPEPAPGRAVLSPDYSLLLTFIYNGRVVGEAQVQSLDCRLVAEPSGSESSMEQVL

SEQ ID NO: 10976 - protein, 215 aa, Artificial Sequence
  Synthetic polypeptide
SQHFGRPRPGQYLRESIRRGTQEVQLSGRLACAVHSTRVLNLRRFLRGAAWMLLSPTRCISCCHQESSLASQGLRKYHQSDSTVLCPLRGRRKRMPCRTAHSVPLCSRTPSIMRRRGPVGEQSIQTLGAAAAAAALSHRKLQTQLRPPFKGIRGPWSFCFLQSQHQVGLFYPQTTHCCSPSSTTGAWWARPRCKAWIAALWLSPQALRAAWSRCC

SEQ ID NO: 10977 - protein, 814 aa, Artificial Sequence
  Synthetic polypeptide
SQLLGEAETGKKEKGPTPEEAIQKLKETEKILIKKQEFLEQKIQQELQTAKKYGTKNKRAALQALRRKKRFEQQLAQTDGTLSTLEFQREAIENATTNAEVLRTMELAAQSMKKAYQDMDIDKVDELMTDITEQQEVAQQISDAISRPMGFGDDVDEDELLEELEELEQEELAQELLNVGDKEEEPSVKLPSVPSTHLPAGPGSTALRMTVVGNPRSWSCQWLPILILLLGTGHGPGVEGVTHYKAGDPVILYVNKVGPYHNPQETYHYYQLPVCCPEKIRHKSLSLGEVLDGDRMAESLYEIRFRENVEKRILCHMQLSSAQVEQLRQAIEELYYFEFVVDDLPIRGFVGYMEESGFLPHSHKIGLWTHLDFHLEFHGDRIIFANVSVRDVKPHSLDGLRPDEFLGLTHTYSVRWSETSVERRSDRRRGDDGGFFPRTLEIHWLSIINSMVLVFLLVGFVAVILMRVLRNDLARYNLDEETTSAGSGDDFDQGDNGWKIIHTDVFRFPPYRGLLCAVLGVGAQFLALGTGIIVMALLGMFNVHRHGAINSAAILLYALTCCISGYVSSHFYRQIGGERWVWNIILTTSLFSVPFFLTWSVVNSVHWANGSTQALPATTILLLLTVWLLVGFPLTVIGGIFGKNNASPFDAPCRTKNIAREIPPQPWYKSTVIHMTVGGFLPFSAISVELYYIFATVWGREQYTLYGILFFVFAILLSVGACISIALTYFQLSGEDYRWWWRSVLSVGSTGLFIFLYSVFYYARRSNMSGAVQTVEFFGYSLLTGYVFFLMLGTISFFSSLKFIRYIYVNLKMD

SEQ ID NO: 10978 - protein, 814 aa, Artificial Sequence; identical to SEQ ID NO: 10977
  Synthetic polypeptide

SEQ ID NO: 10979 - protein, 33 aa, Artificial Sequence
  Synthetic polypeptide
LVVVARACSPSYWGRLRQGRRRKGQPLKKQYRN

SEQ ID NO: 10980 - protein, 33 aa, Artificial Sequence; identical to SEQ ID NO: 10979
  Synthetic polypeptide

SEQ ID NO: 10981 - protein, 33 aa, Artificial Sequence; identical to SEQ ID NO: 10979
  Synthetic polypeptide

SEQ ID NO: 10982 - protein, 33 aa, Artificial Sequence; identical to SEQ ID NO: 10979
  Synthetic polypeptide

SEQ ID NO: 10983 - protein, 33 aa, Artificial Sequence; identical to SEQ ID NO: 10979
  Synthetic polypeptide

SEQ ID NO: 10984 - protein, 33 aa, Artificial Sequence; identical to SEQ ID NO: 10979
  Synthetic polypeptide

SEQ ID NO: 10985 - protein, 33 aa, Artificial Sequence; identical to SEQ ID NO: 10979
  Synthetic polypeptide

SEQ ID NO: 10986 - protein, 10 aa, Artificial Sequence
  Synthetic polypeptide
DREEGERANP

SEQ ID NO: 10987 - protein, 10 aa, Artificial Sequence
  Synthetic polypeptide
DREEGERANP

SEQ ID NO: 10988 - protein, 10 aa, Artificial Sequence
  Synthetic polypeptide
DREEGERANP

SEQ ID NO: 10989 - protein, 10 aa, Artificial Sequence
  Synthetic polypeptide
DREEGERANP

SEQ ID NO: 10990 - protein, 10 aa, Artificial Sequence
  Synthetic polypeptide
DREEGERANP

SEQ ID NO: 10991 - protein, 10 aa, Artificial Sequence
  Synthetic polypeptide
DREEGERANP

SEQ ID NO: 10992 - protein, 10 aa, Artificial Sequence
  Synthetic polypeptide
DREEGERANP

SEQ ID NO: 10993 - protein, 221 aa, Artificial Sequence
  Synthetic polypeptide
SQLLGEAETGKKEKGPTPEEAIQKLKETEKILIKKQEFLEQKIQQELQTAKKYGTKNKRAALQALRRKKRFEQQLAQTDGTLSTLEFQREAIENATTNAEVLRTMELAAQSMKKAYQDMDIDKVDELMTDITEQQEVAQQISDAISRPMGFGDDVDEDELLEELEELEQEELAQELLNVGDKEEEPSVKLPSVPSTHLPAGPAPKVDEDEEALKQLAEWVS

SEQ ID NO: 10994 - protein, 221 aa, Artificial Sequence; identical to SEQ ID NO: 10993
  Synthetic polypeptide

SEQ ID NO: 10995 - protein, 122 aa, Artificial Sequence
  Synthetic polypeptide
SQLLGEAETGKKEKGPTPEEAIQKLKETEKILIKKQEFLEQKIQQELQTAKKYGTKNKRAALQALRRKKRFEQQLAQTDGTLSTLEFQREAIENATTNAEVLRTMELAAQSMKKAYQDMWGH

SEQ ID NO: 10996 - protein, 202 aa, Artificial Sequence
  Synthetic polypeptide
SQLLGEAETGKKEKGPTPEEAIQKLKETEKILIKKQEFLEQKIQQELQTAKKYGTKNKRAALQALRRKKRFEQQLAQTDGTLSTLEFQREAIENATTNAEVLRTMELAAQSMKKAYQDMDIDKVDELMTDITEQQEVAQQISDAISRPMGFGDDVDEDELLEELEELEQEELAQELLNVGDKEEEPSVKLPSVPSTHLPAGP

SEQ ID NO: 10997 - protein, 62 aa, Artificial Sequence
  Synthetic polypeptide
SQLLGEAETGKKEKGPTPEEAIQKLKETEKILIKKQEFLEQKIQQELQTAKKYGTKNKRVSA

SEQ ID NO: 10998 - protein, 37 aa, Artificial Sequence
  Synthetic polypeptide
ARRGGSRLYSQHFGRPTWVDHEGRRRKGQPLKKQYRN

SEQ ID NO: 10999 - protein, 37 aa, Artificial Sequence; identical to SEQ ID NO: 10998
  Synthetic polypeptide

SEQ ID NO: 11000 - protein, 37 aa, Artificial Sequence; identical to SEQ ID NO: 10998
  Synthetic polypeptide

SEQ ID NO: 11001 - protein, 37 aa, Artificial Sequence; identical to SEQ ID NO: 10998
  Synthetic polypeptide

SEQ ID NO: 11002 - protein, 37 aa, Artificial Sequence; identical to SEQ ID NO: 10998
  Synthetic polypeptide

SEQ ID NO: 11003 - protein, 37 aa, Artificial Sequence; identical to SEQ ID NO: 10998
  Synthetic polypeptide

SEQ ID NO: 11004 - protein, 37 aa, Artificial Sequence; identical to SEQ ID NO: 10998
  Synthetic polypeptide

SEQ ID NO: 11005 - protein, 30 aa, Artificial Sequence
  Synthetic polypeptide
PGAGAHACTRNTLGGRRGWIMREEGERANP

SEQ ID NO: 11006 - protein, 30 aa, Artificial Sequence; identical to SEQ ID NO: 11005
  Synthetic polypeptide

SEQ ID NO: 11007 - protein, 30 aa, Artificial Sequence; identical to SEQ ID NO: 11005
  Synthetic polypeptide

SEQ ID NO: 11008 - protein, 30 aa, Artificial Sequence; identical to SEQ ID NO: 11005
  Synthetic polypeptide

SEQ ID NO: 11009 - protein, 30 aa, Artificial Sequence; identical to SEQ ID NO: 11005
  Synthetic polypeptide

SEQ ID NO: 11010 - protein, 30 aa, Artificial Sequence; identical to SEQ ID NO: 11005
  Synthetic polypeptide

SEQ ID NO: 11011 - protein, 30 aa, Artificial Sequence; identical to SEQ ID NO: 11005
  Synthetic polypeptide

SEQ ID NO: 11012 - protein, 68 aa, Artificial Sequence
  Synthetic polypeptide
GRAQWLTPVIPALWEAEGGGSPEVRSSRPAWPTWNDEKTAADYKILVMELYEIGGAKTSDCTQRCLRS

SEQ ID NO: 11013 - protein, 36 aa, Artificial Sequence
  Synthetic polypeptide
SQHFGRLKGVDHLRSGVRDQPGQHGMMRRQQLITRF

SEQ ID NO: 11014 - protein, 36 aa, Artificial Sequence; identical to SEQ ID NO: 11013
  Synthetic polypeptide

SEQ ID NO: 11015 - protein, 12 aa, Artificial Sequence
  Synthetic polypeptide
GQEFETSLANME

SEQ ID NO: 11016 - protein, 12 aa, Artificial Sequence
  Synthetic polypeptide
GQEFETSLANME

SEQ ID NO: 11017 - protein, 65 aa, Artificial Sequence
  Synthetic polypeptide
GRAQWLTPVIPALWEAEGGGSPEVRSSRPAWPTWNDEKTAADYKILGGSVLHLVLALRGGGGLRQ

SEQ ID NO: 11018 - protein, 10 aa, Artificial Sequence
  Synthetic polypeptide
TTHVSTNRYY

SEQ ID NO: 11019 - protein, 10 aa, Artificial Sequence
  Synthetic polypeptide
TTHVSTNRYY

SEQ ID NO: 11020 - protein, 10 aa, Artificial Sequence
  Synthetic polypeptide
TTHVSTNRYY

SEQ ID NO: 11021 - protein, 10 aa, Artificial Sequence
  Synthetic polypeptide
TTHVSTNRYY

SEQ ID NO: 11022 - protein, 10 aa, Artificial Sequence
  Synthetic polypeptide
TTHVSTNRYY

SEQ ID NO: 11023 - protein, 10 aa, Artificial Sequence
  Synthetic polypeptide
TTHVSTNRYY

SEQ ID NO: 11024 - protein, 10 aa, Artificial Sequence
  Synthetic polypeptide
TTHVSTNRYY

SEQ ID NO: 11025 - protein, 420 aa, Artificial Sequence
  Synthetic polypeptide
EQALKQMLPVFIAAVFTIAKRCKQPTCPPTGTTERVCLIQGTVEALNAVHGFIAEKIREMPQNVAKTEPVSILQPQTTVNPDRIKQVKIIVPNSTAGLIIGKGGATVKAVMEQSGAWVQLSQKPDGINLQERVVTVSGEPEQNRKAVELIIQKIQEDPQSGSCLNISYANVTGPVANSNPTGSPYANTAEVLPTAAAAAGLLGHANLAGVAAFPAVLSGFTGNDLVAITSALNTLASYGYNLNTLGLGLSQAAATGALAAAAASANPAAAAANLLATYASEASASGSTAGGTAGTFALGSLAAATAATNGYFGAASPLAASAILGTEKSTDGSKDVVEIAVPENLVGAILGKGGKTLVEYQELTGARIQISKKGEFVPGTRNRKVTITGTPAATQAAQYLITQRITYEQGVRAANPQKVG

SEQ ID NO: 11026 - protein, 19 aa, Artificial Sequence
  Synthetic polypeptide
PKGVNNPRVHQQVLLSECA

SEQ ID NO: 11027 - protein, 19 aa, Artificial Sequence
  Synthetic polypeptide
PKGVNNPRVHQQVLLSECA

SEQ ID NO: 11028 - protein, 19 aa, Artificial Sequence
  Synthetic polypeptide
PKGVNNPRVHQQVLLSECA

SEQ ID NO: 11029 - protein, 19 aa, Artificial Sequence
  Synthetic polypeptide
PKGVNNPRVHQQVLLSECA

SEQ ID NO: 11030 - protein, 19 aa, Artificial Sequence
  Synthetic polypeptide
PKGVNNPRVHQQVLLSECA

SEQ ID NO: 11031 - protein, 19 aa, Artificial Sequence
  Synthetic polypeptide
PKGVNNPRVHQQVLLSECA

SEQ ID NO: 11032 - protein, 19 aa, Artificial Sequence
  Synthetic polypeptide
PKGVNNPRVHQQVLLSECA

SEQ ID NO: 11033 - protein, 444 aa, Artificial Sequence
  Synthetic polypeptide
EQALKQMLPVFIAAVFTIAKRCKQPTCPPTGTTERVCLIQGTVEALNAVHGFIAEKIREMPQNVAKTEPVSILQPQTTVNPDRIKQTLPSSPTTTKSSPSDPMTTSRANQVKIIVPNSTAGLIIGKGGATVKAVMEQSGAWVQLSQKPDGINLQERVVTVSGEPEQNRKAVELIIQKIQEDPQSGSCLNISYANVTGPVANSNPTGSPYANTAEVLPTAAAAAGLLGHANLAGVAAFPAVLSGFTGNDLVAITSALNTLASYGYNLNTLGLGLSQAAATGALAAAAASANPAAAAANLLATYASEASASGSTAGGTAGTFALGSLAAATAATNGYFGAASPLAASAILGTEKSTDGSKDVVEIAVPENLVGAILGKGGKTLVEYQELTGARIQISKKGEFVPGTRNRKVTITGTPAATQAAQYLITQRITYEQGVRAANPQKVG

SEQ ID NO: 11034 - protein, 255 aa, Artificial Sequence
  Synthetic polypeptide
EQALKQMLPVFIAAVFTIAKRCKQPTCPPTGTTERVCLIQGTVEALNAVHGFIAEKIREMPQNVAKTEPVSILQPQTTVNPDRIKQTLPSSPTTTKSSPSDPMTTSRANQVKIIVPNSTAGLIIGKGGATVKAVMEQSGAWVQLSQKPDGINLQERVVTVSGEPEQNRKAVELIIQKIQEDPQSGSCLNISYANVTGPVANSNPTGSPYANTAEVLPTAAAAAGLLGHANLAGVAAFPAVLSGFTGNDLVAITSA

SEQ ID NO: 11035 - protein, 147 aa, Artificial Sequence
  Synthetic polypeptide
EQALKQMLPVFIAAVFTIAKRCKQPTCPPTGTTERVCLIQGTVEALNAVHGFIAEKIREMPQNVAKTEPVSILQPQTTVNPDRIKQTLPSSPTTTKSSPSDPMTTSRANQVKIIVPNSTAGLIIGKGGATVKAVMEQSGAWVQLSQK

SEQ ID NO: 11036 - protein, 118 aa, Artificial Sequence
  Synthetic polypeptide
EQALKQMLPVFIAAVFTIAKRCKQPTCPPTGTTERVCLIQGTVEALNAVHGFIAEKIREMPQNVAKTEPVSILQPQTTVNPDRIKQTLPSSPTTTKSSPSDPMTTSRANQKHNISWIS

SEQ ID NO: 11037 - protein, 148 aa, Artificial Sequence
  Synthetic polypeptide
EQALKQMLPVFIAAVFTIAKRCKQPTCPPTGTTERVCLIQGTVEALNAVHGFIAEKIREMPQNVAKTEPVSILQPQTTVNPDRIKQTLPSSPTTTKSSPSDPMTTSRANQVQYHPVIYTILFTGDCLQTGEKDNGGLRIYSFIHIYAP

SEQ ID NO: 11038 - protein, 89 aa, Artificial Sequence
  Synthetic polypeptide
EQALKQMLPVFIAAVFTIAKRCKQPTCPPTGTTERVCLIQGTVEALNAVHGFIAEKIREMPQNVAKTEPVSILQPQTTVNPDRIKQVSV

SEQ ID NO: 11039 - protein, 226 aa, Artificial Sequence
  Synthetic polypeptide
SFQKSKAIGLLDVDVYGPSVPKMMNLKGNPELSQSNLMRPLLNYGIACMSMGFLVEESEPVVWRGLMVMSAIEKLLRQVDWGQLDYLVVDMPPGTGDVQLSVSQNIPITGAVIVSTPQDIALMDAHKGAEMFRRVHVPVLGLVQNMSVFQCPKCKHKTHIFGADGARKLAQTLGLEVLGDIPLHLNIREASDTGQPIVFSQPESDEAKAYLRIAVEVVRRLPSPSE

SEQ ID NO: 11040 - protein, 226 aa, Artificial Sequence; identical to SEQ ID NO: 11039
  Synthetic polypeptide

SEQ ID NO: 11041 - protein, 14 aa, Artificial Sequence
  Synthetic polypeptide
FFPKASRSPRPLVC

SEQ ID NO: 11042 - protein, 14 aa, Artificial Sequence
  Synthetic polypeptide
FFPKASRSPRPLVC

SEQ ID NO: 11043 - protein, 14 aa, Artificial Sequence
  Synthetic polypeptide
FFPKASRSPRPLVC

SEQ ID NO: 11044 - protein, 14 aa, Artificial Sequence
  Synthetic polypeptide
FFPKASRSPRPLVC

SEQ ID NO: 11045 - protein, 14 aa, Artificial Sequence
  Synthetic polypeptide
FFPKASRSPRPLVC

SEQ ID NO: 11046 - protein, 64 aa, Artificial Sequence
  Synthetic polypeptide
KGKEIDFSLKLPEVQGHWFARCGCVWTFSSKDDESERKSGIITEQPNEASLELWYCLYVYGLSG

SEQ ID NO: 11047 - protein, 64 aa, Artificial Sequence; identical to SEQ ID NO: 11046
  Synthetic polypeptide

SEQ ID NO: 11048 - protein, 64 aa, Artificial Sequence; identical to SEQ ID NO: 11046
  Synthetic polypeptide

SEQ ID NO: 11049 - protein, 64 aa, Artificial Sequence; identical to SEQ ID NO: 11046
  Synthetic polypeptide

SEQ ID NO: 11050 - protein, 80 aa, Artificial Sequence
  Synthetic polypeptide
SFQKSKAIGLLDVDVYGPSVPKMMNLKGNPELSQSNLMRPLLNYGIACMSMGFLVEESEPVVWRGLMVMSAIEKLLRQVL

SEQ ID NO: 11051 - protein, 49 aa, Artificial Sequence
  Synthetic polypeptide
SFQKSKAIGLLDVDVYGPSVPKMMNLKGNPELSQSISQRCCRSCSRPPQ

SEQ ID NO: 11052 - protein, 59 aa, Artificial Sequence
  Synthetic polypeptide
KGKEIDFSLKLPEVQGHWFARCGCVWTFSSKDDESERKSGIITEYISEMLQVLFQTTTI

SEQ ID NO: 11053 - protein, 92 aa, Artificial Sequence
  Synthetic polypeptide
SFQKSKAIGLLDVDVYGPSVPKMMNLKGNPELSQSNLMRPLLNYGIACMSMGFLVEESEPVVWRGLMVMSAIEKLLRQVDWGQLDYLVVDMP

SEQ ID NO: 11054 - protein, 128 aa, Artificial Sequence
  Synthetic polypeptide
VRNSQVLQAMVACYPGNGTGYVRHVDNPNGDGRCITCIYYLNKNWDAKLHGGILRIFPEGKSFIADVEPIFDRLLFFWSDRRNPHEVQPSYATRYAMTVWYFDAEERAEAKKKFRNLTRKTESALTED

SEQ ID NO: 11055 - protein, 128 aa, Artificial Sequence; identical to SEQ ID NO: 11054
  Synthetic polypeptide

SEQ ID NO: 11056 - protein, 52 aa, Artificial Sequence
  Synthetic polypeptide
MQILHLLPRPPELEIHKFSRQWWLAIREMEQVMFATWTTPTVMVAASPASTI

SEQ ID NO: 11057 - protein, 52 aa, Artificial Sequence; identical to SEQ ID NO: 11056
  Synthetic polypeptide

SEQ ID NO: 11058 - protein, 52 aa, Artificial Sequence; identical to SEQ ID NO: 11056
  Synthetic polypeptide

SEQ ID NO: 11059 - protein, 28 aa, Artificial Sequence
  Synthetic polypeptide
KFTSSPGNGGLLSGKWNRLCSPRGQPQR

SEQ ID NO: 11060 - protein, 28 aa, Artificial Sequence
  Synthetic polypeptide
KFTSSPGNGGLLSGKWNRLCSPRGQPQR

SEQ ID NO: 11061 - protein, 28 aa, Artificial Sequence
  Synthetic polypeptide
KFTSSPGNGGLLSGKWNRLCSPRGQPQR

SEQ ID NO: 11062 - protein, 86 aa, Artificial Sequence
  Synthetic polypeptide
VRNSQVLQAMVACYPGNGTGYVRHVDNPNGDGRCITCIYYLNKNWDAKLHGGILRIFPEGKSFIADVEPIFDRLLFFWSDRRNPHE

SEQ ID NO: 11063 - protein, 41 aa, Artificial Sequence
  Synthetic polypeptide
GWAQWLMPLIPALEVRSSRPQANMGNLQLLQNCLAVLNGDT

SEQ ID NO: 11064 - protein, 41 aa, Artificial Sequence; identical to SEQ ID NO: 11063
  Synthetic polypeptide

SEQ ID NO: 11065 - protein, 41 aa, Artificial Sequence; identical to SEQ ID NO: 11063
  Synthetic polypeptide

SEQ ID NO: 11066 - protein, 41 aa, Artificial Sequence; identical to SEQ ID NO: 11063
  Synthetic polypeptide

SEQ ID NO: 11067 - protein, 27 aa, Artificial Sequence
  Synthetic polypeptide
SQPLRSGVRDRKPTWVIYSCCRTAWQC

SEQ ID NO: 11068 - protein, 27 aa, Artificial Sequence
  Synthetic polypeptide
SQPLRSGVRDRKPTWVIYSCCRTAWQC

SEQ ID NO: 11069 - protein, 27 aa, Artificial Sequence
  Synthetic polypeptide
SQPLRSGVRDRKPTWVIYSCCRTAWQC

SEQ ID NO: 11070 - protein, 27 aa, Artificial Sequence
  Synthetic polypeptide
SQPLRSGVRDRKPTWVIYSCCRTAWQC

SEQ ID NO: 11071 - protein, 11 aa, Artificial Sequence
  Synthetic polypeptide
GQEFETASQHG

SEQ ID NO: 11072 - protein, 11 aa, Artificial Sequence
  Synthetic polypeptide
GQEFETASQHG

SEQ ID NO: 11073 - protein, 11 aa, Artificial Sequence
  Synthetic polypeptide
GQEFETASQHG

SEQ ID NO: 11074 - protein, 11 aa, Artificial Sequence
  Synthetic polypeptide
GQEFETASQHG

SEQ ID NO: 11075 - protein, 209 aa, Artificial Sequence
  Synthetic polypeptide
HFGRLRQDVDDFFEHERTFLLEYHNRVKDASAKSDRMTRSHKSAADDYNRIGSSLYALGTQDSTDICKFFLKVSELFDKTRKIEARVSADEDLKLSDLLKYYLRESQAAKDLLYRRSRSLVDYENANKALDKARAKNKDVLQAETSQQLCCQKFEKISESAKQELIDFKTRRVAAFRKNLVELAELELKHAKGNLQLLQNCLAVLNGDT

SEQ ID NO: 11076 - protein, 209 aa, Artificial Sequence; identical to SEQ ID NO: 11075
  Synthetic polypeptide

SEQ ID NO: 11077 - protein, 209 aa, Artificial Sequence; identical to SEQ ID NO: 11075
  Synthetic polypeptide

SEQ ID NO: 11078 - protein, 209 aa, Artificial Sequence; identical to SEQ ID NO: 11075
  Synthetic polypeptide

SEQ ID NO: 11079 - protein, 3 aa, Artificial Sequence
  Synthetic polypeptide
GRM

SEQ ID NO: 11080 - protein, 3 aa, Artificial Sequence
  Synthetic polypeptide
GRM

SEQ ID NO: 11081 - protein, 3 aa, Artificial Sequence
  Synthetic polypeptide
GRM

SEQ ID NO: 11082 - protein, 3 aa, Artificial Sequence
  Synthetic polypeptide
GRM

SEQ ID NO: 11083 - protein, 3 aa, Artificial Sequence
  Synthetic polypeptide
GRM

SEQ ID NO: 11084 - protein, 20 aa, Artificial Sequence
  Synthetic polypeptide
QVQWLTPVILTLWEAEAGCR

SEQ ID NO: 11085 - protein, 20 aa, Artificial Sequence
  Synthetic polypeptide
QVQWLTPVILTLWEAEAGCR

SEQ ID NO: 11086 - protein, 20 aa, Artificial Sequence
  Synthetic polypeptide
QVQWLTPVILTLWEAEAGCR

SEQ ID NO: 11087 - protein, 20 aa, Artificial Sequence
  Synthetic polypeptide
QVQWLTPVILTLWEAEAGCR

SEQ ID NO: 11088 - protein, 20 aa, Artificial Sequence
  Synthetic polypeptide
QVQWLTPVILTLWEAEAGCR

SEQ ID NO: 11089 - protein, 67 aa, Artificial Sequence
  Synthetic polypeptide
HFGRLRQDVDDFFEHERTFLLEYHNRVKDASAKSDRMTRSHKSAADDYNRIGSSLYALGTQDSTDIC

SEQ ID NO: 11090 - protein, 81 aa, Artificial Sequence
  Synthetic polypeptide
VFTQEKQSYISTKMTSMSIFIAALLVIAKELEISQMSNRQSCYLCNKPEKLQFNSTKNWKRKSRPFEFTTVYTNLYLKKKI

SEQ ID NO: 11091 - protein, 81 aa, Artificial Sequence; identical to SEQ ID NO: 11090
  Synthetic polypeptide

SEQ ID NO: 11092 - protein, 81 aa, Artificial Sequence; identical to SEQ ID NO: 11090
  Synthetic polypeptide

SEQ ID NO: 11093 - protein, 81 aa, Artificial Sequence; identical to SEQ ID NO: 11090
  Synthetic polypeptide

SEQ ID NO: 11094 - protein, 81 aa, Artificial Sequence; identical to SEQ ID NO: 11090
  Synthetic polypeptide

SEQ ID NO: 11095 - protein, 81 aa, Artificial Sequence; identical to SEQ ID NO: 11090
  Synthetic polypeptide

SEQ ID NO: 11096 - protein, 81 aa, Artificial Sequence; identical to SEQ ID NO: 11090
  Synthetic polypeptide

SEQ ID NO: 11097 - protein, 81 aa, Artificial Sequence; identical to SEQ ID NO: 11090
  Synthetic polypeptide

SEQ ID NO: 11098 - protein, 54 aa, Artificial Sequence
  Synthetic polypeptide
KSAKCLTGKVVIYATSQRNCSSTVQKTGRGNPDPSSLLQFTQIFISRRKSEGSV

SEQ ID NO: 11099 - protein, 54 aa, Artificial Sequence; identical to SEQ ID NO: 11098
  Synthetic polypeptide

SEQ ID NO: 11100 - protein, 54 aa, Artificial Sequence; identical to SEQ ID NO: 11098
  Synthetic polypeptide

SEQ ID NO: 11101 - protein, 54 aa, Artificial Sequence; identical to SEQ ID NO: 11098
  Synthetic polypeptide

SEQ ID NO: 11102 - protein, 54 aa, Artificial Sequence; identical to SEQ ID NO: 11098
  Synthetic polypeptide

SEQ ID NO: 11103 - protein, 54 aa, Artificial Sequence; identical to SEQ ID NO: 11098
  Synthetic polypeptide

SEQ ID NO: 11104 - protein, 54 aa, Artificial Sequence; identical to SEQ ID NO: 11098
  Synthetic polypeptide

SEQ ID NO: 11105 - protein, 54 aa, Artificial Sequence; identical to SEQ ID NO: 11098
  Synthetic polypeptide

SEQ ID NO: 11106 - protein, 131 aa, Artificial Sequence
  Synthetic polypeptide
QAKLLSMQQARETAVQQYKKLEEEIQTLRVYYSLHKSLSQEENLKDQFNYTLSTYEEALKNRENIVSITQQQNEELATQLQQALTERANMELQLQHAREASQVANEKVQKLERLVDVLRKKVGTGTMRTVI

SEQ ID NO: 11107 - protein, 131 aa, Artificial Sequence; identical to SEQ ID NO: 11106
  Synthetic polypeptide

SEQ ID NO: 11108 - protein, 131 aa, Artificial Sequence; identical to SEQ ID NO: 11106
  Synthetic polypeptide

SEQ ID NO: 11109 - protein, 131 aa, Artificial Sequence; identical to SEQ ID NO: 11106
  Synthetic polypeptide

SEQ ID NO: 11110 - protein, 131 aa, Artificial Sequence; identical to SEQ ID NO: 11106
  Synthetic polypeptide

SEQ ID NO: 11111 - protein, 144 aa, Artificial Sequence
  Synthetic polypeptide
QAKLLSMQQARETAVQQYKKLEEEIQTLRVYYSLHKSLSQEENLKDQFNYTLSTYEEALKNRENIVSITQQQNEELATQLQQALTERANMELQLQHAREASQVANEKVQKSQIQIYFIPNKKDEREKFLMDKRRKIVAHSKQNS

SEQ ID NO: 11112 - protein, 144 aa, Artificial Sequence; identical to SEQ ID NO: 11111
  Synthetic polypeptide

SEQ ID NO: 11113 - protein, 48 aa, Artificial Sequence
  Synthetic polypeptide
QAKLLSMQQARETAVQQYKKLEEEIQTLRVYYSLHKSLSQEENLKDQF

SEQ ID NO: 11114 - protein, 11 aa, Artificial Sequence
  Synthetic polypeptide
VRVHQNILNLF

SEQ ID NO: 11115 - protein, 11 aa, Artificial Sequence
  Synthetic polypeptide
VRVHQNILNLF

SEQ ID NO: 11116 - protein, 7 aa, Artificial Sequence
  Synthetic polypeptide
SGSTKIY

SEQ ID NO: 11117 - protein, 7 aa, Artificial Sequence
  Synthetic polypeptide
SGSTKIY

SEQ ID NO: 11118 - protein, 119 aa, Artificial Sequence
  Synthetic polypeptide
QGPPKYTKSVLKKGDKTNFPKKGDVVHCWYTGTLQDGTVFDTNIQTSAKKKKNAKPLSFKVGVGKVIRGWDEALLTMSKGEKARLEIEPEWAYGKKGQPDAKIPPNAKLTFEVELVDID

SEQ ID NO: 11119 - protein, 119 aa, Artificial Sequence; identical to SEQ ID NO: 11118
  Synthetic polypeptide

SEQ ID NO: 11120 - protein, 31 aa, Artificial Sequence
  Synthetic polypeptide
TGPGWSAVARSRLTATSASQVQPILLPQPPE

SEQ ID NO: 11121 - protein, 46 aa, Artificial Sequence
  Synthetic polypeptide
PPGSGGPPGCLRRGEPAQAGVQWRDLGSLQPPPPRFNQFSCLSLPS

SEQ ID NO: 11122 - protein, 35 aa, Artificial Sequence
  Synthetic polypeptide
GGVNRPRLECSGAISAHCNLRLPGSTNSPASASRV

SEQ ID NO: 11123 - protein, 23 aa, Artificial Sequence
  Synthetic polypeptide
GRARWLMPVIPGLWEAEQTSRLL

SEQ ID NO: 11124 - protein, 23 aa, Artificial Sequence
  Synthetic polypeptide
GRARWLMPVIPGLWEAEQTSRLL

SEQ ID NO: 11125 - protein, 13 aa, Artificial Sequence
  Synthetic polypeptide
SQDFGRPSKLQGF

SEQ ID NO: 11126 - protein, 13 aa, Artificial Sequence
  Synthetic polypeptide
SQDFGRPSKLQGF

SEQ ID NO: 11127 - protein, 22 aa, Artificial Sequence
  Synthetic polypeptide
QGTVAHACNPRTLGGRANFKAF

SEQ ID NO: 11128 - protein, 22 aa, Artificial Sequence
  Synthetic polypeptide
QGTVAHACNPRTLGGRANFKAF

SEQ ID NO: 11129 - protein, 574 aa, Artificial Sequence
  Synthetic polypeptide
SQHFGRPRRADHEVKRSRPSWLTRFEKFLWFISSENYLIIGGRDQQQNEIIVKRYLTPGDIYVHADLHGATSCVIKNPTGEPIPPRTLTEAGTMALCYSAAWDARVITSAWWVYHHQVSKTAPTGEYLTTGSFMIRGKKNFLPPSYLMMGFSFLFKVDESCVWRHQGERKVRVQDEDMETLASCTSELISEEMEQLDGGDTSSDEDKEEHETPVEVELMTQVDQEDITLQSGRDELNEELIQEESSEDEGEYEEVRKDQDSVGEMKDEGEETLNYPDTTIDLSHLQPQRSIQKLASKEESSNSSDSKSQSRRHLSAKERREMKKKKLPSDSGDLEALEGKDKEKESTVHIETHQNTSKNVAAVQPMKRGQKSKMKKMKEKYKDQDEEDRELIMKLLGSAGSNKEEKGKKGKKGKTKDEPVKKQPQKPRGGQRVSDNIKKETPFLEVITHELQDFAVDDPHDDKEEQDLDQQGNEENLFDSLTGQPHPEDVLLFAIPICAPYTTMTNYKYKVKLTPGVQKKGKAAKTALNSFMHSKEATAREKDLFRSVKDTDLSRNIPGKVKVSAPNLLNVKRK

SEQ ID NO: 11130 - protein, 574 aa, Artificial Sequence; identical to SEQ ID NO: 11129
  Synthetic polypeptide

SEQ ID NO: 11131 - protein, 15 aa, Artificial Sequence
  Synthetic polypeptide
HGLRNFCGSLAQRTI

SEQ ID NO: 11132 - protein, 15 aa, Artificial Sequence
  Synthetic polypeptide
HGLRNFCGSLAQRTI

SEQ ID NO: 11133 - protein, 15 aa, Artificial Sequence
  Synthetic polypeptide
HGLRNFCGSLAQRTI

SEQ ID NO: 11134 - protein, 15 aa, Artificial Sequence
  Synthetic polypeptide
HGLRNFCGSLAQRTI

SEQ ID NO: 11135 - protein, 33 aa, Artificial Sequence
  Synthetic polypeptide
RAQWLTPVIPALWEAEEGGSRGQEIETILANTV

SEQ ID NO: 11136 - protein, 33 aa, Artificial Sequence; identical to SEQ ID NO: 11135
  Synthetic polypeptide

SEQ ID NO: 11137 - protein, 33 aa, Artificial Sequence; identical to SEQ ID NO: 11135
  Synthetic polypeptide

SEQ ID NO: 11138 - protein, 33 aa, Artificial Sequence; identical to SEQ ID NO: 11135
  Synthetic polypeptide

SEQ ID NO: 11139 - protein, 553 aa, Artificial Sequence
  Synthetic polypeptide
SQHFGRPRRADHEVKRSRPSWLTRFEKFLWFISSENYLIIGGRDQQQNEIIVKRYLTPGEPIPPRTLTEAGTMALCYSAAWDARVITSAWWVYHHQVSKTAPTGEYLTTGSFMIRGKKNFLPPSYLMMGFSFLFKVDESCVWRHQGERKVRVQDEDMETLASCTSELISEEMEQLDGGDTSSDEDKEEHETPVEVELMTQVDQEDITLQSGRDELNEELIQEESSEDEGEYEEVRKDQDSVGEMKDEGEETLNYPDTTIDLSHLQPQRSIQKLASKEESSNSSDSKSQSRRHLSAKERREMKKKKLPSDSGDLEALEGKDKEKESTVHIETHQNTSKNVAAVQPMKRGQKSKMKKMKEKYKDQDEEDRELIMKLLGSAGSNKEEKGKKGKKGKTKDEPVKKQPQKPRGGQRVSDNIKKETPFLEVITHELQDFAVDDPHDDKEEQDLDQQGNEENLFDSLTGQPHPEDVLLFAIPICAPYTTMTNYKYKVKLTPGVQKKGKAAKTALNSFMHSKEATAREKDLFRSVKDTDLSRNIPGKVKVSAPNLLNVKRK

SEQ ID NO: 11140 - protein, 538 aa, Artificial Sequence
  Synthetic polypeptide
SQHFGRPRRADHEVKRSRPSWLTRFEKFLWFISSENYLIIGGRDQQQNEIIVKRYLTPGDIYVHADLHGATSCVIKNPTGEPIPPRTLTEAGTMALCYSAAWDARVITSAWWVYHHQVSKTAPTGEYLTTGSFMIRGKKNFLPPSYLMMGFSFLFKVDESCVWRHQGERKVRVQDEDMETLASCTSELISEEMEQLDGGDTSSDEDKEEHETPVEVELMTQVDQEDITLQSGRDELNEELIQEESSEDEGEYEEVRKDQDSVGEMKDEGEETLNYPDTTIDLSHLQPQRSIQKLASKEESSNSSDSKSQSRRHLSAKERREMKKKKLPSDSGDLEALEGKDKEKESTVHIETHQNTSKNVAAVQPMKRGQKSKMKKMKEKYKDQDEEDRELIMKLLGSAGSNKEEKGKKGKKGKTKDEPVKKQPQKPRGGQRVSDNIKKETPFLEVITHELQDFAVDDPHDDKEEQDLDQQGNEENLFDSLTGQPHPEDVLLFAIPICAPYTTMTNYKYKVKLTPGVQKKGKAAKTALNSFMHSKEAT

SEQ ID NO: 11141 - protein, 39 aa, Artificial Sequence
  Synthetic polypeptide
EKSTYDLRSSDRPAQETSHQFQIRFTGTFQDFYVHLWMP

SEQ ID NO: 11142 - protein, 39 aa, Artificial Sequence; identical to SEQ ID NO: 11141
  Synthetic polypeptide

SEQ ID NO: 11143 - protein, 39 aa, Artificial Sequence; identical to SEQ ID NO: 11141
  Synthetic polypeptide

SEQ ID NO: 11144 - protein, 68 aa, Artificial Sequence
  Synthetic polypeptide
LGSGDLPWEINPPSSCSLLHEKNPPMTLGPQTDQPKKHLTNFKSDLPEHSRIFTYTYGCPEKRQNNLS

SEQ ID NO: 11145 - protein, 68 aa, Artificial Sequence; identical to SEQ ID NO: 11144
  Synthetic polypeptide

SEQ ID NO: 11146 - protein, 68 aa, Artificial Sequence; identical to SEQ ID NO: 11144
  Synthetic polypeptide

SEQ ID NO: 11147 - protein, 118 aa, Artificial Sequence
  Synthetic polypeptide
VLRPTSPRNISPISNPIYRNIPGFLRTLMDALRKDKIIFPNDENVKFLSSPLLILHGEDDRTVPLEYGKKLYEIARNAYRNKERVKMVIFPPGFQHNLLCKSPTLLITVRDFLSKQWS

SEQ ID NO: 11148 - protein, 118 aa, Artificial Sequence; identical to SEQ ID NO: 11147
  Synthetic polypeptide

SEQ ID NO: 11149 - protein, 118 aa, Artificial Sequence; identical to SEQ ID NO: 11147
  Synthetic polypeptide

SEQ ID NO: 11150 - protein, 110 aa, Artificial Sequence
  Synthetic polypeptide
TITDAELPIYRNIPGFLRTLMDALRKDKIIFPNDENVKFLSSPLLILHGEDDRTVPLEYGKKLYEIARNAYRNKERVKMVIFPPGFQHNLLCKSPTLLITVRDFLSKQWS

SEQ ID NO: 11151 - protein, 110 aa, Artificial Sequence; identical to SEQ ID NO: 11150
  Synthetic polypeptide

SEQ ID NO: 11152 - protein, 110 aa, Artificial Sequence; identical to SEQ ID NO: 11150
  Synthetic polypeptide

SEQ ID NO: 11153 - protein, 38 aa, Artificial Sequence
  Synthetic polypeptide
RLKTDTARSPRKPPRPSQTPSFRFTGTFQDFYVHLWMP

SEQ ID NO: 11154 - protein, 38 aa, Artificial Sequence; identical to SEQ ID NO: 11153
  Synthetic polypeptide

SEQ ID NO: 11155 - protein, 38 aa, Artificial Sequence; identical to SEQ ID NO: 11153
  Synthetic polypeptide

SEQ ID NO: 11156 - protein, 44 aa, Artificial Sequence
  Synthetic polypeptide
RLTLPDRLGSPLDHHRRRASDLPEHSRIFTYTYGCPEKRQNNLS

SEQ ID NO: 11157 - protein, 44 aa, Artificial Sequence; identical to SEQ ID NO: 11156
  Synthetic polypeptide

SEQ ID NO: 11158 - protein, 44 aa, Artificial Sequence; identical to SEQ ID NO: 11156
  Synthetic polypeptide

SEQ ID NO: 11159 - protein, 38 aa, Artificial Sequence
  Synthetic polypeptide
TITDAELPVTLTVQDLPEHSRIFTYTYGCPEKRQNNLS

SEQ ID NO: 11160 - protein, 38 aa, Artificial Sequence; identical to SEQ ID NO: 11159
  Synthetic polypeptide

SEQ ID NO: 11161 - protein, 38 aa, Artificial Sequence; identical to SEQ ID NO: 11159
  Synthetic polypeptide

SEQ ID NO: 11162 - protein, 107 aa, Artificial Sequence
  Synthetic polypeptide
LSQCKIYRNIPGFLRTLMDALRKDKIIFPNDENVKFLSSPLLILHGEDDRTVPLEYGKKLYEIARNAYRNKERVKMVIFPPGFQHNLLCKSPTLLITVRDFLSKQWS

SEQ ID NO: 11163 - protein, 107 aa, Artificial Sequence; identical to SEQ ID NO: 11162
  Synthetic polypeptide

SEQ ID NO: 11164 - protein, 107 aa, Artificial Sequence; identical to SEQ ID NO: 11162
  Synthetic polypeptide

SEQ ID NO: 11165 - protein, 42 aa, Artificial Sequence
  Synthetic polypeptide
RLTLPDRLGSPLDHHRRRASGNSHSARFTGTFQDFYVHLWMP

SEQ ID NO: 11166 - protein, 42 aa, Artificial Sequence; identical to SEQ ID NO: 11165
  Synthetic polypeptide

SEQ ID NO: 11167 - protein, 42 aa, Artificial Sequence; identical to SEQ ID NO: 11165
  Synthetic polypeptide

SEQ ID NO: 11168 - protein, 60 aa, Artificial Sequence
  Synthetic polypeptide
PPPLPTREQPPLTVIFHYLPKSYKTAPPLSPLADSLCGLSPPAPRFTGTFQDFYVHLWMP

SEQ ID NO: 11169 - protein, 60 aa, Artificial Sequence; identical to SEQ ID NO: 11168
  Synthetic polypeptide

SEQ ID NO: 11170 - protein, 60 aa, Artificial Sequence; identical to SEQ ID NO: 11168
  Synthetic polypeptide

SEQ ID NO: 11171 - protein, 54 aa, Artificial Sequence
  Synthetic polypeptide
FSITFPNPIKRPHPYLPWLTLFADSARLHPDLPEHSRIFTYTYGCPEKRQNNLS

SEQ ID NO: 11172 - protein, 54 aa, Artificial Sequence; identical to SEQ ID NO: 11171
  Synthetic polypeptide

SEQ ID NO: 11173 - protein, 54 aa, Artificial Sequence; identical to SEQ ID NO: 11171
  Synthetic polypeptide

SEQ ID NO: 11174 - protein, 113 aa, Artificial Sequence
  Synthetic polypeptide
LSLRTQPACTQIYRNIPGFLRTLMDALRKDKIIFPNDENVKFLSSPLLILHGEDDRTVPLEYGKKLYEIARNAYRNKERVKMVIFPPGFQHNLLCKSPTLLITVRDFLSKQWS

SEQ ID NO: 11175 - protein, 113 aa, Artificial Sequence; identical to SEQ ID NO: 11174
  Synthetic polypeptide

SEQ ID NO: 11176 - protein, 113 aa, Artificial Sequence; identical to SEQ ID NO: 11174
  Synthetic polypeptide

SEQ ID NO: 11177 - protein, 29 aa, Artificial Sequence
  Synthetic polypeptide
SQHFGRPRRVDHLRFTGTFQDFYVHLWMP

SEQ ID NO: 11178 - protein, 29 aa, Artificial Sequence
  Synthetic polypeptide
SQHFGRPRRVDHLRFTGTFQDFYVHLWMP

SEQ ID NO: 11179 - protein, 29 aa, Artificial Sequence
  Synthetic polypeptide
SQHFGRPRRVDHLRFTGTFQDFYVHLWMP

SEQ ID NO: 11180 - protein, 124 aa, Artificial Sequence
  Synthetic polypeptide
WARWLAPVIPALWEAETGGSPEIYRNIPGFLRTLMDALRKDKIIFPNDENVKFLSSPLLILHGEDDRTVPLEYGKKLYEIARNAYRNKERVKMVIFPPGFQHNLLCKSPTLLITVRDFLSKQWS

SEQ ID NO: 11181 - protein, 124 aa, Artificial Sequence; identical to SEQ ID NO: 11180
  Synthetic polypeptide

SEQ ID NO: 11182 - protein, 124 aa, Artificial Sequence; identical to SEQ ID NO: 11180
  Synthetic polypeptide

SEQ ID NO: 11183 - protein, 19 aa, Artificial Sequence
  Synthetic polypeptide
EPAARSASEPQALGTEECF

SEQ ID NO: 11184 - protein, 22 aa, Artificial Sequence
  Synthetic polypeptide
GASLPGRSHKNRQPDLPVSLRL

SEQ ID NO: 11185 - protein, 53 aa, Artificial Sequence
  Synthetic polypeptide
YLQFSFPAQDRLPLPSLLWLGVATCLALASEVNRSEVHHFLEEAIRTGSQICQ

SEQ ID NO: 11186 - protein, 307 aa, Artificial Sequence
  Synthetic polypeptide
VLHFLATTTYKHLQKWQNVTKAKEDFSEAGNYLKGYVITGIYSEEDVLLLSTKYAASLPALLLARHTEGKIESIPLASTHAQDIVQIITDALLEMFPEITVENLPSYFRLQKPLLILFSDGTVNPQYKKAILTLVKQKYLDSFTPCWLNLKNTPVGRGILRAYFDPLPPLPLLVLVNLHSGGQVFAFPSDQAIIEENLVLWLKKLEAGLENHITILPAQEWKPPLPAYDFLSMIDAATSQRGTRKVPKCMKETDVQENDKEQHEDKSAVRKEPIETLRIKHWNRSNWFKEAEKSFRRDKELGCSKVN

SEQ ID NO: 11187 - protein, 35 aa, Artificial Sequence
  Synthetic polypeptide
RTEYSTFWLQLPTNTYKNGKMLLKQKKILVKQETT

SEQ ID NO: 11188 - protein, 24 aa, Artificial Sequence
  Synthetic polypeptide
GWVQWLTSVIPALWKAEFYCDLWK

SEQ ID NO: 11189 - protein, 24 aa, Artificial Sequence
  Synthetic polypeptide
GWVQWLTSVIPALWKAEFYCDLWK

SEQ ID NO: 11190 - protein, 1111 aa, Artificial Sequence
  Synthetic polypeptide
FQHFGKLSFIVTCGSDGDVRIWEDLDDDDPKFINVGEKAYSCALKSGKLVTAVSNNTIQVHTFPEGVPDGILTRFTTNANHVVFNGDGTKIAAGSSDFLVKIVDVMDSSQQKTFRGHDAPVLSLSFDPKDIFLASASCDGSVRVWQISDQTCAISWPLLQKCNDVINAKSICRLAWQPKSGKLLAIPVEKSVKLYRRESWSHQFDLSDNFISQTLNIVTWSPCGQYLAAGSINGLIIVWNVETKDCMERVKHEKGYAICGLAWHPTCGRISYTDAEGNLGLLENVCDPSGKTSSSKVSSRVEKDYNDLFDGDDMSNAGDFLNDNAVEIPSFSKGIINDDEDDEDLMMASGRPRQRSHILEDDENSVDISMLKTGSSLLKEEEEDGQEGSIHNLPLVTSQRPFYDGPMPTPRQKPFQSGSTPLHLTHRFMVWNSIGIIRCYNDEQDNAIDVEFHDTSIHHATHLSNTLNYTIADLSHEAILLACESTDELASKLHCLHFSSWDSSKEWIIDLPQNEDIEAICLGQGWAAAATSALLLRLFTIGGVQKEVFSLAGPVVSMAGHGEQLFIVYHRGTGFDGDQCLGVQLLELGKKKKQILHGDPLPLTRKSYLAWIGFSAEGTPCYVDSEGIVRMLNRGLGNTWTPICNTREHCKGKSDHYWVVGIHENPQQLRCIPCKGSRFPPTLPRPAVAILSFKLPYCQIATEKGQMEEQFWRSVIFHNHLDYLAKNGYEYEESTKNQATKEQQELLMKMLALSCKLEREFRCVELADLMTQNAVNLAIKYASRSRKLILAQKLSELAVEKAAELTATQVEEEEEEEDFRKKLNAGYSNTATEWSQPRFRNQVEEDAEDSGEADDEEKPEIHKPGQNSFSKSTNSSDVSAKSGAVTFSSQGRVNPFKVSASSKEPAMSMNSARSTNILDNMGKSSKKSTALSRTTNNEKSPIIKPLIPKPKPKQASAASYFQKRNSQTNKTEEVKEENLKNVLSETPAICPPQNTENQRPKTGFQMWLEENRSNILSDNPDFSDEADIIKEGMIRFRVLSTEERKVWANKAKGETASEGTEAKKRKRVVDESDETENQEEKAKENLNLSKKQKPLDFSTNQKLSAFAFKQE

SEQ ID NO: 11191 - protein, 150 aa, Artificial Sequence
  Synthetic polypeptide
FQHFGKLSFIVTCGSDGDVRIWEDLDDDDPKFINVGEKAYSCALKSGKLVTAVSNNTIQVHTFPEGVPDGILTRFTTNANHVVFNGDGTKIAAGSSDFLVKIVDVMDSSQQKTFRGHDAPVLSLSFDPKDIFLASASCDGSVRVWQISDQ

SEQ ID NO: 11192 - protein, 339 aa, Artificial Sequence
  Synthetic polypeptide
KEPGHWRPADSSDLREKNWEAMEALASTEKMLQDKVNKTSKERQQQVEAVELEAKEVLKKLFPKVSVPSNLSYGEWLHGFEKKAKECMAGTSGSEEVKVLEHKLKEADEMHTLLQLECEKYKSVLAETEGILQKLQRSVEQEENKWKVKVDESHKTIKQMQSSFTSSEQELERLRSENKDIENLRREREHLEMELEKAEMERSTYVTEVRELKDLLTELQKKLDDSYSEAVRQNEELNLLKAQLNETLTKLRTEQNERQKVAGDLHKAQQSLELIQSKIVKAAGDTTVIENSDVSPETESSEKETMSVSLNQTVTQLQQLLQAVNQQLTKEKEHYQVLE

SEQ ID NO: 11193 - protein, 339 aa, Artificial Sequence; identical to SEQ ID NO: 11192
  Synthetic polypeptide

SEQ ID NO: 11194 - protein, 339 aa, Artificial Sequence; identical to SEQ ID NO: 11192
  Synthetic polypeptide

SEQ ID NO: 11195 - protein, 339 aa, Artificial Sequence; identical to SEQ ID NO: 11192
  Synthetic polypeptide

SEQ ID NO: 11196 - protein, 36 aa, Artificial Sequence
  Synthetic polypeptide
EKSQDTGGQQIAVTFGRKTGKQWKHWHQLKKCCRTK

SEQ ID NO: 11197 - protein, 36 aa, Artificial Sequence; identical to SEQ ID NO: 11196
  Synthetic polypeptide

SEQ ID NO: 11198 - protein, 36 aa, Artificial Sequence; identical to SEQ ID NO: 11196
  Synthetic polypeptide

SEQ ID NO: 11199 - protein, 36 aa, Artificial Sequence; identical to SEQ ID NO: 11196
  Synthetic polypeptide

SEQ ID NO: 11200 - protein, 36 aa, Artificial Sequence; identical to SEQ ID NO: 11196
  Synthetic polypeptide

SEQ ID NO: 11201 - protein, 36 aa, Artificial Sequence; identical to SEQ ID NO: 11196
  Synthetic polypeptide

SEQ ID NO: 11202 - protein, 36 aa, Artificial Sequence; identical to SEQ ID NO: 11196
  Synthetic polypeptide

SEQ ID NO: 11203 - protein, 36 aa, Artificial Sequence; identical to SEQ ID NO: 11196
  Synthetic polypeptide

SEQ ID NO: 11204 - protein, 311 aa, Artificial Sequence
  Synthetic polypeptide
KEPGHWRPADSSDLREKNWEAMEALASTEKMLQDKVNKTSKERQQQVEAVELEAKEVLKKLFPKVSVPSNLSYGEWLHGFEKKAKECMAGTSGSEEVKVLEHKLKEADEMHTLLQLECEKYKSVLAETEGILQKLQRSVEQEENKWKVKVDESHKTIKQMQSSFTSSEQELERLRSENKDIENLRREREHLEMELEKAEMERSTYVTEVRELKAQLNETLTKLRTEQNERQKVAGDLHKAQQSLELIQSKIVKAAGDTTVIENSDVSPETESSEKETMSVSLNQTVTQLQQLLQAVNQQLTKEKEHYQVLE

SEQ ID NO: 11205 - protein, 311 aa, Artificial Sequence; identical to SEQ ID NO: 11204
  Synthetic polypeptide

SEQ ID NO: 11206 - protein, 311 aa, Artificial Sequence; identical to SEQ ID NO: 11204
  Synthetic polypeptide

SEQ ID NO: 11207 - protein, 311 aa, Artificial Sequence; identical to SEQ ID NO: 11204
  Synthetic polypeptide

SEQ ID NO: 11208 - protein, 43 aa, Artificial Sequence
  Synthetic polypeptide
LKHESEKLDGKIKRQGWLHVWDAGACRGWDSWSLVHLGSPLQH

SEQ ID NO: 11209 - protein, 81 aa, Artificial Sequence
  Synthetic polypeptide
NMRVRSWMEKLKDKAGYMSGMLVPVGVGIAGALFILGALYSIKVMNRRRRNGFKRHKRKQREFNSMQDRVMLLADSSEDEF

SEQ ID NO: 11210 - protein, 28 aa, Artificial Sequence
  Synthetic polypeptide
DKLLTCCIGGTSSRRASCLGVSCCCSSP

SEQ ID NO: 11211 - protein, 28 aa, Artificial Sequence
  Synthetic polypeptide
DKLLTCCIGGTSSRRASCLGVSCCCSSP

SEQ ID NO: 11212 - protein, 28 aa, Artificial Sequence
  Synthetic polypeptide
DKLLTCCIGGTSSRRASCLGVSCCCSSP

SEQ ID NO: 11213 - protein, 21 aa, Artificial Sequence
  Synthetic polypeptide
SVTTSTHHYTGGHSQCSRTSY

SEQ ID NO: 11214 - protein, 21 aa, Artificial Sequence
  Synthetic polypeptide
SVTTSTHHYTGGHSQCSRTSY

SEQ ID NO: 11215 - protein, 21 aa, Artificial Sequence
  Synthetic polypeptide
SVTTSTHHYTGGHSQCSRTSY

SEQ ID NO: 11216 - protein, 238 aa, Artificial Sequence
  Synthetic polypeptide
RTAKNSQPTSYFIVKILSTVFPYFRSKTKNNLLPLLLIIILEVIASAVGQAIDLLYWRDIKQTGIVFGSFLLLLFSLTQFSVVSVVAYLALAALSATISFRIYKSVLQAVQKTDEGHPFKAYLELEITLSQEQIQKYTDCLQFYVNSTLKELRRLFLVQDLVDSLKFAVLMWLLTYVGALFNGLTLLLMAVVSMFTLPVVYVKHQAQIDQYLGLVRTHINAVVAKIQAKIPGAKRHAE

SEQ ID NO: 11217 - protein, 238 aa, Artificial Sequence; identical to SEQ ID NO: 11216
  Synthetic polypeptide

SEQ ID NO: 11218 - protein, 238 aa, Artificial Sequence; identical to SEQ ID NO: 11216
  Synthetic polypeptide

SEQ ID NO: 11219 - protein, 573 aa, Artificial Sequence
  Synthetic polypeptide
KNDRQTILWNWQIFQTLSKKRMNCACYFRENNSTLQRDRIFKHFTRKRQRAMRRRVHQINGHKFMATYLRQPTYCSHCREFIWGVFGKQGYQCQVCTCVVHKRCHHLIVTACTCQNNINKVDSKIAEQRFGINIPHKFSIHNYKVPTFCDHCGSLLWGIMRQGLQCKICKMNVHIRCQANVAPNCGVNAVELAKTLAGMGLQPGNISPTSKLVSRSTLRRQGKESSKEGNGIGVNSSNRLGIDNFEFIRVLGKGSFGKVMLARVKETGDLYAVKVLKKDVILQDDDVECTMTEKRILSLARNHPFLTQLFCCFQTPDRLFFVMEFVNGGDLMFHIQKSRRFDEARARFYAAEIISALMFLHDKGIIYRDLKLDNVLLDHEGHCKLADFGMCKEGICNGVTTATFCGTPDYIAPEILQEMLYGPAVDWWAMGVLLYEMLCGHAPFEAENEDDLFEAILNDEVVYPTWLHEDATGILKSFMTKNPTMRLGSLTQGGEHAILRHPFFKEIDWAQLNHRQIEPPFRPRIKSREDVSNFDPDFIKEEPVLTPIDEGHLPMINQDEFRNFSYVSPELQP

SEQ ID NO: 11220 - protein, 46 aa, Artificial Sequence
  Synthetic polypeptide
TAPVTSGKTTLLSRETGSSNILPGSAKGLCEGESTRSMDTSSWPRI

SEQ ID NO: 11221 - protein, 46 aa, Artificial Sequence; identical to SEQ ID NO: 11220
  Synthetic polypeptide

SEQ ID NO: 11222 - protein, 82 aa, Artificial Sequence
  Synthetic polypeptide
KTNELRLLLQGKQLYSPERPDLQTFYQEAPKGYAKASPPDQWTQVHGHVSEAAHLLLSLQGVYLGSVWETGLSVPSVHLCRP

SEQ ID NO: 11223 - protein, 92 aa, Artificial Sequence
  Synthetic polypeptide
KNDRQTILWNWQIFQTLSKKRMNCACYFRENNSTLQRDRIFKHFTRKRQRAMRRRVHQINGHKFMATYLRQPTYCSHCREFIWGVFGKQGYQ

SEQ ID NO: 11224 - protein, 74 aa, Artificial Sequence
  Synthetic polypeptide
KTNELRLLLQGKQLYSPERPDLQTFYQEAPKGYAKASPPDQWTQVHGHVSEAAHLLLSLQGVYLGSVWETGLSV

SEQ ID NO: 11225 - protein, 121 aa, Artificial Sequence
  Synthetic polypeptide
SMGNKENCQNEEILNSLKYVRPGGGYQPTFTLVQKCEVNGQNEHPVFAYLKDKLPYPYDDPFSLMTDPKLIIWSPVRRSDVAWNFEKFLIGPEGEPFRRYSRTFPTINIEPDIKRLLKVAI

SEQ ID NO: 11226 - protein, 121 aa, Artificial Sequence; identical to SEQ ID NO: 11225
  Synthetic polypeptide

SEQ ID NO: 11227 - protein, 13 aa, Artificial Sequence
  Synthetic polypeptide
AWATKRTVRMRRS

SEQ ID NO: 11228 - protein, 13 aa, Artificial Sequence
  Synthetic polypeptide
AWATKRTVRMRRS

SEQ ID NO: 11229 - protein, 9 aa, Artificial Sequence
  Synthetic polypeptide
HGQQRELSE

SEQ ID NO: 11230 - protein, 9 aa, Artificial Sequence
  Synthetic polypeptide
HGQQRELSE

SEQ ID NO: 11231 - protein, 235 aa, Artificial Sequence
  Synthetic polypeptide
AWAQTIMKARLKGAQTGRNLLKKKSDALTLRFRQILKKIIETKMLMGEVMREAAFSLAEAKFTAGDFSTTVIQNVNKAQVKIRAKKDNVAGVTLPVFEHYHEGTDSYELTGLARGGEQLAKLKRNYAKAVELLVELASLQTSFVTLDEAIKITNRRVNAIEHVIIPRIERTLAYIITELDEREREEFYRLKKIQEKKKILKEKSEKDLEQRRAAGEVLEPANLLAEEKDEDLLFE

SEQ ID NO: 11232 - protein, 235 aa, Artificial Sequence; identical to SEQ ID NO: 11231
  Synthetic polypeptide

SEQ ID NO: 11233 - protein, 26 aa, Artificial Sequence
  Synthetic polypeptide
SQYFGRLKQADHLKSRVRDEPGHRPS

SEQ ID NO: 11234 - protein, 26 aa, Artificial Sequence
  Synthetic polypeptide
SQYFGRLKQADHLKSRVRDEPGHRPS

SEQ ID NO: 11235 - protein, 26 aa, Artificial Sequence
  Synthetic polypeptide
SQYFGRLKQADHLKSRVRDEPGHRPS

SEQ ID NO: 11236 - protein, 26 aa, Artificial Sequence
  Synthetic polypeptide
SQYFGRLKQADHLKSRVRDEPGHRPS

SEQ ID NO: 11237 - protein, 26 aa, Artificial Sequence
  Synthetic polypeptide
SQYFGRLKQADHLKSRVRDEPGHRPS

SEQ ID NO: 11238 - protein, 26 aa, Artificial Sequence
  Synthetic polypeptide
SQYFGRLKQADHLKSRVRDEPGHRPS

SEQ ID NO: 11239 - protein, 31 aa, Artificial Sequence
  Synthetic polypeptide
SQEFEMSLGTDHHEGSFKGSTDRSKPPEEKI

SEQ ID NO: 11240 - protein, 31 aa, Artificial Sequence; identical to SEQ ID NO: 11239
  Synthetic polypeptide

SEQ ID NO: 11241 - protein, 31 aa, Artificial Sequence; identical to SEQ ID NO: 11239
  Synthetic polypeptide

SEQ ID NO: 11242 - protein, 31 aa, Artificial Sequence; identical to SEQ ID NO: 11239
  Synthetic polypeptide

SEQ ID NO: 11243 - protein, 31 aa, Artificial Sequence; identical to SEQ ID NO: 11239
  Synthetic polypeptide

SEQ ID NO: 11244 - protein, 31 aa, Artificial Sequence; identical to SEQ ID NO: 11239
  Synthetic polypeptide

SEQ ID NO: 11245 - protein, 136 aa, Artificial Sequence
  Synthetic polypeptide
AWAQTIMKARLKGAQTGRNLLKKKSDALTLRFRQILKKIIETSFVTLDEAIKITNRRVNAIEHVIIPRIERTLAYIITELDEREREEFYRLKKIQEKKKILKEKSEKDLEQRRAAGEVLEPANLLAEEKDEDLLFE

SEQ ID NO: 11246 - protein, 167 aa, Artificial Sequence
  Synthetic polypeptide
AWAQTIMKARLKGAQTGRNLLKKKSDALTLRFRQILKKIIETKMLMGEVMREAAFSLAEAKFTAGDFSTTVIQNVNKAQVKIRAKKDNVAGVTLPVFEHYHEGTDSYELTGLARGGEQLAKLKRNYAKAVELLVELASLQSSFPGLNVLLLISSQSWMRESEKSSIG

SEQ ID NO: 11247 - protein, 74 aa, Artificial Sequence
  Synthetic polypeptide
AWAQTIMKARLKGAQTGRNLLKKKSDALTLRFRQILKKIIETKMLMGEVMREAAFSLAEAKFTAGDFRCYFASI

SEQ ID NO: 11248 - protein, 60 aa, Artificial Sequence
  Synthetic polypeptide
AWAQTIMKARLKGAQTGRNLLKKKSDALTLRFRQILKKIIETKMLMGEVMREAAFSLAEA

SEQ ID NO: 11249 - protein, 10 aa, Artificial Sequence
  Synthetic polypeptide
RGCHRSSSLS

SEQ ID NO: 11250 - protein, 10 aa, Artificial Sequence
  Synthetic polypeptide
RGCHRSSSLS

SEQ ID NO: 11251 - protein, 10 aa, Artificial Sequence
  Synthetic polypeptide
RGCHRSSSLS

SEQ ID NO: 11252 - protein, 8 aa, Artificial Sequence
  Synthetic polypeptide
GAVIGAPH

SEQ ID NO: 11253 - protein, 8 aa, Artificial Sequence
  Synthetic polypeptide
GAVIGAPH

SEQ ID NO: 11254 - protein, 8 aa, Artificial Sequence
  Synthetic polypeptide
GAVIGAPH

SEQ ID NO: 11255 - protein, 285 aa, Artificial Sequence
  Synthetic polypeptide
ELLIKLKTQTSTEYFLEACSREERDAWAFEITGAIHAGQPGKVQQLHSLRNSFKLPPHISLHRIVDKMHDSNTGIRSSPNMEQGSTYKKTFLGSSLVDWLISNSFTASRLEAVTLASMLMEENFLRPVGVRSMGAIRSGDLAEQFLDDSTALYTFAESYKKKISPKEEISLSTVELSGTVVKQGYLAKQGHKRKNWKVRRFVLRKDPAFLHYYDPSKEENRPVGGFSLRGSLVSALEDNGVPTGVKGNVQGNLFKVITKDDTHYYIQASSKAERAEWIEAIKKLT

SEQ ID NO: 11256 - protein, 75 aa, Artificial Sequence
  Synthetic polypeptide
ELLIKLKTQTSTEYFLEACSREERDAWAFEITGAIHAGQPGKVQQLHSLRNSFKLPPHISLQDTRGKTGRCVALF

SEQ ID NO: 11257 - protein, 202 aa, Artificial Sequence
  Synthetic polypeptide
ELLIKLKTQTSTEYFLEACSREERDAWAFEITGAIHAGQPGKVQQLHSLRNSFKLPPHISLHRIVDKMHDSNTGIRSSPNMEQGSTYKKTFLGSSLVDWLISNSFTASRLEAVTLASMLMEENFLRPVGVRSMGAIRSGDLAEQFLDDSTALYTFGHKRKNWKVRRFVLRKDPAFLHYYDPSKEENRPVGGFSLRGSLVSAL

SEQ ID NO: 11258 - protein, 35 aa, Artificial Sequence
  Synthetic polypeptide
NPVSTKNTKISWAWWRMGKCCPVGCVHQLFSFLGK

SEQ ID NO: 11259 - protein, 35 aa, Artificial Sequence; identical to SEQ ID NO: 11258
  Synthetic polypeptide

SEQ ID NO: 11260 - protein, 35 aa, Artificial Sequence; identical to SEQ ID NO: 11258
  Synthetic polypeptide

SEQ ID NO: 11261 - protein, 35 aa, Artificial Sequence; identical to SEQ ID NO: 11258
  Synthetic polypeptide

SEQ ID NO: 11262 - protein, 35 aa, Artificial Sequence; identical to SEQ ID NO: 11258
  Synthetic polypeptide

SEQ ID NO: 11263 - protein, 67 aa, Artificial Sequence
  Synthetic polypeptide
SQHFGRLRWADHLRSGVRDHPGQRGETLSLLKIQKLAGRGGAWENAVQWGVYINCSASWESSCGHRS

SEQ ID NO: 11264 - protein, 67 aa, Artificial Sequence; identical to SEQ ID NO: 11263
  Synthetic polypeptide

SEQ ID NO: 11265 - protein, 67 aa, Artificial Sequence; identical to SEQ ID NO: 11263
  Synthetic polypeptide

SEQ ID NO: 11266 - protein, 67 aa, Artificial Sequence; identical to SEQ ID NO: 11263
  Synthetic polypeptide

SEQ ID NO: 11267 - protein, 67 aa, Artificial Sequence; identical to SEQ ID NO: 11263
  Synthetic polypeptide

SEQ ID NO: 11268 - protein, 300 aa, Artificial Sequence
  Synthetic polypeptide
LGVVAHGKMLSSGVCTSTVQLPGKVVVVTGANTGIGKETAKELAQRGARVYLACRDVEKGELVAKEIQTTTGNQQVLVRKLDLSDTKSIRAFAKGFLAEEKHLHVLINNAGVMMCPYSKTADGFEMHIGVNHLGHFLLTHLLLEKLKESAPSRIVNVSSLAHHLGRIHFHNLQGEKFYNAGLAYCHSKLANILFTQELARRLKGSGVTTYSVHPGTVQSELVRHSSFMRWMWWLFSFFIKTPQQGAQTSLHCALTEGLEILSGNHFSDCHVAWVSAQARNETIARRLWDVSCDLLGLPID

SEQ ID NO: 11269 - protein, 287 aa, Artificial Sequence
  Synthetic polypeptide
LGVVAHGKMLSSGVCTSTVQLPGKVVVVTGANTGARVYLACRDVEKGELVAKEIQTTTGNQQVLVRKLDLSDTKSIRAFAKGFLAEEKHLHVLINNAGVMMCPYSKTADGFEMHIGVNHLGHFLLTHLLLEKLKESAPSRIVNVSSLAHHLGRIHFHNLQGEKFYNAGLAYCHSKLANILFTQELARRLKGSGVTTYSVHPGTVQSELVRHSSFMRWMWWLFSFFIKTPQQGAQTSLHCALTEGLEILSGNHFSDCHVAWVSAQARNETIARRLWDVSCDLLGLPID

SEQ ID NO: 11270 - protein, 230 aa, Artificial Sequence
  Synthetic polypeptide
LGVVAHGKMLSSGVCTSTVQLPGKVVVVTGANTGIGKETAKELAQRGARVYLACRDVEKGELVAKEIQTTTGNQQVLVRKLDLSDTKSIRAFAKGFLAEEKHLHVLINNAGVMMCPYSKTADGFEMHIGVNHLGSGVTTYSVHPGTVQSELVRHSSFMRWMWWLFSFFIKTPQQGAQTSLHCALTEGLEILSGNHFSDCHVAWVSAQARNETIARRLWDVSCDLLGLPID

SEQ ID NO: 11271 - protein, 160 aa, Artificial Sequence
  Synthetic polypeptide
LGVVAHGKMLSSGVCTSTVQLPGKVVVVTGANTGIGKETAKELAQRGHFLLTHLLLEKLKESAPSRIVNVSSLAHHLGRIHFHNLQGEKFYNAGLAYCHSKLANILFTQELARRLKGSGVTTYSVHPGTVQSELVRHSSFMRWMWWLFSFFIKTPQQGAQ

SEQ ID NO: 11272 - protein, 168 aa, Artificial Sequence
  Synthetic polypeptide
LGVVAHGKMLSSGVCTSTVQLPGKVVVVTGANTGIGKETAKELAQREEKHLHVLINNAGVMMCPYSKTADGFEMHIGVNHLGHFLLTHLLLEKLKESAPSRIVNVSSLAHHLGRIHFHNLQGEKFYNAGLAYCHSKLANILFTQELARRLKGSGVTTYSVHPGTVQSE

SEQ ID NO: 11273 - protein, 202 aa, Artificial Sequence
  Synthetic polypeptide
KCIALSAFALSPVLPCEDVQASPSPPATVVILTNQITTHLSGALASQADLVSPADDLSLSEGTSGSSCVIAALGNTWSHSVNTRLILQYLDSERRQILIAKSPLAPFTSFVYTIKEEGLVLQVVRTVARVSPRSECWSAADSHPSPTFLIPDVVLRKTRNPRLLPSVSMCPPQMHSTVLSSALPPTNWATGIRTETLDEHPV

SEQ ID NO: 11274 - protein, 28 aa, Artificial Sequence
  Synthetic polypeptide
PFPPLLSLLFCHVKMCRHPLRLLPQLLS

SEQ ID NO: 11275 - protein, 28 aa, Artificial Sequence
  Synthetic polypeptide
PFPPLLSLLFCHVKMCRHPLRLLPQLLS

SEQ ID NO: 11276 - protein, 28 aa, Artificial Sequence
  Synthetic polypeptide
PFPPLLSLLFCHVKMCRHPLRLLPQLLS

SEQ ID NO: 11277 - protein, 28 aa, Artificial Sequence
  Synthetic polypeptide
PFPPLLSLLFCHVKMCRHPLRLLPQLLS

SEQ ID NO: 11278 - protein, 28 aa, Artificial Sequence
  Synthetic polypeptide
PFPPLLSLLFCHVKMCRHPLRLLPQLLS

SEQ ID NO: 11279 - protein, 37 aa, Artificial Sequence
  Synthetic polypeptide
RCAGIPFASCHSCYLDESDYNPSEWSPGFSGRPGVSS

SEQ ID NO: 11280 - protein, 37 aa, Artificial Sequence; identical to SEQ ID NO: 11279
  Synthetic polypeptide

SEQ ID NO: 11281 - protein, 37 aa, Artificial Sequence; identical to SEQ ID NO: 11279
  Synthetic polypeptide

SEQ ID NO: 11282 - protein, 37 aa, Artificial Sequence; identical to SEQ ID NO: 11279
  Synthetic polypeptide

SEQ ID NO: 11283 - protein, 37 aa, Artificial Sequence; identical to SEQ ID NO: 11279
  Synthetic polypeptide

SEQ ID NO: 11284 - protein, 127 aa, Artificial Sequence
  Synthetic polypeptide
KCIALSAFALSPVLPCEDVQASPSPPATVVILTNQITTHLSGALASQADLVSPADDLSLSEGTSGSSCVIAALGNTWSHSVNTRLILQYLDSERRQILIAKSPLAPFTSFVYTIKEEGLVLQGQEKP

SEQ ID NO: 11285 - protein, 161 aa, Artificial Sequence
  Synthetic polypeptide
KCIALSAFALSPVLPCEDVQASPSPPATVVILTNQITTHLSGALASQADLVSPADDLSLSEGTSGSSCVIAALGNTWSHSVNTRLILQYLDSERRQILIAKSPLAPFTSFVYTIKEEGLVLQETTFCSVTQAELNWAPEILPPQPPEQLGLQMCHHTQLIF

SEQ ID NO: 11286 - protein, 143 aa, Artificial Sequence
  Synthetic polypeptide
KCIALSAFALSPVLPCEDVQASPSPPATVVILTNQITTHLSGALASQADLVSPADDLSLSEGTSGSSCVIAALGNTWSHSVNTRLILQYLDSERRQILIAKSPLAPFTSFVYTIKEEGLVLQEFWHICISGFSIQNRLKENES

SEQ ID NO: 11287 - protein, 143 aa, Artificial Sequence; identical to SEQ ID NO: 11286
  Synthetic polypeptide

SEQ ID NO: 11288 - protein, 86 aa, Artificial Sequence
  Synthetic polypeptide
EEEHMVSGHTLSRSRYVTYWAFNLKILSHVFFFHYKIVLGDIKFMSLKIQRLFTELIPRHTSLITKTGLKRRSTCSFVGRPNRLGN

SEQ ID NO: 11289 - protein, 13 aa, Artificial Sequence
  Synthetic polypeptide
SSCHLKFNDCLPS

SEQ ID NO: 11290 - protein, 38 aa, Artificial Sequence
  Synthetic polypeptide
NSTTVYRADTQTYQPYNKDWIKEKIYVLLRRQAQQAGK

SEQ ID NO: 11291 - protein, 16 aa, Artificial Sequence
  Synthetic polypeptide
SPEVRSSRSAWPTWCL

SEQ ID NO: 11292 - protein, 16 aa, Artificial Sequence
  Synthetic polypeptide
SPEVRSSRSAWPTWCL

SEQ ID NO: 11293 - protein, 98 aa, Artificial Sequence
  Synthetic polypeptide
SQPFGRLRHADHLRSGVQDQPGQHGVCKMYEEHLKRMNPNSPSITYDISQLFDFIDDLADLSCLVYRADTQTYQPYNKDWIKEKIYVLLRRQAQQAGK

SEQ ID NO: 11294 - protein, 20 aa, Artificial Sequence
  Synthetic polypeptide
GQEFKISLANMVFVKCMKNI

SEQ ID NO: 11295 - protein, 20 aa, Artificial Sequence
  Synthetic polypeptide
GQEFKISLANMVFVKCMKNI

SEQ ID NO: 11296 - protein, 65 aa, Artificial Sequence
  Synthetic polypeptide
SQPFGRLRHADHLRSGVQDQPGQHGVCKMYEEHLKRMNPNSPSITYDISQLFDFIDDLADLSCLV

SEQ ID NO: 11297 - protein, 125 aa, Artificial Sequence
  Synthetic polypeptide
QARWLTPVIPALWEAEAGRSPESHTILLVQPTKRPEGRTYADYESVNECMEGVCKMYEEHLKRMNPNSPSITYDISQLFDFIDDLADLSCLVYRADTQTYQPYNKDWIKEKIYVLLRRQAQQAGK

SEQ ID NO: 11298 - protein, 37 aa, Artificial Sequence
  Synthetic polypeptide
SQHFGRPRQADHLSLTPFCWYSLPRGQKAELMLTTNL

SEQ ID NO: 11299 - protein, 37 aa, Artificial Sequence; identical to SEQ ID NO: 11298
  Synthetic polypeptide

SEQ ID NO: 11300 - protein, 92 aa, Artificial Sequence
  Synthetic polypeptide
QARWLTPVIPALWEAEAGRSPESHTILLVQPTKRPEGRTYADYESVNECMEGVCKMYEEHLKRMNPNSPSITYDISQLFDFIDDLADLSCLV

SEQ ID NO: 11301 - protein, 45 aa, Artificial Sequence
  Synthetic polypeptide
SAAPGAGHLGTKLSPHPSGAVPYLHWVLLVCHPGWEAHQWLFCAE

SEQ ID NO: 11302 - protein, 45 aa, Artificial Sequence; identical to SEQ ID NO: 11301
  Synthetic polypeptide

SEQ ID NO: 11303 - protein, 335 aa, Artificial Sequence
  Synthetic polypeptide
RQSGGLVRVLLLEPDTWARSSAPTPQVQCHTYTGYCWCVTPDGKPISGSSVQNKTPVCSGSVTDKPLSQGNSGRKDDGSKPTPTMETQPVFDGDEITAPTLWIKHLVIKDSKLNNTNIRNSEKVYSCDQERQSALEEAQQNPREGIVIPECAPGGLYKPVQCHQSTGYCWCVLVDTGRPLPGTSTRYVMPSCESDARAKTTEADDPFKDRELPGCPEGKKMEFITSLLDALTTDMVQAINSAAPTGGGRFSEPDPSHTLEERVVHWYFSQLDSNSSNDINKREMKPFKRYVKKKAKPKKCARRFTDYCDLNKDKVISLPELKGCLGVSKEVGRLV

SEQ ID NO: 11304 - protein, 66 aa, Artificial Sequence
  Synthetic polypeptide
GSLVVWLECCSWSRTPGHEAQPPPLRCSAILTLGTAGVSPRMGSPSVALLCRIKLLYVQVQSPTSP

SEQ ID NO: 11305 - protein, 66 aa, Artificial Sequence; identical to SEQ ID NO: 11304
  Synthetic polypeptide

SEQ ID NO: 11306 - protein, 334 aa, Artificial Sequence
  Synthetic polypeptide
RQSGGLVRVLLLEPDTWARSSAPTPQVQCHTYTGYCWCVTPDGKPISGSSVQNKTPVCSGSVTDKPLSQGNSGRKDDGSKPTPTMETQPVFDGDEITAPTLWIKHLVIKDSKLNNTNIRNSEKVYSCDQERQSALEEAQQNPREGIVIPECAPGGLYKPVQCHQSTGYCWCVLVDTGRPLPGTSTRYVMPSCESDARAKTTEADDPFKDRELPGCPEGKKMEFITSLLDALTTDMVQAINSAAPTGGGRFSEPDPSHTLEERVVHWYFSQLDSNSSNDINKREMKPFKRYVKKKAKPKKCARRFTDYCDLNKDKVISLPELKGCLGVSKEGRLV

SEQ ID NO: 11307 - protein, 77 aa, Artificial Sequence
  Synthetic polypeptide
APARVLFLFLERKSIRVTRRGRVPWKRPSRIPVRVLSSLNVPLGDSISQCNATSPLATAGVCWWTQGARCLGPPHAT

SEQ ID NO: 11308 - protein, 77 aa, Artificial Sequence; identical to SEQ ID NO: 11307
  Synthetic polypeptide

SEQ ID NO: 11309 - protein, 16 aa, Artificial Sequence
  Synthetic polypeptide
HQQGFCFCFWRESLFV

SEQ ID NO: 11310 - protein, 16 aa, Artificial Sequence
  Synthetic polypeptide
HQQGFCFCFWRESLFV

SEQ ID NO: 11311 - protein, 224 aa, Artificial Sequence
  Synthetic polypeptide
TSKGSVSVSGEKVYSCDQERQSALEEAQQNPREGIVIPECAPGGLYKPVQCHQSTGYCWCVLVDTGRPLPGTSTRYVMPSCESDARAKTTEADDPFKDRELPGCPEGKKMEFITSLLDALTTDMVQAINSAAPTGGGRFSEPDPSHTLEERVVHWYFSQLDSNSSNDINKREMKPFKRYVKKKAKPKKCARRFTDYCDLNKDKVISLPELKGCLGVSKEVGRLV

SEQ ID NO: 11312 - protein, 223 aa, Artificial Sequence
  Synthetic polypeptide
TSKGSVSVSGEKVYSCDQERQSALEEAQQNPREGIVIPECAPGGLYKPVQCHQSTGYCWCVLVDTGRPLPGTSTRYVMPSCESDARAKTTEADDPFKDRELPGCPEGKKMEFITSLLDALTTDMVQAINSAAPTGGGRFSEPDPSHTLEERVVHWYFSQLDSNSSNDINKREMKPFKRYVKKKAKPKKCARRFTDYCDLNKDKVISLPELKGCLGVSKEGRLV

SEQ ID NO: 11313 - protein, 25 aa, Artificial Sequence
  Synthetic polypeptide
FWRQLARSEFALPHGSCAILVGRLV

SEQ ID NO: 11314 - protein, 19 aa, Artificial Sequence
  Synthetic polypeptide
VGICFAAWKLCHPGRTPRL

SEQ ID NO: 11315 - protein, 24 aa, Artificial Sequence
  Synthetic polypeptide
FWRQLARSEFALPHGSCAILGRLV

SEQ ID NO: 11316 - protein, 24 aa, Artificial Sequence
  Synthetic polypeptide
FWRQLARSEFALPHGSCAILGRLV

SEQ ID NO: 11317 - protein, 19 aa, Artificial Sequence
  Synthetic polypeptide
LGRNLLCRMEAVPSWDASS

SEQ ID NO: 11318 - protein, 19 aa, Artificial Sequence
  Synthetic polypeptide
LGRNLLCRMEAVPSWDASS

SEQ ID NO: 11319 - protein, 18 aa, Artificial Sequence
  Synthetic polypeptide
VGICFAAWKLCHPGTPRL

SEQ ID NO: 11320 - protein, 18 aa, Artificial Sequence
  Synthetic polypeptide
VGICFAAWKLCHPGTPRL

SEQ ID NO: 11321 - protein, 14 aa, Artificial Sequence
  Synthetic polypeptide
SQHFVRLRQVDHLR

SEQ ID NO: 11322 - protein, 14 aa, Artificial Sequence
  Synthetic polypeptide
SQHFVRLRQVDHLR

SEQ ID NO: 11323 - protein, 14 aa, Artificial Sequence
  Synthetic polypeptide
SQHFVRLRQVDHLR

SEQ ID NO: 11324 - protein, 14 aa, Artificial Sequence
  Synthetic polypeptide
SQHFVRLRQVDHLR

SEQ ID NO: 11325 - protein, 14 aa, Artificial Sequence
  Synthetic polypeptide
SQHFVRLRQVDHLR

SEQ ID NO: 11326 - protein, 14 aa, Artificial Sequence
  Synthetic polypeptide
SQHFVRLRQVDHLR

SEQ ID NO: 11327 - protein, 14 aa, Artificial Sequence
  Synthetic polypeptide
SQHFVRLRQVDHLR

SEQ ID NO: 11328 - protein, 14 aa, Artificial Sequence
  Synthetic polypeptide
SQHFVRLRQVDHLR

SEQ ID NO: 11329 - protein, 14 aa, Artificial Sequence
  Synthetic polypeptide
SQHFVRLRQVDHLR

SEQ ID NO: 11330 - protein, 14 aa, Artificial Sequence
  Synthetic polypeptide
SQHFVRLRQVDHLR

SEQ ID NO: 11331 - protein, 14 aa, Artificial Sequence
  Synthetic polypeptide
SQHFVRLRQVDHLR

SEQ ID NO: 11332 - protein, 14 aa, Artificial Sequence
  Synthetic polypeptide
SQHFVRLRQVDHLR

SEQ ID NO: 11333 - protein, 14 aa, Artificial Sequence
  Synthetic polypeptide
SQHFVRLRQVDHLR

SEQ ID NO: 11334 - protein, 247 aa, Artificial Sequence
  Synthetic polypeptide
ARWPTPVIPALCEAEAGGSSEITFLNAQIDRHCLKMSKVAESLIAYTEQYVEYDPLITPAEPSNPWISDDVALWDIEMSKEPSQQRVKRWGFSFDEILKDQVGRDQFLRFLESEFSSENLRFWLAVQDLKKQPLQDVAKRVEEIWQEFLAPGAPSAINLDSHSYEITSQNVKDGGRYTFEDAQEHIYKLMKSDSYARFLRSNAYQDLLLAKKKPESEQGRRTSLEKFTRSVGKSLAGKRLTGLMQSS

SEQ ID NO: 11335 - protein, 247 aa, Artificial Sequence; identical to SEQ ID NO: 11334
  Synthetic polypeptide

SEQ ID NO: 11336 - protein, 229 aa, Artificial Sequence
  Synthetic polypeptide
ARWPTPVIPALCEAEAGGSSEITFLNAQIDRHCLKMSKVAESLIAYTEQYVEYDPLITPAEPSNPWISDDVALWDIEMSKEPSQQRVKRWGFSFDEILKDQVGRDQFLRFLESEFSSENLRFWLAVQDLKKQPLQDVAKRVEEIWQEFLAPGAPSAINLDSHSYEITSQNVKDGGRYTFEDAQEHIYKLMKSDSYARFLRSNAYQDLLLAKKKGKSLAGKRLTGLMQSS

SEQ ID NO: 11337 - protein, 229 aa, Artificial Sequence; identical to SEQ ID NO: 11336
  Synthetic polypeptide

SEQ ID NO: 11338 - protein, 229 aa, Artificial Sequence; identical to SEQ ID NO: 11336
  Synthetic polypeptide

SEQ ID NO: 11339 - protein, 222 aa, Artificial Sequence
  Synthetic polypeptide
ARWPTPVIPALCEAEAGGSSEITFLNAQIDRHCLKMSKVAESLIAYTEQYVEYDPLITPAEPSNPWISDDVALWDIEMSKEPSQQRVKRWGFSFDEILKDQVGRDQFLRFLESEFSSENLRFWLAVQDLKKQPLQDVAKRVEEIWQEFLAPGAPSAINLDSHSYEITSQNVKDGGRYTFEDAQEHIYKLMKSDSYARFLRSNAYQDLLLAKKKKVSKVVELP

SEQ ID NO: 11340 - protein, 217 aa, Artificial Sequence
  Synthetic polypeptide
ARWPTPVIPALCEAEAGGSSEITFLNAQIDRHCLKMSKVAESLIAYTEQYVEYDPLITPAEPSNPWISDDVALWDIEMSKEPSQQRVKRWGFSFDEILKDQVGRDQFLRFLESEFSSENLRFWLAVQDLKKQPLQDVAKRVEEIWQEFLAPGAPSAINLDSHSYEITSQNVKDGGRYTFEDAQEHIYKLMKSDSYARFLRSNAYQDLLLAKKKVWLL

SEQ ID NO: 11341 - protein, 237 aa, Artificial Sequence
  Synthetic polypeptide
ARWPTPVIPALCEAEAGGSSEITFLNAQIDRHCLKMSKVAESLIAYTEQYVEYDPLITPAEPSNPWISDDVALWDIEMSKEPSQQRVKRWGFSFDEILKDQVGRDQFLRFLESEFSSENLRFWLAVQDLKKQPLQDVAKRVEEIWQEFLAPGAPSAINLDSHSYEITSQNVKDGGRYTFEDAQEHIYKLMKSDSYARFLRSNAYQDLLLAKKKPESEQGRRTSLEKFTRSVCLQLLF

SEQ ID NO: 11342 - protein, 232 aa, Artificial Sequence
  Synthetic polypeptide
ARWPTPVIPALCEAEAGGSSEITFLNAQIDRHCLKMSKVAESLIAYTEQYVEYDPLITPAEPSNPWISDDVALWDIEMSKEPSQQRVKRWGFSFDEILKDQVGRDQFLRFLESEFSSENLRFWLAVQDLKKQPLQDVAKRVEEIWQEFLAPGAPSAINLDSHSYEITSQNVKDGGRYTFEDAQEHIYKLMKSDSYARFLRSNAYQDLLLAKKKPESEQGRRTSLEKFTRSVG

SEQ ID NO: 11343 - protein, 234 aa, Artificial Sequence
  Synthetic polypeptide
ARWPTPVIPALCEAEAGGSSEITFLNAQIDRHCLKMSKVAESLIAYTEQYVEYDPLITPAEPSNPWISDDVALWDIEMSKEPSQQRVKRWGFSFDEILKDQVGRDQFLRFLESEFSSENLRFWLAVQDLKKQPLQDVAKRVEEIWQEFLAPGAPSAINLDSHSYEITSQNVKDGGRYTFEDAQEHIYKLMKSDSYARFLRSNAYQDLLLAKKKPESEQGRRTSLEKFTRSVLLF

SEQ ID NO: 11344 - protein, 210 aa, Artificial Sequence
  Synthetic polypeptide
ARWPTPVIPALCEAEAGGSSEITFLNAQIDRHCLKMSKVAESKEPSQQRVKRWGFSFDEILKDQVGRDQFLRFLESEFSSENLRFWLAVQDLKKQPLQDVAKRVEEIWQEFLAPGAPSAINLDSHSYEITSQNVKDGGRYTFEDAQEHIYKLMKSDSYARFLRSNAYQDLLLAKKKPESEQGRRTSLEKFTRSVGKSLAGKRLTGLMQSS

SEQ ID NO: 11345 - protein, 365 aa, Artificial Sequence
  Synthetic polypeptide
ARWPTPVIPALCEAEAGGSSEITFLNAQIDRHCLKMSKVAESLIAYTEQYVEYDPLITPAEPSNPWISDDVALWDIEMSKEPSQQRVKRWGFSFDEILKDQVGRDQFLRFLESEFSSENLRFWLAVQDLKKQPLQDVAKRVEEIWQEFLAPGAPSAINLDSHSYEITSQNVKDGGRYTFEDAQEHIYKLMKSDSYARFLRSNAYQDLLLAKKKPESEQGRRTSLEKFTRSVNVQNTRPAGAWSIFMAALPMAVWLRTPRSCHGLSESRLLGLPSLHDGLREGQSLPQSCPGSSSTAAEGARERASNGRSLARRQHCQCHGQGEETQLCLWSRLESSKRSQRASSLRTSKAKKKRQTVKQGPKAWP

SEQ ID NO: 11346 - protein, 242 aa, Artificial Sequence
  Synthetic polypeptide
ARWPTPVIPALCEAEAGGSSEITFLNAQIDRHCLKMSKVAESLIAYTEQYVEYDPLITPAEPSNPWISDDVALWDIEMSKEPSQQRVKRWGFSFDEILKDQVGRDQFLRFLESEFSSENLRFWLAVQDLKKQPLQDVAKRVEEIWQEFLAPGAPSAINLDSHSYEITSQNVKDGGRYTFEDAQEHIYKLMKSDSYARFLRSNAYQDLLLAKKKPESEQGRRTSLEKFTRSVLYSNTPLAKRP

SEQ ID NO: 11347 - protein, 19 aa, Artificial Sequence
  Synthetic polypeptide
LGCSLMRDPEPEPLSQGLI

SEQ ID NO: 11348 - protein, 19 aa, Artificial Sequence
  Synthetic polypeptide
LGCSLMRDPEPEPLSQGLI

SEQ ID NO: 11349 - protein, 114 aa, Artificial Sequence
  Synthetic polypeptide
EILSQNHSAKDSSDDVRRVQRREKNRIAAQKSRQRQTQKADTLHLESEDLEKQNAALRKEIKQLTEELKYFTSVLNSHEPLCSVLAASTPSPPEVVYSAHAFHQPHVSSPRFQP

SEQ ID NO: 11350 - protein, 12 aa, Artificial Sequence
  Synthetic polypeptide
ARTTQPRTHLMM

SEQ ID NO: 11351 - protein, 12 aa, Artificial Sequence
  Synthetic polypeptide
ARTTQPRTHLMM

SEQ ID NO: 11352 - protein, 62 aa, Artificial Sequence
  Synthetic polypeptide
EILSQNHSAKDSSDDVRRVQRREKNRIAAQKSRQRQTQKSIKKDAQVPWHRARRAGNGYFSK

SEQ ID NO: 11353 - protein, 102 aa, Artificial Sequence
  Synthetic polypeptide
ETSTNTVNGLQARTFGIWTLLSSVIRCLCAIDIHNKTLYHITLWTFLLALGHFLSELFVYGTAAPTIGVLAPLMVASFSILGMLVGLRYLEVEPVSRQKKRN

SEQ ID NO: 11354 - protein, 43 aa, Artificial Sequence
  Synthetic polypeptide
WFPNQAVHQSNLGNVNKHSEWPPSSDLWDLDAALISDSLPLCH

SEQ ID NO: 11355 - protein, 54 aa, Artificial Sequence
  Synthetic polypeptide
VLTSCPRRTLSLCRAGLCISHRFTSPTACPPWSASPSASRPTSQGTTSATSCWG

SEQ ID NO: 11356 - protein, 123 aa, Artificial Sequence
  Synthetic polypeptide
ASAGPGCAFLIALPHQQHAHPGALPHQLQDLLLRELLPPHRAGGELRGPLRCAGHESARGPDVQAARLPHAQRARAGLRGRLRPLLARAQEGEAGPERVTRPAQRGADRVEALGAGRGAPGPR

SEQ ID NO: 11357 - protein, 210 aa, Artificial Sequence
  Synthetic polypeptide
SHVLSSPHSEPLQGRAVHFSSLYLTNSMPTLERFPISFKTYFSGNYFRHIVLGVNFAGRYGALGMSRREDLMYKPPAFRTLSELVLDFEAAYGRCWHVLKKVKLGQSVSHDPHSVEQIEWKHSVLDVERLGRDDFRKELERHARDMRLKIGKGTGPPSPTKDRKKDVSSPQRAQSSPHRRNSRSERRPSGDKKTSEPKAMPDLNGYQIRV

SEQ ID NO: 11358 - protein, 367 aa, Artificial Sequence
  Synthetic polypeptide
EDQLRPGVRDQSEQHGNLDKHEELEELVARFLGVEAAMAYGMGFATNSMNIPALVGKGCLILSDELNHASLVLGARLSGATIRIFKHNNMQSLEKLLKDAIVYGQPRTRRPWKKILILVEGIYSMEGSIVRLPEVIALKKKYKAYLYLDEAHSIGALGPTGRGVVEYFGLDPEDVDVMMGTFTKSFGASGGYIGGKKELIDYLRTHSHSAVYATSLSPPVVEQIITSMKCIMGQDGTSLGKECVQQLAENTRYFRRRLKEMGFIIYGNEDSPVVPLMLYMPAKIGAFGREMLKRNIGVVVVGFPATPIIESRARFCLSAAHTKEILDTALKEIDEVGDLLQLKYSRHRLVPLLDRPFDETTYEETED

SEQ ID NO: 11359 - protein, 19 aa, Artificial Sequence
  Synthetic polypeptide
GQEFETSLSNMETWTSMKN

SEQ ID NO: 11360 - protein, 19 aa, Artificial Sequence
  Synthetic polypeptide
GQEFETSLSNMETWTSMKN

SEQ ID NO: 11361 - protein, 8 aa, Artificial Sequence
  Synthetic polypeptide
ATWKPGQA

SEQ ID NO: 11362 - protein, 8 aa, Artificial Sequence
  Synthetic polypeptide
ATWKPGQA

SEQ ID NO: 11363 - protein, 275 aa, Artificial Sequence
  Synthetic polypeptide
EDQLRPGVRDQSEQHGNLDKHEELEELVARFLGVEAAMAYGMGFATNSMNIPALVGKGCLILSDELNHASLVLGARLSGATIRIFKHNNMQSLEKLLKDAIVYGQPRTRRPWKKILILVEGIYSMEGSIVRLPEVIALKKKYKAYLYLDEAHSIGALGPTGRGVVEYFGLDPEDVDVMMGTFTKSFGASGGYIGGKKELIDYLRTHSHSAVYATSLSPPVVEQIITSMKCIMGQDGTSLGNGITIHEVVQTRNTYHRFSPLSPVFSHQCLWIMLP

SEQ ID NO: 11364 - protein, 662 aa, Artificial Sequence
  Synthetic polypeptide
STKLEIRNTRNLTYIDPDALKELPLLKFLGIFNTGLKMFPDLTKVYSTDIFFILEITDNPYMTSIPVNAFQGLCNETLTLKLYNNGFTSVQGYAFNGTKLDAVYLNKNKYLTVIDKDAFGGVYSGPSLLDVSQTSVTALPSKGLEHLKELIARNTWTLKKLPLSLSFLHLTRADLSYPSHCCAFKNQKKIRGILESLMCNESSMQSLRQRKSVNALNSPLHQEYEENLGDSIVGYKEKSKFQDTHNNAHYYVFFEEQEDEIIGFGQELKNPQEETLQAFDSHYDYTICGDSEDMVCTPKSDEFNPCEDIMGYKFLRIVVWFVSLLALLGNVFVLLILLTSHYKLNVPRFLMCNLAFADFCMGMYLLLIASVDLYTHSEYYNHAIDWQTGPGCNTAGFFTVFASELSVYTLTVITLERWYAITFAMRLDRKIRLRHACAIMVGGWVCCFLLALLPLVGISSYAKVSICLPMDTETPLALAYIVFVLTLNIVAFVIVCCCYVKIYITVRNPQYNPGDKDTKIAKRMAVLIFTDFICMAPISFYALSAILNKPLITVSNSKILLVLFYPLNSCANPFLYAIFTKAFQRDVFILLSKFGICKRQAQAYRGQRVPPKNSTDIQVQKVTHEMRQGLHNMEDVYELIENSHLTPKKQGQISEEYMQTVL

SEQ ID NO: 11365 - protein, 662 aa, Artificial Sequence; identical to SEQ ID NO: 11364
  Synthetic polypeptide

SEQ ID NO: 11366 - protein, 40 aa, Artificial Sequence
  Synthetic polypeptide
HPVILVEATESRKSPSSALSGILIHKIRNSEYQELNLHRP

SEQ ID NO: 11367 - protein, 40 aa, Artificial Sequence; identical to SEQ ID NO: 11366
  Synthetic polypeptide

SEQ ID NO: 11368 - protein, 40 aa, Artificial Sequence; identical to SEQ ID NO: 11366
  Synthetic polypeptide

SEQ ID NO: 11369 - protein, 40 aa, Artificial Sequence; identical to SEQ ID NO: 11366
  Synthetic polypeptide

SEQ ID NO: 11370 - protein, 40 aa, Artificial Sequence; identical to SEQ ID NO: 11366
  Synthetic polypeptide

SEQ ID NO: 11371 - protein, 151 aa, Artificial Sequence
  Synthetic polypeptide
STKLEIRNTRNLTYIDPDALKELPLLKFLGIFNTGLKMFPDLTKVYSTDIFFILEITDNPYMTSIPVNAFQGLCNETLTLKLYNNGFTSVQGYAFNGTKLDAVYLNKNKYLTVIDKDAFGGVYSGPSLLLPLGRKSLSFETQKAPRSSMPS

SEQ ID NO: 11372 - protein, 129 aa, Artificial Sequence
  Synthetic polypeptide
STKLEIRNTRNLTYIDPDALKELPLLKFLGIFNTGLKMFPDLTKVYSTDIFFILEITDNPYMTSIPVNAFQGLCNETLTLKLYNNGFTSVQGYAFNGTKLDAVYLNKNKYLTVIDKDAFGGVYSGPSLL

SEQ ID NO: 11373 - protein, 172 aa, Artificial Sequence
  Synthetic polypeptide
STKLEIRNTRNLTYIDPDALKELPLLKFLGIFNTGLKMFPDLTKVYSTDIFFILEITDNPYMTSIPVNAFQGLCNETLTLKLYNNGFTSVQGYAFNGTKLDAVYLNKNKYLTVIDKDAFGGVYSGPSLLVENVAVSGKGFCKSLFSWLYRLPLGRKSLSFETQKAPRSSMPS

SEQ ID NO: 11374 - protein, 26 aa, Artificial Sequence
  Synthetic polypeptide
FALDPELFESRPALTHSIQHQAITRP

SEQ ID NO: 11375 - protein, 26 aa, Artificial Sequence
  Synthetic polypeptide
FALDPELFESRPALTHSIQHQAITRP

SEQ ID NO: 11376 - protein, 26 aa, Artificial Sequence
  Synthetic polypeptide
FALDPELFESRPALTHSIQHQAITRP

SEQ ID NO: 11377 - protein, 26 aa, Artificial Sequence
  Synthetic polypeptide
FALDPELFESRPALTHSIQHQAITRP

SEQ ID NO: 11378 - protein, 26 aa, Artificial Sequence
  Synthetic polypeptide
FALDPELFESRPALTHSIQHQAITRP

SEQ ID NO: 11379 - protein, 101 aa, Artificial Sequence
  Synthetic polypeptide
VGDLHWTPSSLRAGLRLPTLSSTKQSLGPDPSPARPLQSGGEDPPGRGAGELDSPRGLERAGRGPPSSGQRCGGYGVLPDSLGAGGQQPRRALHHHPPRAL

SEQ ID NO: 11380 - protein, 101 aa, Artificial Sequence; identical to SEQ ID NO: 11379
  Synthetic polypeptide

SEQ ID NO: 11381 - protein, 101 aa, Artificial Sequence; identical to SEQ ID NO: 11379
  Synthetic polypeptide

SEQ ID NO: 11382 - protein, 101 aa, Artificial Sequence; identical to SEQ ID NO: 11379
  Synthetic polypeptide

SEQ ID NO: 11383 - protein, 89 aa, Artificial Sequence
  Synthetic polypeptide
EQACAYPLYPAPSNHSALILHQLGRYSLAEKILRDAVQVNSTAHEVWNGLGEVLQAQGNDAAATECFLTALELEASSPAVPFTIIPRVL

SEQ ID NO: 11384 - protein, 89 aa, Artificial Sequence; identical to SEQ ID NO: 11383
  Synthetic polypeptide

SEQ ID NO: 11385 - protein, 89 aa, Artificial Sequence; identical to SEQ ID NO: 11383
  Synthetic polypeptide

SEQ ID NO: 11386 - protein, 89 aa, Artificial Sequence; identical to SEQ ID NO: 11383
  Synthetic polypeptide

SEQ ID NO: 11387 - protein, 89 aa, Artificial Sequence; identical to SEQ ID NO: 11383
  Synthetic polypeptide

SEQ ID NO: 11388 - protein, 129 aa, Artificial Sequence
  Synthetic polypeptide
VGDLHWTPSSLRAGLRLPTLSSTKQSLGPDPSPARPLQSGGEDPPGRGAGELDSPRGLERAGRGPPSSGQRCGGYGVLPDSLGAGGQQPRRALHHHPPRALSRRLPASPAAQASEALPGTRACAIAPRG

SEQ ID NO: 11389 - protein, 60 aa, Artificial Sequence
  Synthetic polypeptide
GRSQDGRIGTAPVYSSQRERHRRRVISAFPSEEWEDTVQSEVLLREFSHYTMITWDSYIS

SEQ ID NO: 11390 - protein, 60 aa, Artificial Sequence; identical to SEQ ID NO: 11389
  Synthetic polypeptide

SEQ ID NO: 11391 - protein, 18 aa, Artificial Sequence
  Synthetic polypeptide
FLHFHLRNGKIQCSRKCY

SEQ ID NO: 11392 - protein, 18 aa, Artificial Sequence
  Synthetic polypeptide
FLHFHLRNGKIQCSRKCY

SEQ ID NO: 11393 - protein, 30 aa, Artificial Sequence
  Synthetic polypeptide
EVPSTLCHDCEIFPSHVELNGKIQCSRKCY

SEQ ID NO: 11394 - protein, 30 aa, Artificial Sequence; identical to SEQ ID NO: 11393
  Synthetic polypeptide

SEQ ID NO: 11395 - protein, 36 aa, Artificial Sequence
  Synthetic polypeptide
DLPQPCGTEWEDTVQSEVLLREFSHYTMITWDSYIS

SEQ ID NO: 11396 - protein, 36 aa, Artificial Sequence; identical to SEQ ID NO: 11395
  Synthetic polypeptide

SEQ ID NO: 11397 - protein, 423 aa, Artificial Sequence
  Synthetic polypeptide
GWSWWFMPVIPALWEAEAVDHLNPGVQDQPGQHGSARASFGDRKVELSSSSQHGPSYDVYNPFYMYQHISPDLSRRFPPRSEVKRLYGSVCDLRTNKLPGSPGLSKSMFDLTNSSQRFIQRHDSLSSVPSSSSSRKNSQGSNRSLDTITLSGDERDFGRLNVKLFYNSSVEQIWITVLQCRDLSWPSSYGDTPTVSIKGILTLPKPVHFKSSAKEGSNAIEFMETFVFAIKLQNLQTVRLVFKIQTQTPRKKTIGECSMSLRTLSTQEMDYSLDITPPSKISVCHAELELGTCFQAVNSRIQLQILEARYLPSSSTPLTLSFFVKVGMFSSGELIYKKKTRLLKASNGRVKWGETMIFPLIQSEKEIVFLIKLYSRSSVRRKHFVGQIWISEDSNNIEAVNQWKETVINPEKVVIRWHKLNPS

SEQ ID NO: 11398 - protein, 423 aa, Artificial Sequence; identical to SEQ ID NO: 11397
  Synthetic polypeptide

SEQ ID NO: 11399 - protein, 423 aa, Artificial Sequence; identical to SEQ ID NO: 11397
  Synthetic polypeptide

SEQ ID NO: 11400 - protein, 22 aa, Artificial Sequence
  Synthetic polypeptide
TQEFKTSLANMDLPEHLLEIER

SEQ ID NO: 11401 - protein, 22 aa, Artificial Sequence
  Synthetic polypeptide
TQEFKTSLANMDLPEHLLEIER

SEQ ID NO: 11402 - protein, 22 aa, Artificial Sequence
  Synthetic polypeptide
TQEFKTSLANMDLPEHLLEIER

SEQ ID NO: 11403 - protein, 22 aa, Artificial Sequence
  Synthetic polypeptide
TQEFKTSLANMDLPEHLLEIER

SEQ ID NO: 11404 - protein, 38 aa, Artificial Sequence
  Synthetic polypeptide
GGGSLEPRSSRPAWPTWICQSIFWRSKGRTFQFIPART

SEQ ID NO: 11405 - protein, 38 aa, Artificial Sequence; identical to SEQ ID NO: 11404
  Synthetic polypeptide

SEQ ID NO: 11406 - protein, 38 aa, Artificial Sequence; identical to SEQ ID NO: 11404
  Synthetic polypeptide

SEQ ID NO: 11407 - protein, 38 aa, Artificial Sequence; identical to SEQ ID NO: 11404
  Synthetic polypeptide

SEQ ID NO: 11408 - protein, 359 aa, Artificial Sequence
  Synthetic polypeptide
GWSWWFMPVIPALWEAEAVDHLNPGVQDQPGQHGSARASFGDRKVELSSSSQHGPSYDVYNPFYMYQHISPDLSRRFPPRSEVKRLYGSVCDLRTNKLPGSPGLSKSMFDLTNSSQRFIQRHDSLSSVPSSSSSRKNSQGSNRSLDTITLSGDERDFGRLNVKLFYNSSVEQIWITVLQCRDLSWPSSYGDTPTVSIKGILTLPKPVHFKSSAKEGSNVCHAELELGTCFQAVNSRIQLQILEARYLPSSSTPLTLSFFVKVGMFSSGELIYKKKTRLLKASNGRVKWGETMIFPLIQSEKEIVFLIKLYSRSSVRRKHFVGQIWISEDSNNIEAVNQWKETVINPEKVVIRWHKLNPS

SEQ ID NO: 11409 - protein, 40 aa, Artificial Sequence
  Synthetic polypeptide
LQLLRRLSYHGELTSDCAGPLGSCSCPYGICHWMLFRQKE

SEQ ID NO: 11410 - protein, 43 aa, Artificial Sequence
  Synthetic polypeptide
WGHKFETSLGNIARSCLYKKKCLKNFFKLAPVAPASQKIELSW

SEQ ID NO: 11411 - protein, 25 aa, Artificial Sequence
  Synthetic polypeptide
LCESLPNLVYCTWKARLLCLRTSSD

SEQ ID NO: 11412 - protein, 33 aa, Artificial Sequence
  Synthetic polypeptide
WHAGADSCQLVTADCVNLFPTWCIVPGRLGSCV

SEQ ID NO: 11413 - protein, 869 aa, Artificial Sequence
  Synthetic polypeptide
ISSQLGVLYLEGSALVFEDIFRLIAFYCVSRDLLPFTLRLPQAILEASSFTDLETIANLGLGFWDSSLNPPQERGKPAEPPRDRAPGFPLVSSLRPTAHDANCACEIELSVGNDRLWFVNPIFIEDCSSALPTDQPPLGNCPARPLPPTSDATSPTSRWAPRRPPPPPPVLPLQPCSPAQPPVLPALAPAPACPLPTSPPVPAPHVTPHAPGPPDHPNQPPMMTCERLPCPTAGLGPLREEAMKPGAASSPLQQVPAPPLPAKKNLPTAPPRRRVSERVSLEDQSPGMAAEGDQLSLPPQGTSDGPEDTPRESTEQGQDTEVKASDPHSMPELPRTAKQPPVPPPRKKRISRQLASTLPAPLENAELCTQAMALETPTPGPPREGQSPASQAGTQHPPAQATAHSQSSPEFKGSLASLSDSLGVSVMATDQDSYSTSSTEEELEQFSSPSVKKKPSMILGKARHRLSFASFSSMFHAFLSNNRKLYKKVVELAQDKGSYFGSLVQDYKVYSLEMMARQTSSTEMLQEIRTMMTQLKSYLLQSTELKALVDPALHSEEELEAIVESALYKCVLKPLKEAINSCLHQIHSKDGSLQQLKENQLVILATTTTDLGVTTSVPEVPMMEKILQKFTSMHKAYSPEKKISILLKTCKLIYDSMALGNPGKPYGADDFLPVLMYVLARSNLTEMLLNVEYMMELMDPALQLGEGSYYLTTTYGALEHIKSYDKITVTRQLSVEVQDSIHRWERRRTLNKARASRSSVQDFICVSYLEPEQQARTLASRADTQAQALCAQCAEKFAVERPQAHRLFVLVDGRCFQLADDALPHCIKGYLLRSEPKRDFHFVYRPLDGGGGGGGGSPPCLVVREPNFL

SEQ ID NO: 11414 - protein, 57 aa, Artificial Sequence
  Synthetic polypeptide
RQPCVSAKRSRACHLEAWVPGSALLPANCEMDRGGGRAIIQGCYGEKRGFQGGREKW

SEQ ID NO: 11415 - protein, 371 aa, Artificial Sequence
  Synthetic polypeptide
GSHVSVQRDPELVIWRLGFQAQLCCPQTVRWTEAVEEPSSKDVMEKREDSKEAEKSGEATDGARPQALPEPMQESKAEGNNQAPGEEEEEEEEATNTHPPASLPSQKYPGPQAEGDSEGLSQGLVDREKGLSAEPGWQAKREEEEEEEEEAEAGEEAVPEEEGPTVVLNPHPSLGYKEIRKGESRSEALAVDGAGKPGAEEAQDPEGKGEQEHSQQKEEEEEMAVVPQGLFRGGKSGELEQEEERLSKEWEDSKRWSKMDQLAKELTAEKRLEGQEEEEDNRDSSMKLSFRARAYGFRGPGPQLRRGWRPSSREDSLEAGLPLQVRGYPEEKKEEEGSANRRPEDQELESLSAIEAELEKVAHQLQALRRG

SEQ ID NO: 11416 - protein, 101 aa, Artificial Sequence
  Synthetic polypeptide
DGQRRWKSHHPRMLWRKERIPRRQRKVVKPQTEPGPRPSRSPCRSPRLRGTIRPLGRKRRRRRRPPTPTLQPASPARNTQAHRPRGTVRASLRVWWTERRA

SEQ ID NO: 11417 - protein, 66 aa, Artificial Sequence
  Synthetic polypeptide
VGATPDVSWKTWALPPLGCVDLGGSLPSPSLISSIYEVGDQELESLSAIEAELEKVAHQLQALRRG

SEQ ID NO: 11418 - protein, 66 aa, Artificial Sequence; identical to SEQ ID NO: 11417
  Synthetic polypeptide

SEQ ID NO: 11419 - protein, 12 aa, Artificial Sequence
  Synthetic polypeptide
SRGPGAGEPVGH

SEQ ID NO: 11420 - protein, 12 aa, Artificial Sequence
  Synthetic polypeptide
SRGPGAGEPVGH

SEQ ID NO: 11421 - protein, 21 aa, Artificial Sequence
  Synthetic polypeptide
TSQRLIVLICERWLSCSTRRA

SEQ ID NO: 11422 - protein, 21 aa, Artificial Sequence
  Synthetic polypeptide
TSQRLIVLICERWLSCSTRRA

SEQ ID NO: 11423 - protein, 21 aa, Artificial Sequence
  Synthetic polypeptide
TSQRLIVLICERWLSCSTRRA

SEQ ID NO: 11424 - protein, 21 aa, Artificial Sequence
  Synthetic polypeptide
TSQRLIVLICERWLSCSTRRA

SEQ ID NO: 11425 - protein, 21 aa, Artificial Sequence
  Synthetic polypeptide
TSQRLIVLICERWLSCSTRRA

SEQ ID NO: 11426 - protein, 21 aa, Artificial Sequence
  Synthetic polypeptide
TSQRLIVLICERWLSCSTRRA

SEQ ID NO: 11427 - protein, 21 aa, Artificial Sequence
  Synthetic polypeptide
TSQRLIVLICERWLSCSTRRA

SEQ ID NO: 11428 - protein, 96 aa, Artificial Sequence
  Synthetic polypeptide
MAPCVGARLGAVQTQFHPGLTHCPAVTEPLSASSSSSVKDGYRVQPGGPERHPATLRGPEFHQPQRRPVQGVRGWRVLHRGPEALTQELLRRHIRP

SEQ ID NO: 11429 - protein, 96 aa, Artificial Sequence; identical to SEQ ID NO: 11428
  Synthetic polypeptide

SEQ ID NO: 11430 - protein, 96 aa, Artificial Sequence; identical to SEQ ID NO: 11428
  Synthetic polypeptide

SEQ ID NO: 11431 - protein, 96 aa, Artificial Sequence; identical to SEQ ID NO: 11428
  Synthetic polypeptide

SEQ ID NO: 11432 - protein, 247 aa, Artificial Sequence
  Synthetic polypeptide
KMAIVFNQEGLNAIQPPCVVQNFINHNAVLYKVFVVGESYTVVQRPSLKNFSAGTSDRESIFFNSHNVSKPESSSVLTELDKIEGVFERPSDEVIRELSRALRQALGVSLFGIDIIINNQTGQHAVIDINAFPGYEGVSEFFTDLLNHIATVLQGQSTAMAATGDVALLRHSKLLAEPAGGLVGERTCSASPGCCGSMMGQDAPWKAEADAGGTAKLPHQRLGCNAGVSPSFQQHCVASLATKASSQ

SEQ ID NO: 11433 - protein, 247 aa, Artificial Sequence; identical to SEQ ID NO: 11432
  Synthetic polypeptide

SEQ ID NO: 11434 - protein, 247 aa, Artificial Sequence; identical to SEQ ID NO: 11432
  Synthetic polypeptide

SEQ ID NO: 11435 - protein, 147 aa, Artificial Sequence
  Synthetic polypeptide
KMAIVFNQEGLNAIQPPCVVQNFINHNAVLYKVFVVGESYTVVQRPSLKNFSAGTSDRESIFFNSHNVSKPESSSVLTELDKIEGVFERPSDEVIRELSRALRQALGVSLFGIDIIINNQTGQHAVIDINAFPGDCQVCFIEGWKTD

SEQ ID NO: 11436 - protein, 94 aa, Artificial Sequence
  Synthetic polypeptide
MAPCVGARLGAVQTQFHPGLTHCPAVTEPLSASSSSSVKDGYRVQPGGPERHPATLRGPEFHQPQRRPVQGVRGWRVLHRGPEALTQELLRRHI

SEQ ID NO: 11437 - protein, 56 aa, Artificial Sequence
  Synthetic polypeptide
KMAIVFNQEGLNAIQPPCVVQNFINHNAVLYKVFVVGESYTVVQRPSLKNFSAGTS

SEQ ID NO: 11438 - protein, 83 aa, Artificial Sequence
  Synthetic polypeptide
MAPCVGARLGAVQTQFHPGLTHCPAVTEPLSASSSSSVKDGYRVQPGGPERHPATLRGPEFHQPQRRPVQGVRGWRVLHRGPE

SEQ ID NO: 11439 - protein, 45 aa, Artificial Sequence
  Synthetic polypeptide
KMAIVFNQEGLNAIQPPCVVQNFINHNAVLYKVFVVGESYTVVQR

SEQ ID NO: 11440 - protein, 71 aa, Artificial Sequence
  Synthetic polypeptide
MAPCVGARLGAVQTQFHPGLTHCPAVTEPLSASSSSSVKDGYRVQPGGPERHPATLRGPEFHQPQRRPVQG

SEQ ID NO: 11441 - protein, 33 aa, Artificial Sequence
  Synthetic polypeptide
KMAIVFNQEGLNAIQPPCVVQNFINHNAVLYKV

SEQ ID NO: 11442 - protein, 5 aa, Artificial Sequence
  Synthetic polypeptide
ARRKS

SEQ ID NO: 11443 - protein, 5 aa, Artificial Sequence
  Synthetic polypeptide
ARRKS

SEQ ID NO: 11444 - protein, 5 aa, Artificial Sequence
  Synthetic polypeptide
ARRKS

SEQ ID NO: 11445 - protein, 93 aa, Artificial Sequence
  Synthetic polypeptide
CEPGGKADQQEERRRQKQMKVLKKELRHLLSQPLFTESQKTKYPTQSGKPPLLVSAPSKSESALSCLSKQKKKKTKKPKEPQPEQPQPSTSAN

SEQ ID NO: 11446 - protein, 93 aa, Artificial Sequence; identical to SEQ ID NO: 11445
  Synthetic polypeptide

SEQ ID NO: 11447 - protein, 93 aa, Artificial Sequence; identical to SEQ ID NO: 11445
  Synthetic polypeptide

SEQ ID NO: 11448 - protein, 36 aa, Artificial Sequence
  Synthetic polypeptide
SSVRRLGFWALSDDWLCDVSQEEKLTSKKNVGDKSR

SEQ ID NO: 11449 - protein, 36 aa, Artificial Sequence; identical to SEQ ID NO: 11448
  Synthetic polypeptide

SEQ ID NO: 11450 - protein, 36 aa, Artificial Sequence; identical to SEQ ID NO: 11448
  Synthetic polypeptide

SEQ ID NO: 11451 - protein, 45 aa, Artificial Sequence
  Synthetic polypeptide
IHHVTLSMSLNSSELLFPLQRKGCCGCAHGAQCHGLHCGGNRLVL

SEQ ID NO: 11452 - protein, 35 aa, Artificial Sequence
  Synthetic polypeptide
TPLSSCFLSREKAVVAVPMVLSAMGFTAAGIASSS

SEQ ID NO: 11453 - protein, 31 aa, Artificial Sequence
  Synthetic polypeptide
APVSSPEKRLLWLCPWCSVPWASLRRESPRP

SEQ ID NO: 11454 - protein, 103 aa, Artificial Sequence
  Synthetic polypeptide
IHHVTLSMSLNSSELLFPLQRKGCCGCAHGAQCHGLHCGGNRLVLHSSQDDVRGGHCQWGWSCLGQPCGYSAVTGSNWTLRIDQVHPGLHWVCHCGCHCEVLL

SEQ ID NO: 11455 - protein, 103 aa, Artificial Sequence; identical to SEQ ID NO: 11454
  Synthetic polypeptide

SEQ ID NO: 11456 - protein, 103 aa, Artificial Sequence; identical to SEQ ID NO: 11454
  Synthetic polypeptide

SEQ ID NO: 11457 - protein, 103 aa, Artificial Sequence; identical to SEQ ID NO: 11454
  Synthetic polypeptide

SEQ ID NO: 11458 - protein, 92 aa, Artificial Sequence
  Synthetic polypeptide
TPLSSCFLSREKAVVAVPMVLSAMGFTAAGIASSSIAAKMMSAAAIANGGGVASGSLVATLQSLGATGLSGLTKFILGSIGSAIAAVIARFY

SEQ ID NO: 11459 - protein, 92 aa, Artificial Sequence; identical to SEQ ID NO: 11458
  Synthetic polypeptide

SEQ ID NO: 11460 - protein, 92 aa, Artificial Sequence; identical to SEQ ID NO: 11458
  Synthetic polypeptide

SEQ ID NO: 11461 - protein, 92 aa, Artificial Sequence; identical to SEQ ID NO: 11458
  Synthetic polypeptide

SEQ ID NO: 11462 - protein, 32 aa, Artificial Sequence
  Synthetic polypeptide
APVSSPEKRLLWLCPWCSVPWASLRRESPRPP

SEQ ID NO: 11463 - protein, 32 aa, Artificial Sequence; identical to SEQ ID NO: 11462
  Synthetic polypeptide

SEQ ID NO: 11464 - protein, 32 aa, Artificial Sequence; identical to SEQ ID NO: 11462
  Synthetic polypeptide

SEQ ID NO: 11465 - protein, 32 aa, Artificial Sequence; identical to SEQ ID NO: 11462
  Synthetic polypeptide

SEQ ID NO: 11466 - protein, 32 aa, Artificial Sequence; identical to SEQ ID NO: 11462
  Synthetic polypeptide

SEQ ID NO: 11467 - protein, 32 aa, Artificial Sequence; identical to SEQ ID NO: 11462
  Synthetic polypeptide

SEQ ID NO: 11468 - protein, 40 aa, Artificial Sequence
  Synthetic polypeptide
IHHVTLSMSLNSSELLFPLQRKGCCGCAHGAQCHGLHCGG

SEQ ID NO: 11469 - protein, 30 aa, Artificial Sequence
  Synthetic polypeptide
TPLSSCFLSREKAVVAVPMVLSAMGFTAAG

SEQ ID NO: 11470 - protein, 26 aa, Artificial Sequence
  Synthetic polypeptide
APVSSPEKRLLWLCPWCSVPWASLRR

SEQ ID NO: 11471 - protein, 76 aa, Artificial Sequence
  Synthetic polypeptide
IHHVTLSMSLNSSELLFPLQRKGCCGCAHGAQCHGLHCGGNRLVLHSSQDDVRGGHCQWGWSCLGQPCGYSAVTGS

SEQ ID NO: 11472 - protein, 66 aa, Artificial Sequence
  Synthetic polypeptide
TPLSSCFLSREKAVVAVPMVLSAMGFTAAGIASSSIAAKMMSAAAIANGGGVASGSLVATLQSLGA

SEQ ID NO: 11473 - protein, 78 aa, Artificial Sequence
  Synthetic polypeptide
IHHVTLSMSLNSSELLFPLQRKGCCGCAHGAQCHGLHCGGNRLVLHSSQDDVRGGHCQWGWSCLGQPCGYSAVTGVSL

SEQ ID NO: 11474 - protein, 67 aa, Artificial Sequence
  Synthetic polypeptide
TPLSSCFLSREKAVVAVPMVLSAMGFTAAGIASSSIAAKMMSAAAIANGGGVASGSLVATLQSLGFL

SEQ ID NO: 11475 - protein, 29 aa, Artificial Sequence
  Synthetic polypeptide
KKHGIWNLRPDFEAHTEHRQVNHAIWAKT

SEQ ID NO: 11476 - protein, 29 aa, Artificial Sequence
  Synthetic polypeptide
KKHGIWNLRPDFEAHTEHRQVNHAIWAKT

SEQ ID NO: 11477 - protein, 29 aa, Artificial Sequence
  Synthetic polypeptide
KKHGIWNLRPDFEAHTEHRQVNHAIWAKT

SEQ ID NO: 11478 - protein, 29 aa, Artificial Sequence
  Synthetic polypeptide
KKHGIWNLRPDFEAHTEHRQVNHAIWAKT

SEQ ID NO: 11479 - protein, 29 aa, Artificial Sequence
  Synthetic polypeptide
KKHGIWNLRPDFEAHTEHRQVNHAIWAKT

SEQ ID NO: 11480 - protein, 49 aa, Artificial Sequence
  Synthetic polypeptide
DLTLKPTQNTDKSTMLFGQRPDLEDGKCPLRQEGAAAAGKFLGQCQEAV

SEQ ID NO: 11481 - protein, 49 aa, Artificial Sequence; identical to SEQ ID NO: 11480
  Synthetic polypeptide

SEQ ID NO: 11482 - protein, 49 aa, Artificial Sequence; identical to SEQ ID NO: 11480
  Synthetic polypeptide

SEQ ID NO: 11483 - protein, 49 aa, Artificial Sequence; identical to SEQ ID NO: 11480
  Synthetic polypeptide

SEQ ID NO: 11484 - protein, 49 aa, Artificial Sequence; identical to SEQ ID NO: 11480
  Synthetic polypeptide

SEQ ID NO: 11485 - protein, 306 aa, Artificial Sequence
  Synthetic polypeptide
SPHRTQTSQPCYLGKDLTLKMGSALFVKKELQLQANFLGNVKRLYEAEVFSTDFSNPSIAQARINSHVKKKTQGKVVDIIQGLDLLTAMVLVNHIFFKAKWEKPFHPEYTRKNFPFLVGEQVTVHVPMMHQKEQFAFGVDTELNCFVLQMDYKGDAVAFFVLPSKGKMRQLEQALSARTLRKWSHSLQKRWIEVFIPRFSISASYNLETILPKMGIQNVFDKNADFSGIAKRDSLQVSKATHKAVLDVSEEGTEATAATTTKFIVRSKDGPSYFTVSFNRTFLMMITNKATDGILFLGKVENPTKS

SEQ ID NO: 11486 - protein, 306 aa, Artificial Sequence; identical to SEQ ID NO: 11485
  Synthetic polypeptide

SEQ ID NO: 11487 - protein, 306 aa, Artificial Sequence; identical to SEQ ID NO: 11485
  Synthetic polypeptide

SEQ ID NO: 11488 - protein, 45 aa, Artificial Sequence
  Synthetic polypeptide
SPHRTQTSQPCYLGKDLTLKMGSALFVKKELQLQANFLGNVKRLY

SEQ ID NO: 11489 - protein, 241 aa, Artificial Sequence
  Synthetic polypeptide
SPHRTQTSQPCYLGKDLTLKMGSALFVKKELQLQANFLGNVKRLYEAEVFSTDFSNPSIAQARINSHVKKKTQGKVVDIIQGLDLLTAMVLVNHIFFKAKWEKPFHPEYTRKNFPFLVGEQVTVHVPMMHQKEQFAFGVDTELNCFVLQMDYKGDAVAFFVLPSKGKMRQLEQALSARTLRKWSHSLQKRWIEVFIPRFSISASYNLETILPKMGIQNVFDKNADFSGIAKRDSLQVSKVS

SEQ ID NO: 11490 - protein, 105 aa, Artificial Sequence
  Synthetic polypeptide
SSVTLCSTLTLAEPPFPHSTKMQILEGLGLNLQKSSEKELHRGFQQLLQELNQPRDGFQLSLGNALFTDLVVDLQDTFVSAMKTLYLADTFPTNFRDSAGAMKQI

SEQ ID NO: 11491 - protein, 50 aa, Artificial Sequence
  Synthetic polypeptide
LWQSLRFLIAQRCRSWRAWASTSRKAQRRSCTEAFSSSFRNSTSPEMASS

SEQ ID NO: 11492 - protein, 50 aa, Artificial Sequence; identical to SEQ ID NO: 11491
  Synthetic polypeptide

SEQ ID NO: 11493 - protein, 50 aa, Artificial Sequence; identical to SEQ ID NO: 11491
  Synthetic polypeptide

SEQ ID NO: 11494 - protein, 50 aa, Artificial Sequence; identical to SEQ ID NO: 11491
  Synthetic polypeptide

SEQ ID NO: 11495 - protein, 50 aa, Artificial Sequence; identical to SEQ ID NO: 11491
  Synthetic polypeptide

SEQ ID NO: 11496 - protein, 50 aa, Artificial Sequence; identical to SEQ ID NO: 11491
  Synthetic polypeptide

SEQ ID NO: 11497 - protein, 50 aa, Artificial Sequence; identical to SEQ ID NO: 11491
  Synthetic polypeptide

SEQ ID NO: 11498 - protein, 50 aa, Artificial Sequence; identical to SEQ ID NO: 11491
  Synthetic polypeptide

SEQ ID NO: 11499 - protein, 50 aa, Artificial Sequence; identical to SEQ ID NO: 11491
  Synthetic polypeptide

SEQ ID NO: 11500 - protein, 339 aa, Artificial Sequence
  Synthetic polypeptide
SSVTLCSTLTLAEPPFPHSTKMQILEGLGLNLQKSSEKELHRGFQQLLQELNQPRDGFQLSLGNALFTDLVVDLQDTFVSAMKTLYLADTFPTNFRDSAGAMKQINDYVAKQTKGKIVDLLKNLDSNAVVIMVNYIFFKAKWETSFNHKGTQEQDFYVTSETVVRVPMMSREDQYHYLLDRNLSCRVVGVPYQGNATALFILPSEGKMQQVENGLSEKTLRKWLKMFKKRQLELYLPKFSIEGSYQLEKVLPSLGISNVFTSHADLSGISNHSNIQVSEMVHKAVVEVDESGTRAAAATGTIFTFRSARLNSQRLVFNRPFLMFIVDNNILFLGKVNRP

SEQ ID NO: 11501 - protein, 339 aa, Artificial Sequence; identical to SEQ ID NO: 11500
  Synthetic polypeptide

SEQ ID NO: 11502 - protein, 339 aa, Artificial Sequence; identical to SEQ ID NO: 11500
  Synthetic polypeptide

SEQ ID NO: 11503 - protein, 339 aa, Artificial Sequence; identical to SEQ ID NO: 11500
  Synthetic polypeptide

SEQ ID NO: 11504 - protein, 234 aa, Artificial Sequence
  Synthetic polypeptide
SSVTLCSTLTLAEPPFPHSTKMQILEGLGLNLQKSSEKELHRGFQQLLQELNQPRDGFQLSLGNALFTDLVVDLQDTFVSAMKTLYLADTFPTNFRDSAGAMKQINDYVAKQTKGKIVDLLKNLDSNAVVIMVNYIFFKAKWETSFNHKGTQEQDFYVTSETVVRVPMMSREDQYHYLLDRNLSCRVVGVPYQGNATALFILPSEGKMQQVENGLSEKTLRKWLKMFKKRYFQT

SEQ ID NO: 11505 - protein, 164 aa, Artificial Sequence
  Synthetic polypeptide
SSVTLCSTLTLAEPPFPHSTKMQILEGLGLNLQKSSEKELHRGFQQLLQELNQPRDGFQLSLGNALFTDLVVDLQDTFVSAMKTLYLADTFPTNFRDSAGAMKQINDYVAKQTKGKIVDLLKNLDSNAVVIMVNYIFFKAKWETSFNHKGTQEQDFYVTSETVV

SEQ ID NO: 11506 - protein, 23 aa, Artificial Sequence
  Synthetic polypeptide
SSVTLCSTLTLAEPPFPHSTKMQ

SEQ ID NO: 11507 - protein, 14 aa, Artificial Sequence
  Synthetic polypeptide
LWQSLRFLIAQRCR

SEQ ID NO: 11508 - protein, 19 aa, Artificial Sequence
  Synthetic polypeptide
SSVTLCSTLTLAEPPFPHS

SEQ ID NO: 11509 - protein, 77 aa, Artificial Sequence
  Synthetic polypeptide
SSVTLCSTLTLAEPPFPHSTKMQILEGLGLNLQKSSEKELHRGFQQLLQELNQPRDGFQLSLGNALFTDLVVDLQDT

SEQ ID NO: 11510 - protein, 90 aa, Artificial Sequence
  Synthetic polypeptide
SSVTLCSTLTLAEPPFPHSTKMQILEGLGLNLQKSSEKELHRGFQQLLQELNQPRDGFQLSLGNALFTDLVVDLQDTFVSAMKTLYLADT

SEQ ID NO: 11511 - protein, 312 aa, Artificial Sequence
  Synthetic polypeptide
HWHFSCFSNVPGIFCCLGHFVLDVCFLWNAISPVYRQAINSKMFEVDMKIAAMHVKRKQLHQLLPNHVLQKKKKHSTEGVKLTALNDSSLDLSMDSDNSMSVPSPTSATKTSPLNSSGSSQGRNSPAPAVTAASVTNIQATEVSVPQVNSSESSGGTSSESIPQTATQPAISPPPKPTVSRVVSSTRLVNPPPRSSGNAATSGNAATKIPTPIVGVKRTSSPHKEESPKKTKTEEDETSEDANCLALSGHDKTEAKEQLDTETSTTQSETIQTAASLLASQKTSSTDLSDIPALPANPIPVIKNSIKLRLNR

SEQ ID NO: 11512 - protein, 21 aa, Artificial Sequence
  Synthetic polypeptide
GILFLMFAFSGMLFHQFIGKQ

SEQ ID NO: 11513 - protein, 21 aa, Artificial Sequence
  Synthetic polypeptide
GILFLMFAFSGMLFHQFIGKQ

SEQ ID NO: 11514 - protein, 21 aa, Artificial Sequence
  Synthetic polypeptide
GILFLMFAFSGMLFHQFIGKQ

SEQ ID NO: 11515 - protein, 12 aa, Artificial Sequence
  Synthetic polypeptide
CLLSLECYFTSL

SEQ ID NO: 11516 - protein, 12 aa, Artificial Sequence
  Synthetic polypeptide
CLLSLECYFTSL

SEQ ID NO: 11517 - protein, 12 aa, Artificial Sequence
  Synthetic polypeptide
CLLSLECYFTSL

SEQ ID NO: 11518 - protein, 291 aa, Artificial Sequence
  Synthetic polypeptide
HWHFSCFSNVPGIFCCLGHFVLDVCFLWNAISPVYRQAINSKMFEVDMKIAAMHVKRKQLHQLLPNHVLQKKKKHSTEGVKLTALNDSSLDLSMDSDNSMSVPSPTSATKTSPLNSSGSSQGRNSPAPAVTAASVTNIQATEVSVPQVNSSESSGGTSSESIPQTATQPAISPPPKPTVSRVVSSTRLVNPPPRSSGNAATSGNAATKIPTPIVGVKRTSSPHKEESPKKTKTEEEQLDTETSTTQSETIQTAASLLASQKTSSTDLSDIPALPANPIPVIKNSIKLRLNR

SEQ ID NO: 11519 - protein, 292 aa, Artificial Sequence
  Synthetic polypeptide
HWHFSCFSNVPGIFCCLGHFVLDVCFLWNAISPVYRQAINSKMFEVDMKIAAMHVKRKQLHQLLPNHVLQKKKKHSTEGVKLTALNDSSLDLSMDSDNSMSVPSPTSATKTSPLNSSGSSQGRNSPAPAVTAASVTNIQATEVSVPQVNSSESSGGTSSESIPQTATQPAISPPPKPTVSRVVSSTRLVNPPPRSSGNAATSGNAATKIPTPIVGVKRTSSPHKEESPKKTKTEEDETSEDANCLALSGHDKTEAKEQLDTETSTTQSETIQTAASLLASQKTSSTDLSDIP

SEQ ID NO: 11520 - protein, 21 aa, Artificial Sequence
  Synthetic polypeptide
HQGPTDDGEEEMEEDTVTNGS

SEQ ID NO: 11521 - protein, 28 aa, Artificial Sequence
  Synthetic polypeptide
RLFSSNNTKGPLMMVKKRWKKTQSQTGP

SEQ ID NO: 11522 - protein, 11 aa, Artificial Sequence
  Synthetic polypeptide
DCFHLITPRAH

SEQ ID NO: 11523 - protein, 11 aa, Artificial Sequence
  Synthetic polypeptide
DCFHLITPRAH

SEQ ID NO: 11524 - protein, 15 aa, Artificial Sequence
  Synthetic polypeptide
HQGPTDDGEEEMEED

SEQ ID NO: 11525 - protein, 21 aa, Artificial Sequence
  Synthetic polypeptide
RLFSSNNTKGPLMMVKKRWKK

SEQ ID NO: 11526 - protein, 7 aa, Artificial Sequence
  Synthetic polypeptide
PDIGARV

SEQ ID NO: 11527 - protein, 7 aa, Artificial Sequence
  Synthetic polypeptide
PDIGARV

SEQ ID NO: 11528 - protein, 230 aa, Artificial Sequence
  Synthetic polypeptide
VLGYKIPVIENLGATLDQFDAIDFSDNEIRKLDGFPLLRRLKTLLVNNNRICRIGEGLDQALPCLTELILTNNSLVELGDLDPLASLKSLTYLSILRNPVTNKKHYRLYVIYKVPQVRVLDFQKVKLKERQEAEKMFKGKRGAQLAKDIARRSKTFNPGAGLPTDKKKGGPSPGDVEAIKNAIANASTLAEVERLKGLLQSGQIPGRERRSGPTDDGEEEMEEDTVTNGS

SEQ ID NO: 11529 - protein, 129 aa, Artificial Sequence
  Synthetic polypeptide
VLGYKIPVIENLGATLDQFDAIDFSDNEIRKLDGFPLLRRLKTLLVNNNRICRIGEGLDQALPCLTELILTNNSLVELGDLDPLASLKSLTYLSILRNPVTNKKHYRLYVIYKVPQVRVLDFQKVKLKF

SEQ ID NO: 11530 - protein, 48 aa, Artificial Sequence
  Synthetic polypeptide
IVGIGTSPLNRICWRTNCFANKDGPRGAAPHSRHCPGGVGLSPGVVPD

SEQ ID NO: 11531 - protein, 48 aa, Artificial Sequence; identical to SEQ ID NO: 11530
  Synthetic polypeptide

SEQ ID NO: 11532 - protein, 15 aa, Artificial Sequence
  Synthetic polypeptide
RTAEMVNSRHWHIST

SEQ ID NO: 11533 - protein, 15 aa, Artificial Sequence
  Synthetic polypeptide
RTAEMVNSRHWHIST

SEQ ID NO: 11534 - protein, 13 aa, Artificial Sequence
  Synthetic polypeptide
SSDSRAPEPEPRP

SEQ ID NO: 11535 - protein, 13 aa, Artificial Sequence
  Synthetic polypeptide
SSDSRAPEPEPRP

SEQ ID NO: 11536 - protein, 148 aa, Artificial Sequence
  Synthetic polypeptide
IGVSLKNKKLTQNHTTTWKLNNLLLNDSWVNNEIKAEIKKFFETKENKENLWDAAKAVIPVLLNLSHDPEVGLPAPPLMYALAFGACLGGNGTLIGASANVVCAGIAEQHGYGFSFMEFFRLGFPMMVVSCTVGMCYLLVAHVVVGWN

SEQ ID NO: 11537 - protein, 148 aa, Artificial Sequence; identical to SEQ ID NO: 11536
  Synthetic polypeptide

SEQ ID NO: 11538 - protein, 34 aa, Artificial Sequence
  Synthetic polypeptide
IMKSRQKSRSSLKPKRTKKTSGMQLKQWHWHIST

SEQ ID NO: 11539 - protein, 34 aa, Artificial Sequence; identical to SEQ ID NO: 11538
  Synthetic polypeptide

SEQ ID NO: 11540 - protein, 48 aa, Artificial Sequence
  Synthetic polypeptide
SSGIGTSPLNRICWRTNCFANKDGPRGAAPHSRHCPGGVGLSPGVVPD

SEQ ID NO: 11541 - protein, 48 aa, Artificial Sequence; identical to SEQ ID NO: 11540
  Synthetic polypeptide

SEQ ID NO: 11542 - protein, 203 aa, Artificial Sequence
  Synthetic polypeptide
IGVSLKNKKLTQNHTTTWKLNNLLLNDSWVNNEIKAEIKKFFETKENKENLWDAAKAVALAHLHLIEYVGEQTALLIKMVPEEQRLIAAIVLVVWVSALASSLIDNIPFTATMIPVLLNLSHDPEVGLPAPPLMYALAFGACLGGNGTLIGASANVVCAGIAEQHGYGFSFMEFFRLGFPMMVVSCTVGMCYLLVAHVVVGWN

SEQ ID NO: 11543 - protein, 203 aa, Artificial Sequence; identical to SEQ ID NO: 11542
  Synthetic polypeptide

SEQ ID NO: 11544 - protein, 91 aa, Artificial Sequence
  Synthetic polypeptide
WKYRPKQLGVAVASSPTSISPLCQVQHPAKMKRKANRWRLSLRNGLLPSTPRATQQIPMEFLNSRVADIPIKPCISVYPMTPSQTHCSISW

SEQ ID NO: 11545 - protein, 91 aa, Artificial Sequence; identical to SEQ ID NO: 11544
  Synthetic polypeptide

SEQ ID NO: 11546 - protein, 91 aa, Artificial Sequence; identical to SEQ ID NO: 11544
  Synthetic polypeptide

SEQ ID NO: 11547 - protein, 91 aa, Artificial Sequence; identical to SEQ ID NO: 11544
  Synthetic polypeptide

SEQ ID NO: 11548 - protein, 91 aa, Artificial Sequence; identical to SEQ ID NO: 11544
  Synthetic polypeptide

SEQ ID NO: 11549 - protein, 91 aa, Artificial Sequence; identical to SEQ ID NO: 11544
  Synthetic polypeptide

SEQ ID NO: 11550 - protein, 1618 aa, Artificial Sequence
  Synthetic polypeptide
GCPLSLLLFNILMEVQAKAIRCCCGQFTNQHIPPLPSATPSKNEEESKQVETQPEKWSVAKHTQSYPTDSYGVLEFQGGGYSNKAMYIRVSYDTKPDSLLHLMVKDWQLELPKLLISVHGGLQNFEMQPKLKQVFGKGLIKAAMTTGAWIFTGGVSTGVISHVGDALKDHSSKSRGRVCAIGIAPWGIVENKEDLVGKDVTRVYQTMSNPLSKLSVLNNSHTHFILADNGTLGKYGAEVKLRRLLEKHISLQKINTRLGQGVPLVGLVVEGGPNVVSIVLEYLQEEPPIPVVICDGSGRASDILSFAHKYCEEGGIINESLREQLLVTIQKTFNYNKAQSHQLFAIIMECMKKKELVTVFRMGSEGQQDIEMAILTALLKGTNVSAPDQLSLALAWNRVDIARSQIFVFGPHWPPLGSLAPPTDSKATEKEKKPPMATTKGGRGKGKGKKKGKVKEEVEEETDPRKIELLNWVNALEQAMLDALVLDRVDFVKLLIENGVNMQHFLTIPRLEELYNTRLGPPNTLHLLVRDVKKSNLPPDYHISLIDIGLVLEYLMGGAYRCNYTRKNFRTLYNNLFGPKRPKALKLLGMEDDEPPAKGKKKKKKKKEEEIDIDVDDPAVSRFQYPFHELMVWAVLMKRQKMAVFLWQRGEESMAKALVACKLYKAMAHESSESDLVDDISQDLDNNSKDFGQLALELLDQSYKHDEQIAMKLLTYELKNWSNSTCLKLAVAAKHRDFIAHTCSQMLLTDMWMGRLRMRKNPGLKVIMGILLPPTILFLEFRTYDDFSYQTSKENEDGKEKEEENTDANADAGSRKGDEENEHKKQRSIPIGTKICEFYNAPIVKFWFYTISYLGYLLLFNYVILVRMDGWPSLQEWIVISYIVSLALEKIREILMSEPGKLSQKIKVWLQEYWNITDLVAISTFMIGAILRLQNQPYMGYGRVIYCVDIIFWYIRVLDIFGVNKYLGPYVMMIGKMMIDMLYFVVIMLVVLMSFGVARQAILHPEEKPSWKLARNIFYMPYWMIYGEVFADQIDLYAMEINPPCGENLYDEEGKRLPPCIPGAWLTPALMACYLLVANILLVNLLIAVFNNTFFEVKSISNQVWKFQRYQLIMTFHDRPVLPPPMIILSHIYIIIMRLSGRCRKKREGDQEERDRGLKLFLSDEELKRLHEFEEQCVQEHFREKEDEQQSSSDERIRVTSERVENMSMRLEEINERETFMKTSLQTVDLRLAQLEELSNRMVNALENLAGIDRSDLIQARSRASSECEATYLLRQSSINSADGYSLYRYHFNGEELLFEDTSLSTSPGTGVRKKTCSFRIKEEKDVKTHLVPECQNSLHLSLGTSTSATPDGSHLAVDDLKNAEESKLGPDIGISKEDDERQTDSKKEETISPSLNKTDVIHGQDKSDVQNTQLTVETTNIEGTISYPLEETKITRYFPDETINACKTMKSRSFVYSRGRKLVGGVNQDVEYSSITDQQLTTEWQCQVQKITRSHSTDIPYIVSEAAVQAEHKEQFADMQDEHHVAEAIPRIPRLSLTITDRNGMENLLSVKPDQTLGFPSLRSKSLHGHPRNVKSIQGKLDRSGHASSVSSLVIVSGMTAEEKKVKKEKASTETEC

SEQ ID NO: 11551 - protein, 1618 aa, Artificial Sequence; identical to SEQ ID NO: 11550
  Synthetic polypeptide

SEQ ID NO: 11552 - protein, 1618 aa, Artificial Sequence; identical to SEQ ID NO: 11550
  Synthetic polypeptide

SEQ ID NO: 11553 - protein, 1405 aa, Artificial Sequence
  Synthetic polypeptide
GCPLSLLLFNILMEVQAKAIRCCCGQFTNQHIPPLPSATPSKNEEESKQVETQPEKWSVAKHTQSYPTDSYGVLEFQGGGYSNKAMYIRVSYDTKPDSLLHLMVKDWQLELPKLLISVHGGLQNFEMQPKLKQVFGKGLIKAAMTTGAWIFTGGVSTGVISHVGDALKDHSSKSRGRVCAIGIAPWGIVENKEDLVGKDVTRVYQTMSNPLSKLSVLNNSHTHFILADNGTLGKYGAEVKLRRLLEKHISLQKINTRLGQGVPLVGLVVEGGPNVVSIVLEYLQEEPPIPVVICDGSGRASDILSFAHKYCEEGGIINESLREQLLVTIQKTFNYNKAQSHQLFAIIMECMKKKELVTVFRMGSEGQQDIEMAILTALLKGTNVSAPDQLSLALAWNRVDIARSQIFVFGPHWPPLGSLAPPTDSKATEKEKKPPMATTKGGRGKGKGKKKGKVKEEVEEETDPRKIELLNWVNALEQAMLDALVLDRVDFVKLLIENGVNMQHFLTIPRLEELYNTRLGPPNTLHLLVRDVKKSNLPPDYHISLIDIGLVLEYLMGGAYRCNYTRKNFRTLYNNLFGPKRPKALKLLGMEDDEPPAKGKKKKKKKKEEEIDIDVDDPAVSRFQYPFHELMVWAVLMKRQKMAVFLWQRGEESMAKALVACKLYKAMAHESSESDLVDDISQDLDNNSKDFGQLALELLDQSYKHDEQIAMKLLTYELKNWSNSTCLKLAVAAKHRDFIAHTCSQMLLTDMWMGRLRMRKNPGLKVIMGILLPPTILFLEFRTYDDFSYQTSKENEDGKEKEEENTDANADAGSRKGDEENEHKKQRSIPIGTKICEFYNAPIVKFWFYTISYLGYLLLFNYVILVRMDGWPSLQEWIVISYIVSLALEKIREILMSEPGKLSQKIKVWLQEYWNITDLVAISTFMIGAILRLQNQPYMGYGRVIYCVDIIFWYIRVLDIFGVNKYLGPYVMMIGKMMIDMLYFVVIMLVVLMSFGVARQAILHPEEKPSWKLARNIFYMPYWMIYGEVFADQIDLYAMEINPPCGENLYDEEGKRLPPCIPGAWLTPALMACYLLVANILLVNLLIAVFNNTFFEVKSISNQVWKFQRYQLIMTFHDRPVLPPPMIILSHIYIIIMRLSGRCRKKREGDQEERDRGLKLFLSDEELKRLHEFEEQCVQEHFREKEDEQQSSSDERIRVTSERVENMSMRLEEINERETFMKTSLQTVDLRLAQLEELSNRMVNALENLAGIDRSDLIQARSRASSECEATYLLRQSSINSADGYSLYRYHFNGEELLFEDTSLSTSPGTGVRKKTCSFRIKEEKDVKTHLVPECQNSLHLSLGTSTSATPDGSHLAVDDLKNAEESKLGPDIGISKEDDERQTDSKKEETISPSLNKTDVIHGQ

SEQ ID NO: 11554 - protein, 520 aa, Artificial Sequence
  Synthetic polypeptide
GCPLSLLLFNILMEVQAKAIRCCCGQFTNQHIPPLPSATPSKNEEESKQVETQPEKWSVAKHTQSYPTDSYGVLEFQGGGYSNKAMYIRVSYDTKPDSLLHLMVKDWQLELPKLLISVHGGLQNFEMQPKLKQVFGKGLIKAAMTTGAWIFTGGVSTAPCGENLYDEEGKRLPPCIPGAWLTPALMACYLLVANILLVNLLIAVFNNTFFEVKSISNQVWKFQRYQLIMTFHDRPVLPPPMIILSHIYIIIMRLSGRCRKKREGDQEERDRGLKLFLSDEELKRLHEFEEQCVQEHFREKEDEQQSSSDERIRVTSERVENMSMRLEEINERETFMKTSLQTVDLRLAQLEELSNRMVNALENLAGIDRSDLIQARSRASSECEATYLLRQSSINSADGYSLYRYHFNGEELLFEDTSLSTSPGTGVRKKTCSFRIKEEKDVKTHLVPECQNSLHLSLGTSTSATPDGSHLAVDDLKNAEESKLGPDIGISKEDDERQTDSKKEETISPSLNKTDVIHGQ

SEQ ID NO: 11555 - protein, 315 aa, Artificial Sequence
  Synthetic polypeptide
GCPLSLLLFNILMEVQAKAIRCCCGQFTNQHIPPLPSATPSKNEEESKQVETQPEKWSVAKHTQSYPTDSYGVLEFQGGGYSNKAMYIRVSYDTKPDSLLHLMVKDWQLELPKLLISVHGGLQNFEMQPKLKQVFGKGLIKAAMTTGAWIFTGGVSTGVISHVGDALKDHSSKSRGRVCAIGIAPWGIVENKEDLVGKDVTRVYQTMSNPLSKLSVLNNSHTHFILADNGTLGKYGAEVKLRRLLEKHISLQKINTRLGQGVPLVGLVVEGGPNVVSIVLEYLQEEPPIPVVICDGSGRASDILSFAHKYCEEGG

SEQ ID NO: 11556 - protein, 74 aa, Artificial Sequence
  Synthetic polypeptide
WKYRPKQLGVAVASSPTSISPLCQVQHPAKMKRKANRWRLSLRNGLLPSTPRATQQIPMEFLNSRVADIPIKPW

SEQ ID NO: 11557 - protein, 151 aa, Artificial Sequence
  Synthetic polypeptide
GCPLSLLLFNILMEVQAKAIRCCCGQFTNQHIPPLPSATPSKNEEESKQVETQPEKWSVAKHTQSYPTDSYGVLEFQGGGYSNKAMVRKAFRHGATRITAFIGGQSPSPKLQIPGLLHGCGSIFLDISLKNQEIYLCTWLLAMRLGNWTPL

SEQ ID NO: 11558 - protein, 77 aa, Artificial Sequence
  Synthetic polypeptide
NLGASPGFPFSSGQGSLVLSHEEARPAASLRWPCVRNRGPPSVMNKPGLSATQEETDQQLGGKKIITYQVTLCIDQG

SEQ ID NO: 11559 - protein, 77 aa, Artificial Sequence; identical to SEQ ID NO: 11558
  Synthetic polypeptide

SEQ ID NO: 11560 - protein, 77 aa, Artificial Sequence; identical to SEQ ID NO: 11558
  Synthetic polypeptide

SEQ ID NO: 11561 - protein, 77 aa, Artificial Sequence; identical to SEQ ID NO: 11558
  Synthetic polypeptide

SEQ ID NO: 11562 - protein, 267 aa, Artificial Sequence
  Synthetic polypeptide
TKVKKSPKQLAAYINRTVGQTVKSPDKLRKVIYRRKKVHHPFPNPCYRKKQSPGSGGCDMANKENELACAGHLPEKLHHDSRTYLVNSSDSGSSQTESPSSKYSGFFSEVSQDHETMAQVLFSRNMRLNVALTFWRKRSISELVAYLLRIEDLGVVVDCLPVLTNCLQEEKQYISLGCCVDLLPLVKSLLKSKFEEYVIVGLNWLQAVIKRWWSELSSKTEIINDGNIQILKQQLSGLWEQENHLTLVPGYTGNIAKDVDAYLLQLH

SEQ ID NO: 11563 - protein, 42 aa, Artificial Sequence
  Synthetic polypeptide
TRTLSNAGRNRPTTWGKKNNHIPGNPVHRPRLRNLQNSWLLT

SEQ ID NO: 11564 - protein, 42 aa, Artificial Sequence; identical to SEQ ID NO: 11563
  Synthetic polypeptide

SEQ ID NO: 11565 - protein, 42 aa, Artificial Sequence; identical to SEQ ID NO: 11563
  Synthetic polypeptide

SEQ ID NO: 11566 - protein, 42 aa, Artificial Sequence; identical to SEQ ID NO: 11563
  Synthetic polypeptide

SEQ ID NO: 11567 - protein, 141 aa, Artificial Sequence
  Synthetic polypeptide
TKVKKSPKQLAAYINRTVGQTVKSPDKLRKVIYRRKKVHHPFPNPCYRKKQSPGSGGCDMANKENELACAGHLPEKLHHDSRTYLVNSSDSGSSQTESPSSKYSGFFSEVSQDHETMAQVLFSRNMRLNVALTFWRKRSIS

SEQ ID NO: 11568 - protein, 140 aa, Artificial Sequence
  Synthetic polypeptide
TKVKKSPKQLAAYINRTVGQTVKSPDKLRKVIYRRKKVHHPFPNPCYRKKQSPGSGGCDMANKENELACAGHLPEKLHHDSRTYLVNSSDSGSSQTESPSSKYSGFFSEVSQDHETMAQVLFSRNMRLNVALTFWRKRSI

SEQ ID NO: 11569 - protein, 37 aa, Artificial Sequence
  Synthetic polypeptide
TKVKKSPKQLAAYINRTVGQTVKSPDKLRKVIYRRKK

SEQ ID NO: 11570 - protein, 19 aa, Artificial Sequence
  Synthetic polypeptide
DTPQMSRRLKMQQKNVKNP

SEQ ID NO: 11571 - protein, 19 aa, Artificial Sequence
  Synthetic polypeptide
DTPQMSRRLKMQQKNVKNP

SEQ ID NO: 11572 - protein, 20 aa, Artificial Sequence
  Synthetic polypeptide
SARPTADLLNQSLNFKIPRR

SEQ ID NO: 11573 - protein, 20 aa, Artificial Sequence
  Synthetic polypeptide
SARPTADLLNQSLNFKIPRR

SEQ ID NO: 11574 - protein, 21 aa, Artificial Sequence
  Synthetic polypeptide
ILRYPADEQETKDAAEECKEP

SEQ ID NO: 11575 - protein, 21 aa, Artificial Sequence
  Synthetic polypeptide
ILRYPADEQETKDAAEECKEP

SEQ ID NO: 11576 - protein, 11 aa, Artificial Sequence
  Synthetic polypeptide
ILALLLDGDLR

SEQ ID NO: 11577 - protein, 11 aa, Artificial Sequence
  Synthetic polypeptide
ILALLLDGDLR

SEQ ID NO: 11578 - protein, 19 aa, Artificial Sequence
  Synthetic polypeptide
MEILDEQETKDAAEECKEP

SEQ ID NO: 11579 - protein, 19 aa, Artificial Sequence
  Synthetic polypeptide
MEILDEQETKDAAEECKEP

SEQ ID NO: 11580 - protein, 68 aa, Artificial Sequence
  Synthetic polypeptide
GAPLPGQPPHPGGRWGGQPPARPAAPSGREVGGGQPPTRPAAPSGRKLHGVMVNLPHNRVQICHQQVH

SEQ ID NO: 11581 - protein, 68 aa, Artificial Sequence; identical to SEQ ID NO: 11580
  Synthetic polypeptide

SEQ ID NO: 11582 - protein, 527 aa, Artificial Sequence
  Synthetic polypeptide
PRLASRPVREVRGASAWPPLLGSEEPLCQASRPIREGGGGVSPPPGQPPRPGGRLGGVSPQPGQPPRPGGNFMVLWSTCRTTVFKSVTNRFIKNLACSGICASLVCVPFDIILSTSPHCCWWIYTMLFCKVVKFLHKVFCSVTILSFPAIALDRYYSVLYPLERKISDAKSRELVMYIWAHAVVASVPVFAVTNVADIYATSTCTEVWSNSLGHLVYVLVYNITTVIVPVVVVFLFLILIRRALSASQKKKVIIAALRTPQNTISIPYASQREAELHATLLSMVMVFILCSVPYATLVVYQTVLNVPDTSVFLLLTAVWLPKVSLLANPVLFLTVNKSVRKCLIGTLVQLHHRYSRRNVVSTGSGMAEASLEPSIRSGSQLLEMFHIGQQQIFKPTEDEEESEAKYIGSADFQAKEIFSTCLEGEQGPQFAPSAPPLSTVDSVSQVAPAAPVEPETFPDKYSLQFGFGPFELPPQWLSETRNSKKRLLPPLGNTPEELIQTKVPKVGRVERKMSRNNKVSIFPKVDS

SEQ ID NO: 11583 - protein, 527 aa, Artificial Sequence; identical to SEQ ID NO: 11582
  Synthetic polypeptide

SEQ ID NO: 11584 - protein, 130 aa, Artificial Sequence
  Synthetic polypeptide
GAPLPGRPYWEVRSPSARPAAPSGREVGGSAPRPASRPVREGGWGGSAPNPASRPVREETSWCYGQLAAQPCSNLSPTGSLKTWPARGFVPAWSVCPSTSSSAPVLTVAGGSTPCSSARSSNFCTKYSAL

SEQ ID NO: 11585 - protein, 130 aa, Artificial Sequence; identical to SEQ ID NO: 11584
  Synthetic polypeptide

SEQ ID NO: 11586 - protein, 468 aa, Artificial Sequence
  Synthetic polypeptide
PPPGQPPRPGGNFMVLWSTCRTTVFKSVTNRFIKNLACSGICASLVCVPFDIILSTSPHCCWWIYTMLFCKVVKFLHKVFCSVTILSFPAIALDRYYSVLYPLERKISDAKSRELVMYIWAHAVVASVPVFAVTNVADIYATSTCTEVWSNSLGHLVYVLVYNITTVIVPVVVVFLFLILIRRALSASQKKKVIIAALRTPQNTISIPYASQREAELHATLLSMVMVFILCSVPYATLVVYQTVLNVPDTSVFLLLTAVWLPKVSLLANPVLFLTVNKSVRKCLIGTLVQLHHRYSRRNVVSTGSGMAEASLEPSIRSGSQLLEMFHIGQQQIFKPTEDEEESEAKYIGSADFQAKEIFSTCLEGEQGPQFAPSAPPLSTVDSVSQVAPAAPVEPETFPDKYSLQFGFGPFELPPQWLSETRNSKKRLLPPLGNTPEELIQTKVPKVGRVERKMSRNNKVSIFPKVDS

SEQ ID NO: 11587 - protein, 468 aa, Artificial Sequence; identical to SEQ ID NO: 11586
  Synthetic polypeptide

SEQ ID NO: 11588 - protein, 82 aa, Artificial Sequence
  Synthetic polypeptide
PRLASRPVREETSWCYGQLAAQPCSNLSPTGSLKTWPARGFVPAWSVCPSTSSSAPVLTVAGGSTPCSSARSSNFCTKYSAL

SEQ ID NO: 11589 - protein, 82 aa, Artificial Sequence; identical to SEQ ID NO: 11588
  Synthetic polypeptide

SEQ ID NO: 11590 - protein, 32 aa, Artificial Sequence
  Synthetic polypeptide
PAWPAAPSGRKLHGVMVNLPHNRVQICHQQVH

SEQ ID NO: 11591 - protein, 32 aa, Artificial Sequence; identical to SEQ ID NO: 11590
  Synthetic polypeptide

SEQ ID NO: 11592 - protein, 110 aa, Artificial Sequence
  Synthetic polypeptide
PPRPGGRWGGQPPARPAAPSGREVGGSAPNPASRPVREETSWCYGQLAAQPCSNLSPTGSLKTWPARGFVPAWSVCPSTSSSAPVLTVAGGSTPCSSARSSNFCTKYSAL

SEQ ID NO: 11593 - protein, 110 aa, Artificial Sequence; identical to SEQ ID NO: 11592
  Synthetic polypeptide

SEQ ID NO: 11594 - protein, 65 aa, Artificial Sequence
  Synthetic polypeptide
PCQASRPVREGGGGVSPPPGQPPRPGGRWGGQPPTRPAAPSGRKLHGVMVNLPHNRVQICHQQVH

SEQ ID NO: 11595 - protein, 65 aa, Artificial Sequence; identical to SEQ ID NO: 11594
  Synthetic polypeptide

SEQ ID NO: 11596 - protein, 500 aa, Artificial Sequence
  Synthetic polypeptide
PARLAAPSGREVGGSAPRPASRPVREGGGGVSPQPGQPPRPGGNFMVLWSTCRTTVFKSVTNRFIKNLACSGICASLVCVPFDIILSTSPHCCWWIYTMLFCKVVKFLHKVFCSVTILSFPAIALDRYYSVLYPLERKISDAKSRELVMYIWAHAVVASVPVFAVTNVADIYATSTCTEVWSNSLGHLVYVLVYNITTVIVPVVVVFLFLILIRRALSASQKKKVIIAALRTPQNTISIPYASQREAELHATLLSMVMVFILCSVPYATLVVYQTVLNVPDTSVFLLLTAVWLPKVSLLANPVLFLTVNKSVRKCLIGTLVQLHHRYSRRNVVSTGSGMAEASLEPSIRSGSQLLEMFHIGQQQIFKPTEDEEESEAKYIGSADFQAKEIFSTCLEGEQGPQFAPSAPPLSTVDSVSQVAPAAPVEPETFPDKYSLQFGFGPFELPPQWLSETRNSKKRLLPPLGNTPEELIQTKVPKVGRVERKMSRNNKVSIFPKVDS

SEQ ID NO: 11597 - protein, 500 aa, Artificial Sequence; identical to SEQ ID NO: 11596
  Synthetic polypeptide

SEQ ID NO: 11598 - protein, 472 aa, Artificial Sequence
  Synthetic polypeptide
EVRRPSARQPPRLRRNFMVLWSTCRTTVFKSVTNRFIKNLACSGICASLVCVPFDIILSTSPHCCWWIYTMLFCKVVKFLHKVFCSVTILSFPAIALDRYYSVLYPLERKISDAKSRELVMYIWAHAVVASVPVFAVTNVADIYATSTCTEVWSNSLGHLVYVLVYNITTVIVPVVVVFLFLILIRRALSASQKKKVIIAALRTPQNTISIPYASQREAELHATLLSMVMVFILCSVPYATLVVYQTVLNVPDTSVFLLLTAVWLPKVSLLANPVLFLTVNKSVRKCLIGTLVQLHHRYSRRNVVSTGSGMAEASLEPSIRSGSQLLEMFHIGQQQIFKPTEDEEESEAKYIGSADFQAKEIFSTCLEGEQGPQFAPSAPPLSTVDSVSQVAPAAPVEPETFPDKYSLQFGFGPFELPPQWLSETRNSKKRLLPPLGNTPEELIQTKVPKVGRVERKMSRNNKVSIFPKVDS

SEQ ID NO: 11599 - protein, 472 aa, Artificial Sequence; identical to SEQ ID NO: 11598
  Synthetic polypeptide

SEQ ID NO: 11600 - protein, 73 aa, Artificial Sequence
  Synthetic polypeptide
EETSWCYGQLAAQPCSNLSPTGSLKTWPARGFVPAWSVCPSTSSSAPVLTVAGGSTPCSSARSSNFCTKYSAL

SEQ ID NO: 11601 - protein, 73 aa, Artificial Sequence; identical to SEQ ID NO: 11600
  Synthetic polypeptide

SEQ ID NO: 11602 - protein, 85 aa, Artificial Sequence
  Synthetic polypeptide
GASLPGRPSSEMWGAPLPCRPVWDVRSTSARPRPCLGGEEHLCLPPPLRSEETLCPATAPSEKKLHGVMVNLPHNRVQICHQQVH

SEQ ID NO: 11603 - protein, 85 aa, Artificial Sequence; identical to SEQ ID NO: 11602
  Synthetic polypeptide

SEQ ID NO: 11604 - protein, 14 aa, Artificial Sequence
  Synthetic polypeptide
GAPLPGRDPVWEVH

SEQ ID NO: 11605 - protein, 14 aa, Artificial Sequence
  Synthetic polypeptide
GAPLPGRDPVWEVH

SEQ ID NO: 11606 - protein, 14 aa, Artificial Sequence
  Synthetic polypeptide
GAPLPGRDPVWEVH

SEQ ID NO: 11607 - protein, 464 aa, Artificial Sequence
  Synthetic polypeptide
DVGSASALPPRLGCEEHLCPAATLSGRFIKNLACSGICASLVCVPFDIILSTSPHCCWWIYTMLFCKVVKFLHKVFCSVTILSFPAIALDRYYSVLYPLERKISDAKSRELVMYIWAHAVVASVPVFAVTNVADIYATSTCTEVWSNSLGHLVYVLVYNITTVIVPVVVVFLFLILIRRALSASQKKKVIIAALRTPQNTISIPYASQREAELHATLLSMVMVFILCSVPYATLVVYQTVLNVPDTSVFLLLTAVWLPKVSLLANPVLFLTVNKSVRKCLIGTLVQLHHRYSRRNVVSTGSGMAEASLEPSIRSGSQLLEMFHIGQQQIFKPTEDEEESEAKYIGSADFQAKEIFSTCLEGEQGPQFAPSAPPLSTVDSVSQVAPAAPVEPETFPDKYSLQFGFGPFELPPQWLSETRNSKKRLLPPLGNTPEELIQTKVPKVGRVERKMSRNNKVSIFPKVDS

SEQ ID NO: 11608 - protein, 464 aa, Artificial Sequence; identical to SEQ ID NO: 11607
  Synthetic polypeptide

SEQ ID NO: 11609 - protein, 464 aa, Artificial Sequence; identical to SEQ ID NO: 11607
  Synthetic polypeptide

SEQ ID NO: 11610 - protein, 89 aa, Artificial Sequence
  Synthetic polypeptide
GASLPGRPSSEMWGAPLPCRPVWDVRSTSARPRPCLGGSLKTWPARGFVPAWSVCPSTSSSAPVLTVAGGSTPCSSARSSNFCTKYSAL

SEQ ID NO: 11611 - protein, 89 aa, Artificial Sequence; identical to SEQ ID NO: 11610
  Synthetic polypeptide

SEQ ID NO: 11612 - protein, 89 aa, Artificial Sequence; identical to SEQ ID NO: 11610
  Synthetic polypeptide

SEQ ID NO: 11613 - protein, 84 aa, Artificial Sequence
  Synthetic polypeptide
GAPLPGRDPVWEETSWCYGQLAAQPCSNLSPTGSLKTWPARGFVPAWSVCPSTSSSAPVLTVAGGSTPCSSARSSNFCTKYSAL

SEQ ID NO: 11614 - protein, 84 aa, Artificial Sequence; identical to SEQ ID NO: 11613
  Synthetic polypeptide

SEQ ID NO: 11615 - protein, 49 aa, Artificial Sequence
  Synthetic polypeptide
DVGSASALPPRLGCEEHLCPAATLSGRKLHGVMVNLPHNRVQICHQQVH

SEQ ID NO: 11616 - protein, 49 aa, Artificial Sequence; identical to SEQ ID NO: 11615
  Synthetic polypeptide

SEQ ID NO: 11617 - protein, 495 aa, Artificial Sequence
  Synthetic polypeptide
GASLPGRPSSEMWGAPLPCRPVWDVRSTSARPRPCLGGNFMVLWSTCRTTVFKSVTNRFIKNLACSGICASLVCVPFDIILSTSPHCCWWIYTMLFCKVVKFLHKVFCSVTILSFPAIALDRYYSVLYPLERKISDAKSRELVMYIWAHAVVASVPVFAVTNVADIYATSTCTEVWSNSLGHLVYVLVYNITTVIVPVVVVFLFLILIRRALSASQKKKVIIAALRTPQNTISIPYASQREAELHATLLSMVMVFILCSVPYATLVVYQTVLNVPDTSVFLLLTAVWLPKVSLLANPVLFLTVNKSVRKCLIGTLVQLHHRYSRRNVVSTGSGMAEASLEPSIRSGSQLLEMFHIGQQQIFKPTEDEEESEAKYIGSADFQAKEIFSTCLEGEQGPQFAPSAPPLSTVDSVSQVAPAAPVEPETFPDKYSLQFGFGPFELPPQWLSETRNSKKRLLPPLGNTPEELIQTKVPKVGRVERKMSRNNKVSIFPKVDS

SEQ ID NO: 11618 - protein, 495 aa, Artificial Sequence; identical to SEQ ID NO: 11617
  Synthetic polypeptide

SEQ ID NO: 11619 - protein, 308 aa, Artificial Sequence
  Synthetic polypeptide
TQDMERLSEELLLPLLSQPTLGSLWDSLRHCSLLCNPLSCVPALEAPPSLVSLGCSGGCPRLSLAGSASPFPFLTALLSLLNTLAQIHKGLCGQLAAILAAPGLQNYFLQCVAPGAAPHLTPFSAWALRHEYHLQYLALALAQKAAALQPLPATHAALYHGMALALLSRLLPGSEYLTHELLLSCVFRLEFLPCLCPWSVTQCLLKTTWPSFSSTSGPWLLVRSAHVGAPCSMLWLWLMSIASSSLRTHRAQMRSKLPAGVCCRKHGCWQMRVSGSTSCTISFPIPRSQRALSSILSCPLCVSTTSRD

SEQ ID NO: 11620 - protein, 64 aa, Artificial Sequence
  Synthetic polypeptide
SRHLGRPRRADHETGLANVVKSLHKISQVWWRVPEIPATREAEAGESLEPRTWSACQRSCCCHC

SEQ ID NO: 11621 - protein, 64 aa, Artificial Sequence; identical to SEQ ID NO: 11620
  Synthetic polypeptide

SEQ ID NO: 11622 - protein, 64 aa, Artificial Sequence; identical to SEQ ID NO: 11620
  Synthetic polypeptide

SEQ ID NO: 11623 - protein, 56 aa, Artificial Sequence
  Synthetic polypeptide
NLYIKLARFGGGCLKSQLLGRLRQENHLNPGHGAPVRGAAAATAESAHTGQPVGFP

SEQ ID NO: 11624 - protein, 56 aa, Artificial Sequence; identical to SEQ ID NO: 11623
  Synthetic polypeptide

SEQ ID NO: 11625 - protein, 56 aa, Artificial Sequence; identical to SEQ ID NO: 11623
  Synthetic polypeptide

SEQ ID NO: 11626 - protein, 573 aa, Artificial Sequence
  Synthetic polypeptide
TQDMERLSEELLLPLLSQPTLGSLWDSLRHCSLLCNPLSCVPALEAPPSLVSLGCSGGCPRLSLAGSASPFPFLTALLSLLNTLAQIHKGLCGQLAAILAAPGLQNYFLQCVAPGAAPHLTPFSAWALRHEYHLQYLALALAQKAAALQPLPATHAALYHGMALALLSRLLPGSEYLTHELLLSCVFRLEFLPERTSGGPEAADFSDQLSLGSSRVPRCGQGTLLAQACQDLPSIRNCYLTHCSPARASLLASQALHRGELQRVPTLLLPMPTEPLLPTDWPFLPLIRLYHRASDTPSGLSPTDTMGTAMRVLQWVLVLESWRPQALWAVPPAARLARLMCVFLVDSELFRESPVQHLVAALLAQLCQPQVLPNLNLDCRLPGLTSFPDLYANFLDHFEAVSFGDHLFGALVLLPLQRRFSVTLRLALFGEHVGALRALSLPLTQLPVSLECYTVPPEDNLALLQLYFRTLVTGALRPRWCPVLYAVAVAHVNSFIFSQDPQSSDEVKAARRSMLQKTWLLADEGLRQHLLHYKLPNSTLPEGFELYSQLPPLRQHYLQRLTSTVLQNGVSET

SEQ ID NO: 11627 - protein, 495 aa, Artificial Sequence
  Synthetic polypeptide
TQDMERLSEELLLPLLSQPTLGSLWDSLRHCSLLCNPLSCVPALEAPPSLVSLGCSGGCPRLSLAGSASPFPFLTALLSLLNTLAQIHKGLCGQLAAILAAPGLQNYFLQCVAPGAAPHLTPFSAWALRHEYHLQYLALALAQKAAALQPLPATHAALYHGMALALLSRLLPGSEYLTHELLLSCVFRLEFLPERTSGGPEAADFSDQLSLGSSRVPRCGQGTLLAQACQDLPSIRNCYLTHCSPARASLLASQALHRGELQRVPTLLLPMPTEPLLPTDWPFLPLIRLYHRASDTPSGLSPTDTMGTAMRVLQWVLVLESWRPQALWAVPPAARLARLMCVFLVDSELFRESPVQHLVAALLAQLCQPQVLPNLNLDCRLPGLTSFPDLYANFLDHFEAVSFGDHLFGALVLLPLQRRFSVTLRLALFGEHVGALRALSLPLTQVLSQPSRTCKGTLHWASGAVLSLEELWKTSASSSYLLGALRGLRESMKRA

SEQ ID NO: 11628 - protein, 106 aa, Artificial Sequence
  Synthetic polypeptide
QAYLVLLCFALLHFADVAFFQIESLWQACLEQVYGSHFSNSMCSLPVSVSHFEKDGGALITGQGKQSEQPYNLVWTLYNIHYSFSITRNPVNNEFGYSLFVWTSPY

SEQ ID NO: 11629 - protein, 105 aa, Artificial Sequence
  Synthetic polypeptide
RHTSFYYASPYCTLQMLHFFKLRVCGKPALSKSMGAIFPTACAHFLSLCLILKKMEELLLLAKESSRSNHTIWFGHFTTSTILSPSPGIRSIMSSAIAYLCGHLH

SEQ ID NO: 11630 - protein, 125 aa, Artificial Sequence
  Synthetic polypeptide
QAYLVLLCFALLHFADVAFFQIESLWQACLEQVYGSHFSNSMCSLPVSVSHFEKDGGALITGQGKQSEQPYNLVWTLYNIHYSFSITRNPVNNEFGYSLFVWTSPYTWWTDACFAHSSLPGHFGT

SEQ ID NO: 11631 - protein, 125 aa, Artificial Sequence; identical to SEQ ID NO: 11630
  Synthetic polypeptide

SEQ ID NO: 11632 - protein, 489 aa, Artificial Sequence
  Synthetic polypeptide
RHTSFYYASPYCTLQMLHFFKLRVCGKPALSKSMGAIFPTACAHFLSLCLILKKMEELLLLAKESSRSNHTIWFGHFTTSTILSPSPGIRSIMSSAIAYLCGHLHTLGGLMPVLHTRHFQGTLELEVGDWKDNRRYRIFAFDHDLFSFADLIFGKWPVVLITNPKSLLYSCGEHEPLERLLHSTHIRVLAFSLSSITSVTVKIDGVHLGQAVHVSGPIFVLKWNPRNYSSGTHNIEVIVQDSAGRSKSVHHIFSVQENNHLSFDPLASFILRTDHYIMARVLFVLIVLSQLTILIIFRYRGYPELKEPSGFINLTSFSLHVLSKINIFYYSVLLLTLYTVLGPWFFGEIIDGKFGCCFSFGIFVNGHFLQGSITFIIGILQLAFFNIPLMAYMCWSLLQRCFGHNFRSHLHQRKYLKIMPVHLLMLLLYIWQVYSCYFLYATYGTLAFLFSPLRTWLTLLTPVLIRYVWTLNSTKFGIFMVQLKSHLSS

SEQ ID NO: 11633 - protein, 454 aa, Artificial Sequence
  Synthetic polypeptide
RHTSFYYASPYCTLQMLHFFKLRVCGKPALSKSMGAIFPTACAHFLSLCLILKKMEELLLLAKESSRSNHTIWFGHFTTSTILSPSPGIRSIMSSAIAYLCGHLHTLGGLMPVLHTRHFQGTLELEVGDWKDNRRYRIFAFDHDLFSFADLIFGKWPVVLITNPKSLLYSCGEHEPLERLLHSTHIRVLAFSLSSITSVTVKIDGVHLGQAVHVSGPIFVLKWNPRNYSSGTHNIEVIVQDSAGRSKSVHHIFSVQENNHLSFDPLASFILRTDHYIMARVLFVLIVLSQLTILIIFRYRGYPELKGPWFFGEIIDGKFGCCFSFGIFVNGHFLQGSITFIIGILQLAFFNIPLMAYMCWSLLQRCFGHNFRSHLHQRKYLKIMPVHLLMLLLYIWQVYSCYFLYATYGTLAFLFSPLRTWLTLLTPVLIRYVWTLNSTKFGIFMVQLKSHLSS

SEQ ID NO: 11634 - protein, 17 aa, Artificial Sequence
  Synthetic polypeptide
HRRRVISAFPSENLQGL

SEQ ID NO: 11635 - protein, 47 aa, Artificial Sequence
  Synthetic polypeptide
FLHFHLRTFRVYKSDLIFSSCLEQNKHLLLFCVVVDPVYSAGSMVFW

SEQ ID NO: 11636 - protein, 29 aa, Artificial Sequence
  Synthetic polypeptide
PSGLESLGSRWTLLEVSWIQISLSKILLA

SEQ ID NO: 11637 - protein, 29 aa, Artificial Sequence
  Synthetic polypeptide
PSGLESLGSRWTLLEVSWIQISLSKILLA

SEQ ID NO: 11638 - protein, 29 aa, Artificial Sequence
  Synthetic polypeptide
PSGLESLGSRWTLLEVSWIQISLSKILLA

SEQ ID NO: 11639 - protein, 29 aa, Artificial Sequence
  Synthetic polypeptide
PSGLESLGSRWTLLEVSWIQISLSKILLA

SEQ ID NO: 11640 - protein, 36 aa, Artificial Sequence
  Synthetic polypeptide
RGQNDLPALSPWGADGPYWKSVGFRFLSARYSLPDN

SEQ ID NO: 11641 - protein, 36 aa, Artificial Sequence; identical to SEQ ID NO: 11640
  Synthetic polypeptide

SEQ ID NO: 11642 - protein, 36 aa, Artificial Sequence; identical to SEQ ID NO: 11640
  Synthetic polypeptide

SEQ ID NO: 11643 - protein, 36 aa, Artificial Sequence; identical to SEQ ID NO: 11640
  Synthetic polypeptide

SEQ ID NO: 11644 - protein, 1927 aa, Artificial Sequence
  Synthetic polypeptide
VPGEQMDPTGSQLDSDFSQQDTPCLIIEDSQPESQVLEDDSGSHFSMLSRHLPNLQTHKENPVLDVVSNPEQTAGEERGDGNSGFNEHLKENKVADPVDSSNLDTCGSISQVIEQLPQPNRTSSVLGMSVESAPAVEEEKGEELEQKEKEKEEDTSGNTTHSLGAEDTASSQLGFGVLELSQSQDVEENTVPYEVDKEQLQSVTTNSGYTRLSDVDANTAIKHEEQSNEDIPIAEQSSKDIPVTAQPSKDVHVVKEQNPPPARSEDMPFSPKASVAAMEAKEQLSAQELMESGLQIQKSPEPEVLSTQEDLFDQSNKTVSSDGCSTPSREEGGCSLASTPATTLHLLQLSGQRSLVQDSLSTNSSDLVAPSPDAFRSTPFIVPSSPTEQEGRQDKPMDTSVLSEEGGEPFQKKLQSGEPVELENPPLLPESTVSPQASTPISQSTPVFPPGSLPIPSQPQFSHDIFIPSPSLEEQSNDGKKDGDMHSSSLTVECSKTSEIEPKNSPEDLGLSLTGDSCKLMLSTSEYSQSPKMESLSSHRIDEDGENTQIEDTEPMSPVLNSKFVPAENDSILMNPAQDGEVQLSQNDDKTKGDDTDTRDDISILATGCKGREETVAEDVCIDLTCDSGSQAVPSPATRSEALSSVLDQEEAMEIKEHHPEEGSSGSEVEEIPETPCESQGEELKEENMESVPLHLSLTETQSQGLCLQKEMPKKECSEAMEVETSVISIDSPQKLAILDQELEHKEQEAWEEATSEDSSVVIVDVKEPSPRVDVSCEPLEGVEKCSDSQSWEDIAPEIEPCAENRLDTKEEKSVEYEGDLKSGTAETEPVEQDSSQPSLPLVRADDPLRLDQELQQPQTQEKTSNSLTEDSKMANAKQLSSDAEAQKLGKPSAHASQSFCESSSETPFHFTLPKEGDIIPPLTGATPPLIGHLKLEPKRHSTPIGISNYPESTIATSDVMSESMVETHDPILGSGKGDSGAAPDVDDKLCLRMKLVSPETEASEESLQFNLEKPATGERKNGSTAVAESVASPQKTMSVLSCICEARQENEARSEDPPTTPIRGNLLHFPSSQGEEEKEKLEGDHTIRQSQQPMKPISPVKDPVSPASQKMVIQGPSSPQGEAMVTDVLEDQKEGRSTNKENPSKALIERPSQNNIGIQTMECSLRVPETVSAATQTIKNVCEQGTSTVDQNFGKQDATVQTERGSGEKPVSAPGDDTESLHSQGEEEFDMPQPPHGHVLHRHMRTIREVRTLVTRVITDVYYVDGTEVERKVTEETEEPIVECQECETEVSPSQTGGSSGDLGDISSFSSKASSLHRTSSGTSLSAMHSSGSSGKGAGPLRGKTSGTEPADFALPSSRGGPGKLRETAVPGPLGIEDISPNLSPDDKSFSRVVPRVPDSTRRTDVGAGALRRSDSPEIPFQAAAGPSDGLDASSPGNSFVGLRVVAKWSSNGYFYSGKITRDVGAGKYKLLFDDGYECDVLGKDILLCDPIPLDTEVTALSEDEYFSAGVVKGHRKESGELYYSIEKEGQRKWYKRMAVILSLEQGNRLREQYGLGPYEAVTPLTKAADISLDNLVEGKRKRRSNVSSPATPTASSSSSTTPTRKITESPRASMGVLSGKRKLITSEEERSPAKRGRKSATVKPGAVGAGEFVSPCESGDNTGEPSALEEQRGPLPLNKTLFLGYAFLLTMATTSDKLASRSKLPDGPTGSSEEEEEFLEIPPFNKQYTESQLRAGAGYILEDFNEAQCNTAYQCLLIADQHCRTRKYFLCLASGIPCVSHVWVHDSCHANQLQNYRNYLLPAGYSLEEQRILDWQPRENPFQNLKVLLVSDQQQNFLELWSEILMTGGAASVKQHHSSAHNKDIALGVFDVVVTDPSCPASVLKCAEALQLPVVSQEWVIQCLIVGERIGFKQHPKYKHDYVSH

SEQ ID NO: 11645 - protein, 1977 aa, Artificial Sequence
  Synthetic polypeptide
VPGEQMDPTGSQLDSDFSQQDTPCLIIEDSQPESQVLEDDSGSHFSMLSRHLPNLQTHKENPVLDVVSNPEQTAGEERGDGNSGFNEHLKENKVADPVDSSNLDTCGSISQVIEQLPQPNRTSSVLGMSVESAPAVEEEKGEELEQKEKEKEEDTSGNTTHSLGAEDTASSQLGFGVLELSQSQDVEENTVPYEVDKEQLQSVTTNSGYTRLSDVDANTAIKHEEQSNEDIPIAEQSSKDIPVTAQPSKDVHVVKEQNPPPARSEDMPFSPKASVAAMEAKEQLSAQELMESGLQIQKSPEPEVLSTQEDLFDQSNKTVSSDGCSTPSREEGGCSLASTPATTLHLLQLSGQRSLVQDSLSTNSSDLVAPSPDAFRSTPFIVPSSPTEQEGRQDKPMDTSVLSEEGGEPFQKKLQSGEPVELENPPLLPESTVSPQASTPISQSTPVFPPGSLPIPSQPQFSHDIFIPSPSLEEQSNDGKKDGDMHSSSLTVECSKTSEIEPKNSPEDLGLSLTGDSCKLMLSTSEYSQSPKMESLSSHRIDEDGENTQIEDTEPMSPVLNSKFVPAENDSILMNPAQDGEVQLSQNDDKTKGDDTDTRDDISILATGCKGREETVAEDVCIDLTCDSGSQAVPSPATRSEALSSVLDQEEAMEIKEHHPEEGSSGSEVEEIPETPCESQGEELKEENMESVPLHLSLTETQSQGLCLQKEMPKKECSEAMEVETSVISIDSPQKLAILDQELEHKEQEAWEEATSEDSSVVIVDVKEPSPRVDVSCEPLEGVEKCSDSQSWEDIAPEIEPCAENRLDTKEEKSVEYEGDLKSGTAETEPVEQDSSQPSLPLVRADDPLRLDQELQQPQTQEKTSNSLTEDSKMANAKQLSSDAEAQKLGKPSAHASQSFCESSSETPFHFTLPKEGDIIPPLTGATPPLIGHLKLEPKRHSTPIGISNYPESTIATSDVMSESMVETHDPILGSGKGDSGAAPDVDDKLCLRMKLVSPETEASEESLQFNLEKPATGERKNGSTAVAESVASPQKTMSVLSCICEARQENEARSEDPPTTPIRGNLLHFPSSQGEEEKEKLEGDHTIRQSQQPMKPISPVKDPVSPASQKMVIQGPSSPQGEAMVTDVLEDQKEGRSTNKENPSKALIERPSQNNIGIQTMECSLRVPETVSAATQTIKNVCEQGTSTVDQNFGKQDATVQTERGSGEKPVSAPGDDTESLHSQGEEEFDMPQPPHGHVLHRHMRTIREVRTLVTRVITDVYYVDGTEVERKVTEETEEPIVECQECETEVSPSQTGGSSGDLGDISSFSSKASSLHRTSSGTSLSAMHSSGSSGKGAGPLRGKTSGTEPADFALPSSRGGPGKLSPRKGVSQTGTPVCEEDGDAGLGIRQGGKAPVTPRGRGRRGRPPSRTTGTRETAVPGPLGIEDISPNLSPDDKSFSRVVPRVPDSTRRTDVGAGALRRSDSPEIPFQAAAGPSDGLDASSPGNSFVGLRVVAKWSSNGYFYSGKITRDVGAGKYKLLFDDGYECDVLGKDILLCDPIPLDTEVTALSEDEYFSAGVVKGHRKESGELYYSIEKEGQRKWYKRMAVILSLEQGNRLREQYGLGPYEAVTPLTKAADISLDNLVEGKRKRRSNVSSPATPTASSSSSTTPTRKITESPRASMGVLSGKRKLITSEEERSPAKRGRKSATVKPGAVGAGEFVSPCESGDNTGEPSALEEQRGPLPLNKTLFLGYAFLLTMATTSDKLASRSKLPDGPTGSSEEEEEFLEIPPFNKQYTESQLRAGAGYILEDFNEAQCNTAYQCLLIADQHCRTRKYFLCLASGIPCVSHVWVHDSCHANQLQNYRNYLLPAGYSLEEQRILDWQPRENPFQNLKVLLVSDQQQNFLELWSEILMTGGAASVKQHHSSAHNKDIALGVFDVVVTDPSCPASVLKCAEALQLPVVSQEWVIQCLIVGERIGFKQHPKYKHDYVSH

SEQ ID NO: 11646 - protein, 1975 aa, Artificial Sequence
  Synthetic polypeptide
VPGEQMDPTGSQLDSDFSQQDTPCLIIEDSQPESQVLEDDSGSHFSMLSRHLPNLQTHKENPVLDVVSNPEQTAGEERGDGNSGFNEHLKENKVADPVDSSNLDTCGSISQVIEQLPQPNRTSSVLGMSVESAPAVEEEKGEELEQKEKEKEEDTSGNTTHSLGAEDTASSQLGFGVLELSQSQDVEENTVPYEVDKEQLQSVTTNSGYTRLSDVDANTAIKHEEQSNEDIPIAEQSSKDIPVTAQPSKDVHVVKEQNPPPARSEDMPFSPKASVAAMEAKEQLSAQELMESGLQIQKSPEPEVLSTQEDLFDQSNKTVSSDGCSTPSREEGGCSLASTPATTLHLLQLSGQRSLVQDSLSTNSSDLVAPSPDAFRSTPFIVPSSPTEQEGRQDKPMDTSVLSEEGGEPFQKKLQSGEPVELENPPLLPESTVSPQASTPISQSTPVFPPGSLPIPSQPQFSHDIFIPSPSLEEQSNDGKKDGDMHSSSLTVECSKTSEIEPKNSPEDLGLSLTGDSCKLMLSTSEYSQSPKMESLSSHRIDEDGENTQIEDTEPMSPVLNSKFVPAENDSILMNPAQDGEVQLSQNDDKTKGDDTDTRDDISILATGCKGREETVAEDVCIDLTCDSGSQAVPSPATRSEALSSVLDQEEAMEIKEHHPEEGSSGSEVEEIPETPCESQGEELKEENMESVPLHLSLTETQSQGLCLQKEMPKKECSEAMEVETSVISIDSPQKLAILDQELEHKEQEAWEEATSEDSSVVIVDVKEPSPRVDVSCEPLEGVEKCSDSQSWEDIAPEIEPCAENRLDTKEEKSVEYEGDLKSGTAETEPVEQDSSQPSLPLVRADDPLRLDQELQQPQTQEKTSNSLTEDSKMANAKQLSSDAEAQKLGKPSAHASQSFCESSSETPFHFTLPKEGDIIPPLTGATPPLIGHLKLEPKRHSTPIGISNYPESTIATSDVMSESMVETHDPILGSGKGDSGAAPDVDDKLCLRMKLVSPETEASEESLQFNLEKPATGERKNGSTAVAESVASPQKTMSVLSCICEARQENEARSEDPPTTPIRGNLLHFPSSQGEEEKEKLEGDHTIRQSQQPMKPISPVKDPVSPASQKMVIQGPSSPQGEAMVTDVLEDQKEGRSTNKENPSKALIERPSQNNIGIQTMECSLRVPETVSAATQTIKNVCEQGTSTVDQNFGKQDATVQTERGSGEKPVSAPGDDTESLHSQGEEEFDMPQPPHGHVLHRHMRTIREVRTLVTRVITDVYYVDGTEVERKVTEETEEPIVECQECETEVSPSQTGGSSGDLGDISSFSSKASSLHRTSSGTSLSAMHSSGSSGKGAGPLRGKTSGTEPADFALPSSRGGPGKLSPRKGVSQTGTPVCEEDGDAGLGIRQGGKAPVTPRGRGRRGRPPSRTTGTRETAVPGPLGIEDISPNLSPDDKSFSRVVPRVPDSTRRTDVGAGALRRSDSPEIPFQAAAGPSDGLDASSPGNSFVGLRVVAKWSSNGYFYSGKITRDVGAGKYKLLFDDGYECDVLGKDILLCDPIPLDTEVTALSEDEYFSAGVVKGHRKESGELYYSIEKEGQRKWYKRMAVILSLEQGNRLREQYGLGPYEAVTPLTKAADISLDNLVEGKRKRRSNVSSPATPTASSSSSTTPTRKITESPRASMGVLSGKRKLITSEEERSPAKRGRKSATVKPVGAGEFVSPCESGDNTGEPSALEEQRGPLPLNKTLFLGYAFLLTMATTSDKLASRSKLPDGPTGSSEEEEEFLEIPPFNKQYTESQLRAGAGYILEDFNEAQCNTAYQCLLIADQHCRTRKYFLCLASGIPCVSHVWVHDSCHANQLQNYRNYLLPAGYSLEEQRILDWQPRENPFQNLKVLLVSDQQQNFLELWSEILMTGGAASVKQHHSSAHNKDIALGVFDVVVTDPSCPASVLKCAEALQLPVVSQEWVIQCLIVGERIGFKQHPKYKHDYVSH

SEQ ID NO: 11647 - protein, 1033 aa, Artificial Sequence
  Synthetic polypeptide
VPGEQMDPTGSQLDSDFSQQDTPCLIIEDSQPESQVLEDDSGSHFSMLSRHLPNLQTHKENPVLDVVSNPEQTAGEERGDGNSGFNEHLKENKVADPVDSSNLDTCGSISQVIEQLPQPNRTSSVLGMSVESAPAVEEEKGEELEQKEKEKEEDTSGNTTHSLGAEDTASSQLGFGVLELSQSQDVEENTVPYEVDKEQLQSVTTNSGYTRLSDVDANTAIKHEEQSNEDIPIAEQSSKDIPVTAQPSKDVHVVKEQNPPPARSEDMPFSPKASVAAMEAKEQLSAQELMESGLQIQKSPEPEVLSTQEDLFDQSNKTVSSDGCSTPSREEGGCSLASTPATTLHLLQLSGQRSLVQDSLSTNSSDLVAPSPDAFRSTPFIVPSSPTEQEGRQDKPMDTSVLSEEGGEPFQKKLQSGEPVELENPPLLPESTVSPQASTPISQSTPVFPPGSLPIPSQPQFSHDIFIPSPSLEEQSNDGKKDGDMHSSSLTVECSKTSEIEPKNSPEDLGLSLTGDSCKLMLSTSEYSQSPKMESLSSHRIDEDGENTQIEDTEPMSPVLNSKFVPAENDSILMNPAQDGEVQLSQNDDKTKGDDTDTRDDISILATGCKGREETVAEDVCIDLTCDSGSQAVPSPATRSEALSSVLDQEEAMEIKEHHPEEGSSGSEVEEIPETPCESQGEELKEENMESVPLHLSLTETQSQGLCLQKEMPKKECSEAMEVETSVISIDSPQKLAILDQELEHKEQEAWEEATSEDSSVVIVDVKEPSPRVDVSCEPLEGVEKCSDSQSWEDIAPEIEPCAENRLDTKEEKSVEYEGDLKSGTAETEPVEQDSSQPSLPLVRADDPLRLDQELQQPQTQEKTSNSLTEDSKMANAKQLSSDAEAQKLGKPSAHASQSFCESSSGISNYPESTIATSDVMSESMVETHDPILGSGKGDSGAAPDVDDKLCLRMKLVSPETEASEESLQFNLEKPATGERKNGSTAVAESVASPQKTMSVLSCICEARQENEARSEDPPTTPIRGNLLHFPSS

SEQ ID NO: 11648 - protein, 140 aa, Artificial Sequence
  Synthetic polypeptide
DFLHFRLLWGLSEIQVERLIQERGWEFMWNERLGYILTCPSNLGTGLRAGVHIKLPLLSKDSRFPKILENLRLQKRGTGGVDTAATGGVFDISNLDRLGKSEVELVQLVIDGVNYLIDCERRLERGQDIRIPTPVIHTKH

SEQ ID NO: 11649 - protein, 140 aa, Artificial Sequence; identical to SEQ ID NO: 11648
  Synthetic polypeptide

SEQ ID NO: 11650 - protein, 25 aa, Artificial Sequence
  Synthetic polypeptide
VKYRWRDLSKNVAGSSCGMSVWDTS

SEQ ID NO: 11651 - protein, 25 aa, Artificial Sequence
  Synthetic polypeptide
VKYRWRDLSKNVAGSSCGMSVWDTS

SEQ ID NO: 11652 - protein, 17 aa, Artificial Sequence
  Synthetic polypeptide
NTGGETYPRTWLGVHVE

SEQ ID NO: 11653 - protein, 17 aa, Artificial Sequence
  Synthetic polypeptide
NTGGETYPRTWLGVHVE

SEQ ID NO: 11654 - protein, 140 aa, Artificial Sequence; identical to SEQ ID NO: 11648
  Synthetic polypeptide

SEQ ID NO: 11655 - protein, 140 aa, Artificial Sequence; identical to SEQ ID NO: 11648
  Synthetic polypeptide

SEQ ID NO: 11656 - protein, 25 aa, Artificial Sequence
  Synthetic polypeptide
VKYRWRDLSKNVAGSSCGMSVWDTS

SEQ ID NO: 11657 - protein, 25 aa, Artificial Sequence
  Synthetic polypeptide
VKYRWRDLSKNVAGSSCGMSVWDTS

SEQ ID NO: 11658 - protein, 17 aa, Artificial Sequence
  Synthetic polypeptide
NTGGETYPRTWLGVHVE

SEQ ID NO: 11659 - protein, 17 aa, Artificial Sequence
  Synthetic polypeptide
NTGGETYPRTWLGVHVE

SEQ ID NO: 11660 - protein, 140 aa, Artificial Sequence; identical to SEQ ID NO: 11648
  Synthetic polypeptide

SEQ ID NO: 11661 - protein, 140 aa, Artificial Sequence; identical to SEQ ID NO: 11648
  Synthetic polypeptide

SEQ ID NO: 11662 - protein, 25 aa, Artificial Sequence
  Synthetic polypeptide
VKYRWRDLSKNVAGSSCGMSVWDTS

SEQ ID NO: 11663 - protein, 25 aa, Artificial Sequence
  Synthetic polypeptide
VKYRWRDLSKNVAGSSCGMSVWDTS

SEQ ID NO: 11664 - protein, 17 aa, Artificial Sequence
  Synthetic polypeptide
NTGGETYPRTWLGVHVE

SEQ ID NO: 11665 - protein, 17 aa, Artificial Sequence
  Synthetic polypeptide
NTGGETYPRTWLGVHVE

SEQ ID NO: 11666 - protein, 11 aa, Artificial Sequence
  Synthetic polypeptide
FHLHEMELSAT

SEQ ID NO: 11667 - protein, 11 aa, Artificial Sequence
  Synthetic polypeptide
FHLHEMELSAT

SEQ ID NO: 11668 - protein, 54 aa, Artificial Sequence
  Synthetic polypeptide
MNSKQNTVYASSGRLFSLKEENSDYMLLYDSTYMRWNCQPLEEAGRTSFSASQD

SEQ ID NO: 11669 - protein, 54 aa, Artificial Sequence; identical to SEQ ID NO: 11668
  Synthetic polypeptide

SEQ ID NO: 11670 - protein, 100 aa, Artificial Sequence
  Synthetic polypeptide
KAQATKLKIDKWDYIKLKSSCTAKENYQQSQKVKLQNNISYQMADIHHLKEQLAELRQEFLRQEDQLQDYRKNNTYLVKRLEYESKRPKRFNQMMERNWI

SEQ ID NO: 11671 - protein, 100 aa, Artificial Sequence; identical to SEQ ID NO: 11670
  Synthetic polypeptide

SEQ ID NO: 11672 - protein, 31 aa, Artificial Sequence
  Synthetic polypeptide
KAPVQQKKTINRVKRLNYRTTYRIRWQTYII

SEQ ID NO: 11673 - protein, 31 aa, Artificial Sequence; identical to SEQ ID NO: 11672
  Synthetic polypeptide

SEQ ID NO: 11674 - protein, 31 aa, Artificial Sequence; identical to SEQ ID NO: 11672
  Synthetic polypeptide

SEQ ID NO: 11675 - protein, 31 aa, Artificial Sequence; identical to SEQ ID NO: 11672
  Synthetic polypeptide

SEQ ID NO: 11676 - protein, 23 aa, Artificial Sequence
  Synthetic polypeptide
QMGLHQIEKLLYSKRKLSTESKG

SEQ ID NO: 11677 - protein, 23 aa, Artificial Sequence
  Synthetic polypeptide
QMGLHQIEKLLYSKRKLSTESKG

SEQ ID NO: 11678 - protein, 23 aa, Artificial Sequence
  Synthetic polypeptide
QMGLHQIEKLLYSKRKLSTESKG

SEQ ID NO: 11679 - protein, 23 aa, Artificial Sequence
  Synthetic polypeptide
QMGLHQIEKLLYSKRKLSTESKG

SEQ ID NO: 11680 - protein, 359 aa, Artificial Sequence
  Synthetic polypeptide
KAQATKLKIDKWDYIKLKSSCTAKENYQQSQKVKLQNNISYQMADIHHLKEQLAELRQEFLRQEDQLQDYRKNNTYLVKRLEYESFQCGQQMKELRAQHEENIKKLADQFLEEQKQETQKIQSNDGKELDINNQVVPKNIPKVAENVADKNEEPSSNHIPHGKEQIKRGGDAGMPGIEENDLAKVDDLPPALRKPPISVSQHESHQAISHLPTGQPLSPNMPPDSHINHNGNPGTSKQNPSSPLQRLIPGSNLDSEPRIQTDILKQATKDRVSDFHKLKQSRFFDENESPVDPQHGSKLADYNGDDGNVGEYEADKQAELAYNEEEDGDGGEEDVQDDEERELQMDPADYGKQHFNDVL

SEQ ID NO: 11681 - protein, 303 aa, Artificial Sequence
  Synthetic polypeptide
KAQATKLKIDKWDYIKLKSSCTAKENYQQSQKVKLQNNISYQMADIHHLKEQLAELRQEFLRQEDQLQDYRKNNTYLVKRLEYESFQCGQQMKELRAQHEENIKKLADQFLEEQKQETQKIQSNDGKELDINNQVVPKNIPKVAENVADKNEEPSSNHIPHGKEQIKRGGDAGMPGIEENDLAKVDDLPPALRKPPISVSQHESHQAISHLPTGQPLSPNMPPDSHINHNGNPGTSKQNPSSPLQRLIPGSNLDSEPRIQTDILKQATKDRVSDFHKLKQNDEERELQMDPADYGKQHFNDVL

SEQ ID NO: 11682 - protein, 89 aa, Artificial Sequence
  Synthetic polypeptide
FLGACLGFLQSDPSDGGPVQQHQGHLPHRTFWTTRTSGSRRVARTQRIGWTAWSSGPKRRKRSKWKKRKNGDTWSCRKSRGKGRKGRPW

SEQ ID NO: 11683 - protein, 89 aa, Artificial Sequence; identical to SEQ ID NO: 11682
  Synthetic polypeptide

SEQ ID NO: 11684 - protein, 441 aa, Artificial Sequence
  Synthetic polypeptide
FWGPVWDFSKAIRVMVDLCNSTKGICLTGPSGPPGPPGAGGLPGHNGLDGQPGPQGPKGEKGANGKRGKMGIPGAAGNPGERGEKGDHGELGLQGNEGPPGQKGEKGDKGDVSNDVLLAGAKGDQGPPGPPGPPGPPGPPGPPGSRRAKGPRQPSMFNGQCPGETCAIPNDDTLVGKADEKASEHHSPQAESMITSIGNPVQVLKVTETFGTWIRESANKSDDRIWVTEHFSGIMVKEFKDQPSLLNGSYTFIHLPYYFHGCGHVVYNNSLYYHKGGSNTLVRFEFGQETSQTLKLENALYFDRKYLFANSKTYFNLAVDEKGLWIIYASSVDGSSILVAQLDERTFSVVQHVNTTYPKSKAGNAFIARGILYVTDTKDMRVTFAFDLLGGKQINANFDLRTSQSVLAMLAYNMRDQHLYSWEDGHLMLYPVQFLSTTLNQ

SEQ ID NO: 11685 - protein, 13 aa, Artificial Sequence
  Synthetic polypeptide
SGGLSGISPKRSE

SEQ ID NO: 11686 - protein, 13 aa, Artificial Sequence
  Synthetic polypeptide
SGGLSGISPKRSE

SEQ ID NO: 11687 - protein, 169 aa, Artificial Sequence
  Synthetic polypeptide
FWGPVWDFSKAIRVMVDLCNSTKGICLTGPSGPPGPPGAGGLPGHNGLDGQPGPQGPKGEKGANGKRGKMGIPGAAGNPGERGEKGDHGELGLQGNEGPPGQKGEKGDKGDVSNDVLLAGAKGDQGPPGPPGPPGPPGPPGPPGSRRAKGPRQPSMFNGQCPGETCAIP

SEQ ID NO: 11688 - protein, 70 aa, Artificial Sequence
  Synthetic polypeptide
DIKSASARPRPRLGTEECLCPAATPSGSLPGFGYLIQRKSGSQQSCSKIISQEIKSSCFTSRKERIWNTI

SEQ ID NO: 11689 - protein, 70 aa, Artificial Sequence; identical to SEQ ID NO: 11688
  Synthetic polypeptide

SEQ ID NO: 11690 - protein, 70 aa, Artificial Sequence; identical to SEQ ID NO: 11688
  Synthetic polypeptide

SEQ ID NO: 11691 - protein, 70 aa, Artificial Sequence; identical to SEQ ID NO: 11688
  Synthetic polypeptide

SEQ ID NO: 11692 - protein, 70 aa, Artificial Sequence; identical to SEQ ID NO: 11688
  Synthetic polypeptide

SEQ ID NO: 11693 - protein, 32 aa, Artificial Sequence
  Synthetic polypeptide
RVPLPGRDPVWELRSVSAPPPPRLGVCQGLDT

SEQ ID NO: 11694 - protein, 32 aa, Artificial Sequence; identical to SEQ ID NO: 11693
  Synthetic polypeptide

SEQ ID NO: 11695 - protein, 32 aa, Artificial Sequence; identical to SEQ ID NO: 11693
  Synthetic polypeptide

SEQ ID NO: 11696 - protein, 32 aa, Artificial Sequence; identical to SEQ ID NO: 11693
  Synthetic polypeptide

SEQ ID NO: 11697 - protein, 32 aa, Artificial Sequence; identical to SEQ ID NO: 11693
  Synthetic polypeptide

SEQ ID NO: 11698 - protein, 32 aa, Artificial Sequence; identical to SEQ ID NO: 11693
  Synthetic polypeptide

SEQ ID NO: 11699 - protein, 1858 aa, Artificial Sequence
  Synthetic polypeptide
GVSLPRRHPVWEFARVWIPDPEEVWKSAELLKDYKPGDKVLLLHLEEGKDLEYHLDPKTKELPHLRNPDILVGENDLTALSYLHEPAVLHNLRVRFIDSKLIYTYCGIVLVAINPYEQLPIYGEDIINAYSGQNMGDMDPHIFAVAEEAYKQMARDERNQSIIVSGESGAGKTVSAKYAMRYFATVSGSASEANVEEKVLASNPIMESIGNAKTTRNDNSSRFGKYIEIGFDKRYRIIGANMRTYLLEKSRVVFQAEEERNYHIFYQLCASAKLPEFKMLRLGNADNFNYTKQGGSPVIEGVDDAKEMAHTRQACTLLGISESHQMGIFRILAGILHLGNVGFTSRDADSCTIPPKHEPLCIFCELMGVDYEEMCHWLCHRKLATATETYIKPISKLQATNARDALAKHIYAKLFNWIVDNVNQALHSAVKQHSFIGVLDIYGFETFEINSFEQFCINYANEKLQQQFNMHVFKLEQEEYMKEQIPWTLIDFYDNQPCINLIESKLGILDLLDEECKMPKGTDDTWAQKLYNTHLNKCALFEKPRLSNKAFIIQHFADKVEYQCEGFLEKNKDTVFEEQIKVLKSSKFKMLPELFQDDEKAISPTSATSSGRTPLTRTPAKPTKGRPGQMAKEHKKTVGHQFRNSLHLLMETLNATTPHYVRCIKPNDFKFPFTFDEKRAVQQLRACGVLETIRISAAGFPSRWTYQEFFSRYRVLMKQKDVLSDRKQTCKNVLEKLILDKDKYQFGKTKIFFRAGQVAYLEKLRADKLRAACIRIQKTIRGWLLRKKYLRMRKAAITMQRYVRGYQARCYAKFLRRTKAATIIQKYWRMYVVRRRYKIRRAATIVLQSYLRGFLARNRYRKILREHKAVIIQKRVRGWLARTHYKRSMHAIIYLQCCFRRMMAKRELKKLKIEARSVERYKKLHIGMENKIMQLQRKVDEQNKDYKCLVEKLTNLEGIYNSETEKLRSDLERLQLSEEEAKVATGRVLSLQEEIAKLRKDLEQTRSEKKCIEEHADRYKQETEQLVSNLKEENTLLKQEKEALNHRIVQQAKEMTETMEKKLVEETKQLELDLNDERLRYQNLLNEFSRLEERYDDLKEEMTLMVHVPKPGHKRTDSTHSSNESEYIFSSEIAEMEDIPSRTEEPSEKKVPLDMSLFLKLQKRVTELEQEKQVMQDELDRKEEQVLRSKAKEEERPQIRGAELEYESLKRQELESENKKLKNELNELRKALSEKSAPEVTAPGAPAYRVLMEQLTSVSEELDVRKEEVLILRSQLVSQKEAIQPKDDKNTMTDSTILLEDVQKMKDKGEIAQAYIGLKETNRSSALDYHELNEDGELWLVYEGLKQANRLLESQLQSQKRSHENEAEALRGEIQSLKEENNRQQQLLAQNLQLPPEARIEASLQHEITRLTNENLDLMEQLEKQDKTVRKLKKQLKVFAKKIGELEVGQMENISPGQIIDEPIRPVNIPRKEKDFQGMLEYKKEDEQKLVKNLILELKPRGVAVNLIPGLPAYILFMCVRHADYLNDDQKVRSLLTSTINSIKKVLKKRGDDFETVSFWLSNTCRFLHCLKQYSGEEGFMKHNTSRQNEHCLTNFDLAEYRQVLSDLAIQIYQQLVRVLENILQPMIVSGMLEHETIQGVSGVKPTGLRKRTSSIADEGTYTLDSILRQLNSFHSVMCQHGMDPELIKQVVKQMFYIIGAITLNNLLLRKDMCSWSKGMQIRYNVSQLEEWLRDKNLMNSGAKETLEPLIQAAQLLQVKKKTDDDAEAICSMCNALTTAQIVKVLNLYTPVNEFEERVSVSFIRTIQMRLRDRKDSPQLLMDAKHIFPVTFPFNPSSLALETIQIPASLGLGFISRV

SEQ ID NO: 11700 - protein, 1831 aa, Artificial Sequence
  Synthetic polypeptide
GVSLPRRHPVWEFARVWIPDPEEVWKSAELLKDYKPGDKVLLLHLEEGKDLEYHLDPKTKELPHLRNPDILVGENDLTALSYLHEPAVLHNLRVRFIDSKLIYTYCGIVLVAINPYEQLPIYGEDIINAYSGQNMGDMDPHIFAVAEEAYKQMARDERNQSIIVSGESGAGKTVSAKYAMRYFATVSGSASEANVEEKVLASNPIMESIGNAKTTRNDNSSRFGKYIEIGFDKRYRIIGANMRTYLLEKSRVVFQAEEERNYHIFYQLCASAKLPEFKMLRLGNADNFNYTKQGGSPVIEGVDDAKEMAHTRQACTLLGISESHQMGIFRILAGILHLGNVGFTSRDADSCTIPPKHEPLCIFCELMGVDYEEMCHWLCHRKLATATETYIKPISKLQATNARDALAKHIYAKLFNWIVDNVNQALHSAVKQHSFIGVLDIYGFETFEINSFEQFCINYANEKLQQQFNMHVFKLEQEEYMKEQIPWTLIDFYDNQPCINLIESKLGILDLLDEECKMPKGTDDTWAQKLYNTHLNKCALFEKPRLSNKAFIIQHFADKVEYQCEGFLEKNKDTVFEEQIKVLKSSKFKMLPELFQDDEKAISPTSATSSGRTPLTRTPAKPTKGRPGQMAKEHKKTVGHQFRNSLHLLMETLNATTPHYVRCIKPNDFKFPFTFDEKRAVQQLRACGVLETIRISAAGFPSRWTYQEFFSRYRVLMKQKDVLSDRKQTCKNVLEKLILDKDKYQFGKTKIFFRAGQVAYLEKLRADKLRAACIRIQKTIRGWLLRKKYLRMRKAAITMQRYVRGYQARCYAKFLRRTKAATIIQKYWRMYVVRRRYKIRRAATIVLQSYLRGFLARNRYRKILREHKAVIIQKRVRGWLARTHYKRSMHAIIYLQCCFRRMMAKRELKKLKIEARSVERYKKLHIGMENKIMQLQRKVDEQNKDYKCLVEKLTNLEGIYNSETEKLRSDLERLQLSEEEAKVATGRVLSLQEEIAKLRKDLEQTRSEKKCIEEHADRYKQETEQLVSNLKEENTLLKQEKEALNHRIVQQAKEMTETMEKKLVEETKQLELDLNDERLRYQNLLNEFSRLEERYDDLKEEMTLMVHVPKPGHKRTDSTHSSNESEYIFSSEIAEMEDIPSRTEEPSEKKVPLDMSLFLKLQKRVTELEQEKQVMQDELDRKEEQVLRSKAKEEERPQIRGAELEYESLKRQELESENKKLKNELNELRKALSEKSAPEVTAPGAPAYRVLMEQLTSVSEELDVRKEEVLILRSQLVSQKEAIQPKDDKNTMTDSTILLEDVQKMKDKGEIAQAYIGLKETNRLLESQLQSQKRSHENEAEALRGEIQSLKEENNRQQQLLAQNLQLPPEARIEASLQHEITRLTNENLDLMEQLEKQDKTVRKLKKQLKVFAKKIGELEVGQMENISPGQIIDEPIRPVNIPRKEKDFQGMLEYKKEDEQKLVKNLILELKPRGVAVNLIPGLPAYILFMCVRHADYLNDDQKVRSLLTSTINSIKKVLKKRGDDFETVSFWLSNTCRFLHCLKQYSGEEGFMKHNTSRQNEHCLTNFDLAEYRQVLSDLAIQIYQQLVRVLENILQPMIVSGMLEHETIQGVSGVKPTGLRKRTSSIADEGTYTLDSILRQLNSFHSVMCQHGMDPELIKQVVKQMFYIIGAITLNNLLLRKDMCSWSKGMQIRYNVSQLEEWLRDKNLMNSGAKETLEPLIQAAQLLQVKKKTDDDAEAICSMCNALTTAQIVKVLNLYTPVNEFEERVSVSFIRTIQMRLRDRKDSPQLLMDAKHIFPVTFPFNPSSLALETIQIPASLGLGFISRV

SEQ ID NO: 11701 - protein, 1883 aa, Artificial Sequence
  Synthetic polypeptide
GVSLPRRHPVWEFARVWIPDPEEVWKSAELLKDYKPGDKVLLLHLEEGKDLEYHLDPKTKELPHLRNPDILVGENDLTALSYLHEPAVLHNLRVRFIDSKLIYTYCGIVLVAINPYEQLPIYGEDIINAYSGQNMGDMDPHIFAVAEEAYKQMARDERNQSIIVSGESGAGKTVSAKYAMRYFATVSGSASEANVEEKVLASNPIMESIGNAKTTRNDNSSRFGKYIEIGFDKRYRIIGANMRTYLLEKSRVVFQAEEERNYHIFYQLCASAKLPEFKMLRLGNADNFNYTKQGGSPVIEGVDDAKEMAHTRQACTLLGISESHQMGIFRILAGILHLGNVGFTSRDADSCTIPPKHEPLCIFCELMGVDYEEMCHWLCHRKLATATETYIKPISKLQATNARDALAKHIYAKLFNWIVDNVNQALHSAVKQHSFIGVLDIYGFETFEINSFEQFCINYANEKLQQQFNMHVFKLEQEEYMKEQIPWTLIDFYDNQPCINLIESKLGILDLLDEECKMPKGTDDTWAQKLYNTHLNKCALFEKPRLSNKAFIIQHFADKVEYQCEGFLEKNKDTVFEEQIKVLKSSKFKMLPELFQDDEKAISPTSATSSGRTPLTRTPAKPTKGRPGQMAKEHKKTVGHQFRNSLHLLMETLNATTPHYVRCIKPNDFKFPFTFDEKRAVQQLRACGVLETIRISAAGFPSRWTYQEFFSRYRVLMKQKDVLSDRKQTCKNVLEKLILDKDKYQFGKTKIFFRAGQVAYLEKLRADKLRAACIRIQKTIRGWLLRKKYLRMRKAAITMQRYVRGYQARCYAKFLRRTKAATIIQKYWRMYVVRRRYKIRRAATIVLQSYLRGFLARNRYRKILREHKAVIIQKRVRGWLARTHYKRSMHAIIYLQCCFRRMMAKRELKKLKIEARSVERYKKLHIGMENKIMQLQRKVDEQNKDYKCLVEKLTNLEGIYNSETEKLRSDLERLQLSEEEAKVATGRVLSLQEEIAKLRKDLEQTRSEKKCIEEHADRYKQETEQLVSNLKEENTLLKQEKEALNHRIVQQAKEMTETMEKKLVEETKQLELDLNDERLRYQNLLNEFSRLEERYDDLKEEMTLMVHVPKPGHKRTDSTHSSNESEYIFSSEIAEMEDIPSRTEEPSEKKVPLDMSLFLKLQKRVTELEQEKQVMQDELDRKEEQVLRSKAKEEERPQIRGAELEYESLKRQELESENKKLKNELNELRKALSEKSAPEVTAPGAPAYRVLMEQLTSVSEELDVRKEEVLILRSQLVSQKEAIQPKLHENTMTDSTILLEDVQKMKDKGEIAQAYIGLKETNRSSALDYHELNEDGELWLVYEGLKQANRLLESQLQSQKRSHENEAEALRGEIQSLKEENNRQQQLLAQNLQLPPEARIEASLQHEITRLTNENLYFEELYADDPKKYQSYRISLYKRMIDLMEQLEKQDKTVRKLKKQLKVFAKKIGELEVGQMENISPGQIIDEPIRPVNIPRKEKDFQGMLEYKKEDEQKLVKNLILELKPRGVAVNLIPGLPAYILFMCVRHADYLNDDQKVRSLLTSTINSIKKVLKKRGDDFETVSFWLSNTCRFLHCLKQYSGEEGFMKHNTSRQNEHCLTNFDLAEYRQVLSDLAIQIYQQLVRVLENILQPMIVSGMLEHETIQGVSGVKPTGLRKRTSSIADEGTYTLDSILRQLNSFHSVMCQHGMDPELIKQVVKQMFYIIGAITLNNLLLRKDMCSWSKGMQIRYNVSQLEEWLRDKNLMNSGAKETLEPLIQAAQLLQVKKKTDDDAEAICSMCNALTTAQIVKVLNLYTPVNEFEERVSVSFIRTIQMRLRDRKDSPQLLMDAKHIFPVTFPFNPSSLALETIQIPASLGLGFISRV

SEQ ID NO: 11702 - protein, 1855 aa, Artificial Sequence
  Synthetic polypeptide
GVSLPRRHPVWEFARVWIPDPEEVWKSAELLKDYKPGDKVLLLHLEEGKDLEYHLDPKTKELPHLRNPDILVGENDLTALSYLHEPAVLHNLRVRFIDSKLIYTYCGIVLVAINPYEQLPIYGEDIINAYSGQNMGDMDPHIFAVAEEAYKQMARDERNQSIIVSGESGAGKTVSAKYAMRYFATVSGSASEANVEEKVLASNPIMESIGNAKTTRNDNSSRFGKYIEIGFDKRYRIIGANMRTYLLEKSRVVFQAEEERNYHIFYQLCASAKLPEFKMLRLGNADNFNYTKQGGSPVIEGVDDAKEMAHTRQACTLLGISESHQMGIFRILAGILHLGNVGFTSRDADSCTIPPKHEPLCIFCELMGVDYEEMCHWLCHRKLATATETYIKPISKLQATNARDALAKHIYAKLFNWIVDNVNQALHSAVKQHSFIGVLDIYGFETFEINSFEQFCINYANEKLQQQFNMHVFKLEQEEYMKEQIPWTLIDFYDNQPCINLIESKLGILDLLDEECKMPKGTDDTWAQKLYNTHLNKCALFEKPRLSNKAFIIQHFADKVEYQCEGFLEKNKDTVFEEQIKVLKSSKFKMLPELFQDDEKAISPTSATSSGRTPLTRTPAKPTKGRPGQMAKEHKKTVGHQFRNSLHLLMETLNATTPHYVRCIKPNDFKFPFTFDEKRAVQQLRACGVLETIRISAAGFPSRWTYQEFFSRYRVLMKQKDVLSDRKQTCKNVLEKLILDKDKYQFGKTKIFFRAGQVAYLEKLRADKLRAACIRIQKTIRGWLLRKKYLRMRKAAITMQRYVRGYQARCYAKFLRRTKAATIIQKYWRMYVVRRRYKIRRAATIVLQSYLRGFLARNRYRKILREHKAVIIQKRVRGWLARTHYKRSMHAIIYLQCCFRRMMAKRELKKLKIEARSVERYKKLHIGMENKIMQLQRKVDEQNKDYKCLVEKLTNLEGIYNSETEKLRSDLERLQLSEEEAKVATGRVLSLQEEIAKLRKDLEQTRSEKKCIEEHADRYKQETEQLVSNLKEENTLLKQEKEALNHRIVQQAKEMTETMEKKLVEETKQLELDLNDERLRYQNLLNEFSRLEERYDDLKEEMTLMVHVPKPGHKRTDSTHSSNESEYIFSSEIAEMEDIPSRTEEPSEKKVPLDMSLFLKLQKRVTELEQEKQVMQDELDRKEEQVLRSKAKEEERPQIRGAELEYESLKRQELESENKKLKNELNELRKALSEKSAPEVTAPGAPAYRVLMEQLTSVSEELDVRKEEVLILRSQLVSQKEAIQPKNTMTDSTILLEDVQKMKDKGEIAQAYIGLKETNRSSALDYHELNEDGELWLVYEGLKQANRLLESQLQSQKRSHENEAEALRGEIQSLKEENNRQQQLLAQNLQLPPEARIEASLQHEITRLTNENLDLMEQLEKQDKTVRKLKKQLKVFAKKIGELEVGQMENISPGQIIDEPIRPVNIPRKEKDFQGMLEYKKEDEQKLVKNLILELKPRGVAVNLIPGLPAYILFMCVRHADYLNDDQKVRSLLTSTINSIKKVLKKRGDDFETVSFWLSNTCRFLHCLKQYSGEEGFMKHNTSRQNEHCLTNFDLAEYRQVLSDLAIQIYQQLVRVLENILQPMIVSGMLEHETIQGVSGVKPTGLRKRTSSIADEGTYTLDSILRQLNSFHSVMCQHGMDPELIKQVVKQMFYIIGAITLNNLLLRKDMCSWSKGMQIRYNVSQLEEWLRDKNLMNSGAKETLEPLIQAAQLLQVKKKTDDDAEAICSMCNALTTAQIVKVLNLYTPVNEFEERVSVSFIRTIQMRLRDRKDSPQLLMDAKHIFPVTFPFNPSSLALETIQIPASLGLGFISRV

SEQ ID NO: 11703 - protein, 1856 aa, Artificial Sequence
  Synthetic polypeptide
GVSLPRRHPVWEFARVWIPDPEEVWKSAELLKDYKPGDKVLLLHLEEGKDLEYHLDPKTKELPHLRNPDILVGENDLTALSYLHEPAVLHNLRVRFIDSKLIYTYCGIVLVAINPYEQLPIYGEDIINAYSGQNMGDMDPHIFAVAEEAYKQMARDERNQSIIVSGESGAGKTVSAKYAMRYFATVSGSASEANVEEKVLASNPIMESIGNAKTTRNDNSSRFGKYIEIGFDKRYRIIGANMRTYLLEKSRVVFQAEEERNYHIFYQLCASAKLPEFKMLRLGNADNFNYTKQGGSPVIEGVDDAKEMAHTRQACTLLGISESHQMGIFRILAGILHLGNVGFTSRDADSCTIPPKHEPLCIFCELMGVDYEEMCHWLCHRKLATATETYIKPISKLQATNARDALAKHIYAKLFNWIVDNVNQALHSAVKQHSFIGVLDIYGFETFEINSFEQFCINYANEKLQQQFNMHVFKLEQEEYMKEQIPWTLIDFYDNQPCINLIESKLGILDLLDEECKMPKGTDDTWAQKLYNTHLNKCALFEKPRLSNKAFIIQHFADKVEYQCEGFLEKNKDTVFEEQIKVLKSSKFKMLPELFQDDEKAISPTSATSSGRTPLTRTPAKPTKGRPGQMAKEHKKTVGHQFRNSLHLLMETLNATTPHYVRCIKPNDFKFPFTFDEKRAVQQLRACGVLETIRISAAGFPSRWTYQEFFSRYRVLMKQKDVLSDRKQTCKNVLEKLILDKDKYQFGKTKIFFRAGQVAYLEKLRADKLRAACIRIQKTIRGWLLRKKYLRMRKAAITMQRYVRGYQARCYAKFLRRTKAATIIQKYWRMYVVRRRYKIRRAATIVLQSYLRGFLARNRYRKILREHKAVIIQKRVRGWLARTHYKRSMHAIIYLQCCFRRMMAKRELKKLKIEARSVERYKKLHIGMENKIMQLQRKVDEQNKDYKCLVEKLTNLEGIYNSETEKLRSDLERLQLSEEEAKVATGRVLSLQEEIAKLRKDLEQTRSEKKCIEEHADRYKQETEQLVSNLKEENTLLKQEKEALNHRIVQQAKEMTETMEKKLVEETKQLELDLNDERLRYQNLLNEFSRLEERYDDLKEEMTLMVHVPKPGHKRTDSTHSSNESEYIFSSEIAEMEDIPSRTEEPSEKKVPLDMSLFLKLQKRVTELEQEKQVMQDELDRKEEQVLRSKAKEEERPQIRGAELEYESLKRQELESENKKLKNELNELRKALSEKSAPEVTAPGAPAYRVLMEQLTSVSEELDVRKEEVLILRSQLVSQKEAIQPKDDKNTMTDSTILLEDVQKMKDKGEIAQAYIGLKETNRLLESQLQSQKRSHENEAEALRGEIQSLKEENNRQQQLLAQNLQLPPEARIEASLQHEITRLTNENLYFEELYADDPKKYQSYRISLYKRMIDLMEQLEKQDKTVRKLKKQLKVFAKKIGELEVGQMENISPGQIIDEPIRPVNIPRKEKDFQGMLEYKKEDEQKLVKNLILELKPRGVAVNLIPGLPAYILFMCVRHADYLNDDQKVRSLLTSTINSIKKVLKKRGDDFETVSFWLSNTCRFLHCLKQYSGEEGFMKHNTSRQNEHCLTNFDLAEYRQVLSDLAIQIYQQLVRVLENILQPMIVSGMLEHETIQGVSGVKPTGLRKRTSSIADEGTYTLDSILRQLNSFHSVMCQHGMDPELIKQVVKQMFYIIGAITLNNLLLRKDMCSWSKGMQIRYNVSQLEEWLRDKNLMNSGAKETLEPLIQAAQLLQVKKKTDDDAEAICSMCNALTTAQIVKVLNLYTPVNEFEERVSVSFIRTIQMRLRDRKDSPQLLMDAKHIFPVTFPFNPSSLALETIQIPASLGLGFISRV

SEQ ID NO: 11704 - protein, 66 aa, Artificial Sequence
  Synthetic polypeptide
DIKSASARPRPRLGTEECLCPAATPSGSLPGFGYLIQRKSGSQQSCSKIISQEIKSSCFTSRKERY

SEQ ID NO: 11705 - protein, 50 aa, Artificial Sequence
  Synthetic polypeptide
GVSLPRRHPVWEFARVWIPDPEEVWKSAELLKDYKPGDKVLLLHLEEGKV

SEQ ID NO: 11706 - protein, 82 aa, Artificial Sequence
  Synthetic polypeptide
EVRSVSAWPPIVWDVRSPSAWPPSLGSEERLFPAVIPSRSLPGFGYLIQRKSGSQQSCSKIISQEIKSSCFTSRKERIWNTI

SEQ ID NO: 11707 - protein, 82 aa, Artificial Sequence; identical to SEQ ID NO: 11706
  Synthetic polypeptide

SEQ ID NO: 11708 - protein, 82 aa, Artificial Sequence; identical to SEQ ID NO: 11706
  Synthetic polypeptide

SEQ ID NO: 11709 - protein, 82 aa, Artificial Sequence; identical to SEQ ID NO: 11706
  Synthetic polypeptide

SEQ ID NO: 11710 - protein, 82 aa, Artificial Sequence; identical to SEQ ID NO: 11706
  Synthetic polypeptide

SEQ ID NO: 11711 - protein, 31 aa, Artificial Sequence
  Synthetic polypeptide
GAPLPGRPVWEVRSASSRPSSRLGVCQGLDT

SEQ ID NO: 11712 - protein, 31 aa, Artificial Sequence; identical to SEQ ID NO: 11711
  Synthetic polypeptide

SEQ ID NO: 11713 - protein, 31 aa, Artificial Sequence; identical to SEQ ID NO: 11711
  Synthetic polypeptide

SEQ ID NO: 11714 - protein, 31 aa, Artificial Sequence; identical to SEQ ID NO: 11711
  Synthetic polypeptide

SEQ ID NO: 11715 - protein, 31 aa, Artificial Sequence; identical to SEQ ID NO: 11711
  Synthetic polypeptide

SEQ ID NO: 11716 - protein, 31 aa, Artificial Sequence; identical to SEQ ID NO: 11711
  Synthetic polypeptide

SEQ ID NO: 11717 - protein, 1847 aa, Artificial Sequence
  Synthetic polypeptide
EFARVWIPDPEEVWKSAELLKDYKPGDKVLLLHLEEGKDLEYHLDPKTKELPHLRNPDILVGENDLTALSYLHEPAVLHNLRVRFIDSKLIYTYCGIVLVAINPYEQLPIYGEDIINAYSGQNMGDMDPHIFAVAEEAYKQMARDERNQSIIVSGESGAGKTVSAKYAMRYFATVSGSASEANVEEKVLASNPIMESIGNAKTTRNDNSSRFGKYIEIGFDKRYRIIGANMRTYLLEKSRVVFQAEEERNYHIFYQLCASAKLPEFKMLRLGNADNFNYTKQGGSPVIEGVDDAKEMAHTRQACTLLGISESHQMGIFRILAGILHLGNVGFTSRDADSCTIPPKHEPLCIFCELMGVDYEEMCHWLCHRKLATATETYIKPISKLQATNARDALAKHIYAKLFNWIVDNVNQALHSAVKQHSFIGVLDIYGFETFEINSFEQFCINYANEKLQQQFNMHVFKLEQEEYMKEQIPWTLIDFYDNQPCINLIESKLGILDLLDEECKMPKGTDDTWAQKLYNTHLNKCALFEKPRLSNKAFIIQHFADKVEYQCEGFLEKNKDTVFEEQIKVLKSSKFKMLPELFQDDEKAISPTSATSSGRTPLTRTPAKPTKGRPGQMAKEHKKTVGHQFRNSLHLLMETLNATTPHYVRCIKPNDFKFPFTFDEKRAVQQLRACGVLETIRISAAGFPSRWTYQEFFSRYRVLMKQKDVLSDRKQTCKNVLEKLILDKDKYQFGKTKIFFRAGQVAYLEKLRADKLRAACIRIQKTIRGWLLRKKYLRMRKAAITMQRYVRGYQARCYAKFLRRTKAATIIQKYWRMYVVRRRYKIRRAATIVLQSYLRGFLARNRYRKILREHKAVIIQKRVRGWLARTHYKRSMHAIIYLQCCFRRMMAKRELKKLKIEARSVERYKKLHIGMENKIMQLQRKVDEQNKDYKCLVEKLTNLEGIYNSETEKLRSDLERLQLSEEEAKVATGRVLSLQEEIAKLRKDLEQTRSEKKCIEEHADRYKQETEQLVSNLKEENTLLKQEKEALNHRIVQQAKEMTETMEKKLVEETKQLELDLNDERLRYQNLLNEFSRLEERYDDLKEEMTLMVHVPKPGHKRTDSTHSSNESEYIFSSEIAEMEDIPSRTEEPSEKKVPLDMSLFLKLQKRVTELEQEKQVMQDELDRKEEQVLRSKAKEEERPQIRGAELEYESLKRQELESENKKLKNELNELRKALSEKSAPEVTAPGAPAYRVLMEQLTSVSEELDVRKEEVLILRSQLVSQKEAIQPKDDKNTMTDSTILLEDVQKMKDKGEIAQAYIGLKETNRSSALDYHELNEDGELWLVYEGLKQANRLLESQLQSQKRSHENEAEALRGEIQSLKEENNRQQQLLAQNLQLPPEARIEASLQHEITRLTNENLDLMEQLEKQDKTVRKLKKQLKVFAKKIGELEVGQMENISPGQIIDEPIRPVNIPRKEKDFQGMLEYKKEDEQKLVKNLILELKPRGVAVNLIPGLPAYILFMCVRHADYLNDDQKVRSLLTSTINSIKKVLKKRGDDFETVSFWLSNTCRFLHCLKQYSGEEGFMKHNTSRQNEHCLTNFDLAEYRQVLSDLAIQIYQQLVRVLENILQPMIVSGMLEHETIQGVSGVKPTGLRKRTSSIADEGTYTLDSILRQLNSFHSVMCQHGMDPELIKQVVKQMFYIIGAITLNNLLLRKDMCSWSKGMQIRYNVSQLEEWLRDKNLMNSGAKETLEPLIQAAQLLQVKKKTDDDAEAICSMCNALTTAQIVKVLNLYTPVNEFEERVSVSFIRTIQMRLRDRKDSPQLLMDAKHIFPVTFPFNPSSLALETIQIPASLGLGFISRV

SEQ ID NO: 11718 - protein, 1820 aa, Artificial Sequence
  Synthetic polypeptide
EFARVWIPDPEEVWKSAELLKDYKPGDKVLLLHLEEGKDLEYHLDPKTKELPHLRNPDILVGENDLTALSYLHEPAVLHNLRVRFIDSKLIYTYCGIVLVAINPYEQLPIYGEDIINAYSGQNMGDMDPHIFAVAEEAYKQMARDERNQSIIVSGESGAGKTVSAKYAMRYFATVSGSASEANVEEKVLASNPIMESIGNAKTTRNDNSSRFGKYIEIGFDKRYRIIGANMRTYLLEKSRVVFQAEEERNYHIFYQLCASAKLPEFKMLRLGNADNFNYTKQGGSPVIEGVDDAKEMAHTRQACTLLGISESHQMGIFRILAGILHLGNVGFTSRDADSCTIPPKHEPLCIFCELMGVDYEEMCHWLCHRKLATATETYIKPISKLQATNARDALAKHIYAKLFNWIVDNVNQALHSAVKQHSFIGVLDIYGFETFEINSFEQFCINYANEKLQQQFNMHVFKLEQEEYMKEQIPWTLIDFYDNQPCINLIESKLGILDLLDEECKMPKGTDDTWAQKLYNTHLNKCALFEKPRLSNKAFIIQHFADKVEYQCEGFLEKNKDTVFEEQIKVLKSSKFKMLPELFQDDEKAISPTSATSSGRTPLTRTPAKPTKGRPGQMAKEHKKTVGHQFRNSLHLLMETLNATTPHYVRCIKPNDFKFPFTFDEKRAVQQLRACGVLETIRISAAGFPSRWTYQEFFSRYRVLMKQKDVLSDRKQTCKNVLEKLILDKDKYQFGKTKIFFRAGQVAYLEKLRADKLRAACIRIQKTIRGWLLRKKYLRMRKAAITMQRYVRGYQARCYAKFLRRTKAATIIQKYWRMYVVRRRYKIRRAATIVLQSYLRGFLARNRYRKILREHKAVIIQKRVRGWLARTHYKRSMHAIIYLQCCFRRMMAKRELKKLKIEARSVERYKKLHIGMENKIMQLQRKVDEQNKDYKCLVEKLTNLEGIYNSETEKLRSDLERLQLSEEEAKVATGRVLSLQEEIAKLRKDLEQTRSEKKCIEEHADRYKQETEQLVSNLKEENTLLKQEKEALNHRIVQQAKEMTETMEKKLVEETKQLELDLNDERLRYQNLLNEFSRLEERYDDLKEEMTLMVHVPKPGHKRTDSTHSSNESEYIFSSEIAEMEDIPSRTEEPSEKKVPLDMSLFLKLQKRVTELEQEKQVMQDELDRKEEQVLRSKAKEEERPQIRGAELEYESLKRQELESENKKLKNELNELRKALSEKSAPEVTAPGAPAYRVLMEQLTSVSEELDVRKEEVLILRSQLVSQKEAIQPKDDKNTMTDSTILLEDVQKMKDKGEIAQAYIGLKETNRLLESQLQSQKRSHENEAEALRGEIQSLKEENNRQQQLLAQNLQLPPEARIEASLQHEITRLTNENLDLMEQLEKQDKTVRKLKKQLKVFAKKIGELEVGQMENISPGQIIDEPIRPVNIPRKEKDFQGMLEYKKEDEQKLVKNLILELKPRGVAVNLIPGLPAYILFMCVRHADYLNDDQKVRSLLTSTINSIKKVLKKRGDDFETVSFWLSNTCRFLHCLKQYSGEEGFMKHNTSRQNEHCLTNFDLAEYRQVLSDLAIQIYQQLVRVLENILQPMIVSGMLEHETIQGVSGVKPTGLRKRTSSIADEGTYTLDSILRQLNSFHSVMCQHGMDPELIKQVVKQMFYIIGAITLNNLLLRKDMCSWSKGMQIRYNVSQLEEWLRDKNLMNSGAKETLEPLIQAAQLLQVKKKTDDDAEAICSMCNALTTAQIVKVLNLYTPVNEFEERVSVSFIRTIQMRLRDRKDSPQLLMDAKHIFPVTFPFNPSSLALETIQIPASLGLGFISRV

SEQ ID NO: 11719 - protein, 1872 aa, Artificial Sequence
  Synthetic polypeptide
EFARVWIPDPEEVWKSAELLKDYKPGDKVLLLHLEEGKDLEYHLDPKTKELPHLRNPDILVGENDLTALSYLHEPAVLHNLRVRFIDSKLIYTYCGIVLVAINPYEQLPIYGEDIINAYSGQNMGDMDPHIFAVAEEAYKQMARDERNQSIIVSGESGAGKTVSAKYAMRYFATVSGSASEANVEEKVLASNPIMESIGNAKTTRNDNSSRFGKYIEIGFDKRYRIIGANMRTYLLEKSRVVFQAEEERNYHIFYQLCASAKLPEFKMLRLGNADNFNYTKQGGSPVIEGVDDAKEMAHTRQACTLLGISESHQMGIFRILAGILHLGNVGFTSRDADSCTIPPKHEPLCIFCELMGVDYEEMCHWLCHRKLATATETYIKPISKLQATNARDALAKHIYAKLFNWIVDNVNQALHSAVKQHSFIGVLDIYGFETFEINSFEQFCINYANEKLQQQFNMHVFKLEQEEYMKEQIPWTLIDFYDNQPCINLIESKLGILDLLDEECKMPKGTDDTWAQKLYNTHLNKCALFEKPRLSNKAFIIQHFADKVEYQCEGFLEKNKDTVFEEQIKVLKSSKFKMLPELFQDDEKAISPTSATSSGRTPLTRTPAKPTKGRPGQMAKEHKKTVGHQFRNSLHLLMETLNATTPHYVRCIKPNDFKFPFTFDEKRAVQQLRACGVLETIRISAAGFPSRWTYQEFFSRYRVLMKQKDVLSDRKQTCKNVLEKLILDKDKYQFGKTKIFFRAGQVAYLEKLRADKLRAACIRIQKTIRGWLLRKKYLRMRKAAITMQRYVRGYQARCYAKFLRRTKAATIIQKYWRMYVVRRRYKIRRAATIVLQSYLRGFLARNRYRKILREHKAVIIQKRVRGWLARTHYKRSMHAIIYLQCCFRRMMAKRELKKLKIEARSVERYKKLHIGMENKIMQLQRKVDEQNKDYKCLVEKLTNLEGIYNSETEKLRSDLERLQLSEEEAKVATGRVLSLQEEIAKLRKDLEQTRSEKKCIEEHADRYKQETEQLVSNLKEENTLLKQEKEALNHRIVQQAKEMTETMEKKLVEETKQLELDLNDERLRYQNLLNEFSRLEERYDDLKEEMTLMVHVPKPGHKRTDSTHSSNESEYIFSSEIAEMEDIPSRTEEPSEKKVPLDMSLFLKLQKRVTELEQEKQVMQDELDRKEEQVLRSKAKEEERPQIRGAELEYESLKRQELESENKKLKNELNELRKALSEKSAPEVTAPGAPAYRVLMEQLTSVSEELDVRKEEVLILRSQLVSQKEAIQPKLHENTMTDSTILLEDVQKMKDKGEIAQAYIGLKETNRSSALDYHELNEDGELWLVYEGLKQANRLLESQLQSQKRSHENEAEALRGEIQSLKEENNRQQQLLAQNLQLPPEARIEASLQHEITRLTNENLYFEELYADDPKKYQSYRISLYKRMIDLMEQLEKQDKTVRKLKKQLKVFAKKIGELEVGQMENISPGQIIDEPIRPVNIPRKEKDFQGMLEYKKEDEQKLVKNLILELKPRGVAVNLIPGLPAYILFMCVRHADYLNDDQKVRSLLTSTINSIKKVLKKRGDDFETVSFWLSNTCRFLHCLKQYSGEEGFMKHNTSRQNEHCLTNFDLAEYRQVLSDLAIQIYQQLVRVLENILQPMIVSGMLEHETIQGVSGVKPTGLRKRTSSIADEGTYTLDSILRQLNSFHSVMCQHGMDPELIKQVVKQMFYIIGAITLNNLLLRKDMCSWSKGMQIRYNVSQLEEWLRDKNLMNSGAKETLEPLIQAAQLLQVKKKTDDDAEAICSMCNALTTAQIVKVLNLYTPVNEFEERVSVSFIRTIQMRLRDRKDSPQLLMDAKHIFPVTFPFNPSSLALETIQIPASLGLGFISRV

SEQ ID NO: 11720 - protein, 1844 aa, Artificial Sequence
  Synthetic polypeptide
EFARVWIPDPEEVWKSAELLKDYKPGDKVLLLHLEEGKDLEYHLDPKTKELPHLRNPDILVGENDLTALSYLHEPAVLHNLRVRFIDSKLIYTYCGIVLVAINPYEQLPIYGEDIINAYSGQNMGDMDPHIFAVAEEAYKQMARDERNQSIIVSGESGAGKTVSAKYAMRYFATVSGSASEANVEEKVLASNPIMESIGNAKTTRNDNSSRFGKYIEIGFDKRYRIIGANMRTYLLEKSRVVFQAEEERNYHIFYQLCASAKLPEFKMLRLGNADNFNYTKQGGSPVIEGVDDAKEMAHTRQACTLLGISESHQMGIFRILAGILHLGNVGFTSRDADSCTIPPKHEPLCIFCELMGVDYEEMCHWLCHRKLATATETYIKPISKLQATNARDALAKHIYAKLFNWIVDNVNQALHSAVKQHSFIGVLDIYGFETFEINSFEQFCINYANEKLQQQFNMHVFKLEQEEYMKEQIPWTLIDFYDNQPCINLIESKLGILDLLDEECKMPKGTDDTWAQKLYNTHLNKCALFEKPRLSNKAFIIQHFADKVEYQCEGFLEKNKDTVFEEQIKVLKSSKFKMLPELFQDDEKAISPTSATSSGRTPLTRTPAKPTKGRPGQMAKEHKKTVGHQFRNSLHLLMETLNATTPHYVRCIKPNDFKFPFTFDEKRAVQQLRACGVLETIRISAAGFPSRWTYQEFFSRYRVLMKQKDVLSDRKQTCKNVLEKLILDKDKYQFGKTKIFFRAGQVAYLEKLRADKLRAACIRIQKTIRGWLLRKKYLRMRKAAITMQRYVRGYQARCYAKFLRRTKAATIIQKYWRMYVVRRRYKIRRAATIVLQSYLRGFLARNRYRKILREHKAVIIQKRVRGWLARTHYKRSMHAIIYLQCCFRRMMAKRELKKLKIEARSVERYKKLHIGMENKIMQLQRKVDEQNKDYKCLVEKLTNLEGIYNSETEKLRSDLERLQLSEEEAKVATGRVLSLQEEIAKLRKDLEQTRSEKKCIEEHADRYKQETEQLVSNLKEENTLLKQEKEALNHRIVQQAKEMTETMEKKLVEETKQLELDLNDERLRYQNLLNEFSRLEERYDDLKEEMTLMVHVPKPGHKRTDSTHSSNESEYIFSSEIAEMEDIPSRTEEPSEKKVPLDMSLFLKLQKRVTELEQEKQVMQDELDRKEEQVLRSKAKEEERPQIRGAELEYESLKRQELESENKKLKNELNELRKALSEKSAPEVTAPGAPAYRVLMEQLTSVSEELDVRKEEVLILRSQLVSQKEAIQPKNTMTDSTILLEDVQKMKDKGEIAQAYIGLKETNRSSALDYHELNEDGELWLVYEGLKQANRLLESQLQSQKRSHENEAEALRGEIQSLKEENNRQQQLLAQNLQLPPEARIEASLQHEITRLTNENLDLMEQLEKQDKTVRKLKKQLKVFAKKIGELEVGQMENISPGQIIDEPIRPVNIPRKEKDFQGMLEYKKEDEQKLVKNLILELKPRGVAVNLIPGLPAYILFMCVRHADYLNDDQKVRSLLTSTINSIKKVLKKRGDDFETVSFWLSNTCRFLHCLKQYSGEEGFMKHNTSRQNEHCLTNFDLAEYRQVLSDLAIQIYQQLVRVLENILQPMIVSGMLEHETIQGVSGVKPTGLRKRTSSIADEGTYTLDSILRQLNSFHSVMCQHGMDPELIKQVVKQMFYIIGAITLNNLLLRKDMCSWSKGMQIRYNVSQLEEWLRDKNLMNSGAKETLEPLIQAAQLLQVKKKTDDDAEAICSMCNALTTAQIVKVLNLYTPVNEFEERVSVSFIRTIQMRLRDRKDSPQLLMDAKHIFPVTFPFNPSSLALETIQIPASLGLGFISRV

SEQ ID NO: 11721 - protein, 1845 aa, Artificial Sequence
  Synthetic polypeptide
EFARVWIPDPEEVWKSAELLKDYKPGDKVLLLHLEEGKDLEYHLDPKTKELPHLRNPDILVGENDLTALSYLHEPAVLHNLRVRFIDSKLIYTYCGIVLVAINPYEQLPIYGEDIINAYSGQNMGDMDPHIFAVAEEAYKQMARDERNQSIIVSGESGAGKTVSAKYAMRYFATVSGSASEANVEEKVLASNPIMESIGNAKTTRNDNSSRFGKYIEIGFDKRYRIIGANMRTYLLEKSRVVFQAEEERNYHIFYQLCASAKLPEFKMLRLGNADNFNYTKQGGSPVIEGVDDAKEMAHTRQACTLLGISESHQMGIFRILAGILHLGNVGFTSRDADSCTIPPKHEPLCIFCELMGVDYEEMCHWLCHRKLATATETYIKPISKLQATNARDALAKHIYAKLFNWIVDNVNQALHSAVKQHSFIGVLDIYGFETFEINSFEQFCINYANEKLQQQFNMHVFKLEQEEYMKEQIPWTLIDFYDNQPCINLIESKLGILDLLDEECKMPKGTDDTWAQKLYNTHLNKCALFEKPRLSNKAFIIQHFADKVEYQCEGFLEKNKDTVFEEQIKVLKSSKFKMLPELFQDDEKAISPTSATSSGRTPLTRTPAKPTKGRPGQMAKEHKKTVGHQFRNSLHLLMETLNATTPHYVRCIKPNDFKFPFTFDEKRAVQQLRACGVLETIRISAAGFPSRWTYQEFFSRYRVLMKQKDVLSDRKQTCKNVLEKLILDKDKYQFGKTKIFFRAGQVAYLEKLRADKLRAACIRIQKTIRGWLLRKKYLRMRKAAITMQRYVRGYQARCYAKFLRRTKAATIIQKYWRMYVVRRRYKIRRAATIVLQSYLRGFLARNRYRKILREHKAVIIQKRVRGWLARTHYKRSMHAIIYLQCCFRRMMAKRELKKLKIEARSVERYKKLHIGMENKIMQLQRKVDEQNKDYKCLVEKLTNLEGIYNSETEKLRSDLERLQLSEEEAKVATGRVLSLQEEIAKLRKDLEQTRSEKKCIEEHADRYKQETEQLVSNLKEENTLLKQEKEALNHRIVQQAKEMTETMEKKLVEETKQLELDLNDERLRYQNLLNEFSRLEERYDDLKEEMTLMVHVPKPGHKRTDSTHSSNESEYIFSSEIAEMEDIPSRTEEPSEKKVPLDMSLFLKLQKRVTELEQEKQVMQDELDRKEEQVLRSKAKEEERPQIRGAELEYESLKRQELESENKKLKNELNELRKALSEKSAPEVTAPGAPAYRVLMEQLTSVSEELDVRKEEVLILRSQLVSQKEAIQPKDDKNTMTDSTILLEDVQKMKDKGEIAQAYIGLKETNRLLESQLQSQKRSHENEAEALRGEIQSLKEENNRQQQLLAQNLQLPPEARIEASLQHEITRLTNENLYFEELYADDPKKYQSYRISLYKRMIDLMEQLEKQDKTVRKLKKQLKVFAKKIGELEVGQMENISPGQIIDEPIRPVNIPRKEKDFQGMLEYKKEDEQKLVKNLILELKPRGVAVNLIPGLPAYILFMCVRHADYLNDDQKVRSLLTSTINSIKKVLKKRGDDFETVSFWLSNTCRFLHCLKQYSGEEGFMKHNTSRQNEHCLTNFDLAEYRQVLSDLAIQIYQQLVRVLENILQPMIVSGMLEHETIQGVSGVKPTGLRKRTSSIADEGTYTLDSILRQLNSFHSVMCQHGMDPELIKQVVKQMFYIIGAITLNNLLLRKDMCSWSKGMQIRYNVSQLEEWLRDKNLMNSGAKETLEPLIQAAQLLQVKKKTDDDAEAICSMCNALTTAQIVKVLNLYTPVNEFEERVSVSFIRTIQMRLRDRKDSPQLLMDAKHIFPVTFPFNPSSLALETIQIPASLGLGFISRV

SEQ ID NO: 11722 - protein, 78 aa, Artificial Sequence
  Synthetic polypeptide
EVRSVSAWPPIVWDVRSPSAWPPSLGSEERLFPAVIPSRSLPGFGYLIQRKSGSQQSCSKIISQEIKSSCFTSRKERY

SEQ ID NO: 11723 - protein, 39 aa, Artificial Sequence
  Synthetic polypeptide
EFARVWIPDPEEVWKSAELLKDYKPGDKVLLLHLEEGKV

SEQ ID NO: 11724 - protein, 109 aa, Artificial Sequence
  Synthetic polypeptide
IDGRIDSSVRKQEMEDKVTSPEKAEEAKLKARYPHLGQKPGGSDFLRKRLQKGQKYFDSGDYNMAKAKMKNKQLPTAAPDKTEVTGDHIPTPQDLPQRKPSLVASKLAG

SEQ ID NO: 11725 - protein, 109 aa, Artificial Sequence; identical to SEQ ID NO: 11724
  Synthetic polypeptide

SEQ ID NO: 11726 - protein, 109 aa, Artificial Sequence; identical to SEQ ID NO: 11724
  Synthetic polypeptide

SEQ ID NO: 11727 - protein, 109 aa, Artificial Sequence; identical to SEQ ID NO: 11724
  Synthetic polypeptide

SEQ ID NO: 11728 - protein, 109 aa, Artificial Sequence; identical to SEQ ID NO: 11724
  Synthetic polypeptide

SEQ ID NO: 11729 - protein, 109 aa, Artificial Sequence; identical to SEQ ID NO: 11724
  Synthetic polypeptide

SEQ ID NO: 11730 - protein, 16 aa, Artificial Sequence
  Synthetic polypeptide
MEELIVLSGNRKWKIK

SEQ ID NO: 11731 - protein, 16 aa, Artificial Sequence
  Synthetic polypeptide
MEELIVLSGNRKWKIK

SEQ ID NO: 11732 - protein, 16 aa, Artificial Sequence
  Synthetic polypeptide
MEELIVLSGNRKWKIK

SEQ ID NO: 11733 - protein, 16 aa, Artificial Sequence
  Synthetic polypeptide
MEELIVLSGNRKWKIK

SEQ ID NO: 11734 - protein, 16 aa, Artificial Sequence
  Synthetic polypeptide
MEELIVLSGNRKWKIK

SEQ ID NO: 11735 - protein, 16 aa, Artificial Sequence
  Synthetic polypeptide
MEELIVLSGNRKWKIK

SEQ ID NO: 11736 - protein, 9 aa, Artificial Sequence
  Synthetic polypeptide
FCQETGNGR

SEQ ID NO: 11737 - protein, 9 aa, Artificial Sequence
  Synthetic polypeptide
FCQETGNGR

SEQ ID NO: 11738 - protein, 9 aa, Artificial Sequence
  Synthetic polypeptide
FCQETGNGR

SEQ ID NO: 11739 - protein, 9 aa, Artificial Sequence
  Synthetic polypeptide
FCQETGNGR

SEQ ID NO: 11740 - protein, 9 aa, Artificial Sequence
  Synthetic polypeptide
FCQETGNGR

SEQ ID NO: 11741 - protein, 9 aa, Artificial Sequence
  Synthetic polypeptide
FCQETGNGR

SEQ ID NO: 11742 - protein, 60 aa, Artificial Sequence
  Synthetic polypeptide
FHENRLRAPTDLMRGTLTPKQPALREGKKKKFLPYRQSRQPHCQEPILGLVKLPTLWVIC

SEQ ID NO: 11743 - protein, 60 aa, Artificial Sequence; identical to SEQ ID NO: 11742
  Synthetic polypeptide

SEQ ID NO: 11744 - protein, 60 aa, Artificial Sequence; identical to SEQ ID NO: 11742
  Synthetic polypeptide

SEQ ID NO: 11745 - protein, 60 aa, Artificial Sequence; identical to SEQ ID NO: 11742
  Synthetic polypeptide

SEQ ID NO: 11746 - protein, 60 aa, Artificial Sequence; identical to SEQ ID NO: 11742
  Synthetic polypeptide

SEQ ID NO: 11747 - protein, 60 aa, Artificial Sequence; identical to SEQ ID NO: 11742
  Synthetic polypeptide

SEQ ID NO: 11748 - protein, 60 aa, Artificial Sequence; identical to SEQ ID NO: 11742
  Synthetic polypeptide

SEQ ID NO: 11749 - protein, 60 aa, Artificial Sequence; identical to SEQ ID NO: 11742
  Synthetic polypeptide

SEQ ID NO: 11750 - protein, 60 aa, Artificial Sequence; identical to SEQ ID NO: 11742
  Synthetic polypeptide

SEQ ID NO: 11751 - protein, 60 aa, Artificial Sequence; identical to SEQ ID NO: 11742
  Synthetic polypeptide

SEQ ID NO: 11752 - protein, 60 aa, Artificial Sequence; identical to SEQ ID NO: 11742
  Synthetic polypeptide

SEQ ID NO: 11753 - protein, 49 aa, Artificial Sequence
  Synthetic polypeptide
LNERNLNPKAACLKRREEEKVSAVSAEPPTTLPGTHPGLSETTNPMGHM

SEQ ID NO: 11754 - protein, 49 aa, Artificial Sequence; identical to SEQ ID NO: 11753
  Synthetic polypeptide

SEQ ID NO: 11755 - protein, 49 aa, Artificial Sequence; identical to SEQ ID NO: 11753
  Synthetic polypeptide

SEQ ID NO: 11756 - protein, 49 aa, Artificial Sequence; identical to SEQ ID NO: 11753
  Synthetic polypeptide

SEQ ID NO: 11757 - protein, 49 aa, Artificial Sequence; identical to SEQ ID NO: 11753
  Synthetic polypeptide

SEQ ID NO: 11758 - protein, 49 aa, Artificial Sequence; identical to SEQ ID NO: 11753
  Synthetic polypeptide

SEQ ID NO: 11759 - protein, 49 aa, Artificial Sequence; identical to SEQ ID NO: 11753
  Synthetic polypeptide

SEQ ID NO: 11760 - protein, 49 aa, Artificial Sequence; identical to SEQ ID NO: 11753
  Synthetic polypeptide

SEQ ID NO: 11761 - protein, 49 aa, Artificial Sequence; identical to SEQ ID NO: 11753
  Synthetic polypeptide

SEQ ID NO: 11762 - protein, 49 aa, Artificial Sequence; identical to SEQ ID NO: 11753
  Synthetic polypeptide

SEQ ID NO: 11763 - protein, 49 aa, Artificial Sequence; identical to SEQ ID NO: 11753
  Synthetic polypeptide

SEQ ID NO: 11764 - protein, 23 aa, Artificial Sequence
  Synthetic polypeptide
FHENRLRAPTDLMRGTLTPKQPA

SEQ ID NO: 11765 - protein, 13 aa, Artificial Sequence
  Synthetic polypeptide
LNERNLNPKAACL

SEQ ID NO: 11766 - protein, 33 aa, Artificial Sequence
  Synthetic polypeptide
ESSEAEPALGHAHPGPPVSLQCHAAAPALGEPE

SEQ ID NO: 11767 - protein, 33 aa, Artificial Sequence; identical to SEQ ID NO: 11766
  Synthetic polypeptide

SEQ ID NO: 11768 - protein, 33 aa, Artificial Sequence; identical to SEQ ID NO: 11766
  Synthetic polypeptide

SEQ ID NO: 11769 - protein, 267 aa, Artificial Sequence
  Synthetic polypeptide
LLTSHENLVKLNLPSDMHIQGLQSRYSATQLHLHWGNPNDPHGSEHTVSGQHFAAELHIVHYNSDLYPDASTASNKSEGLAVLAVLIEMGSFNPSYDKIFSHLQHVKYKGQEAFVPGFNIEELLPERTAEYYRYRGSLTTPPCNPTVLWTVFRNPVQISQEQLLALETALYCTHMDDPSPREMINNFRQVQKFDERLVYTSFSQVQVCTAAGLSLGIILSLALAGILGICIVVVVSIWLFRRKSIKKGDNKGVIYKPATKMETEAHA

SEQ ID NO: 11770 - protein, 256 aa, Artificial Sequence
  Synthetic polypeptide
LLTSHENLVKLNLPSDMHIQGLQSRYSATQLHLHWGNPNDPHGSEHTVSGQHFAAELHIVHYNSDLYPDASTASNKSEGLAVLAVLIEMGSFNPSYDKIFSHLQHVKYKGQEAFVPGFNIEELLPERTAEYYRYRGSLTTPPCNPTVLWTVFRNPVQISQEQLLALETALYCTHMDDPSPREMINNFRQVQKFDERLVYTSFSQGIILSLALAGILGICIVVVVSIWLFRRKSIKKGDNKGVIYKPATKMETEAHA

SEQ ID NO: 11771 - protein, 256 aa, Artificial Sequence; identical to SEQ ID NO: 11770
  Synthetic polypeptide

SEQ ID NO: 11772 - protein, 33 aa, Artificial Sequence
  Synthetic polypeptide
EQGEWEVTASQVLMGRIAGPRSTRRVGACCSPP

SEQ ID NO: 11773 - protein, 33 aa, Artificial Sequence; identical to SEQ ID NO: 11772
  Synthetic polypeptide

SEQ ID NO: 11774 - protein, 5 aa, Artificial Sequence
  Synthetic polypeptide
LLHRS

SEQ ID NO: 11775 - protein, 5 aa, Artificial Sequence
  Synthetic polypeptide
LLHRS

SEQ ID NO: 11776 - protein, 350 aa, Artificial Sequence
  Synthetic polypeptide
TIRKRQIHGGREQISGCPVLRAGRVGGDCFTGPDGENSWSKKYPSCGGLLQSPIDLHSDILQYDASLTPLEFQGYNLSANKQFLLTNNGHSVKLNLPSDMHIQGLQSRYSATQLHLHWGNPNDPHGSEHTVSGQHFAAELHIVHYNSDLYPDASTASNKSEGLAVLAVLIEMGSFNPSYDKIFSHLQHVKYKGQEAFVPGFNIEELLPERTAEYYRYRGSLTTPPCNPTVLWTVFRNPVQISQEQLLALETALYCTHMDDPSPREMINNFRQVQKFDERLVYTSFSQVQVCTAAGLSLGIILSLALAGILGICIVVVVSIWLFRRKSIKKGDNKGVIYKPATKMETEAHA

SEQ ID NO: 11777 - protein, 339 aa, Artificial Sequence
  Synthetic polypeptide
TIRKRQIHGGREQISGCPVLRAGRVGGDCFTGPDGENSWSKKYPSCGGLLQSPIDLHSDILQYDASLTPLEFQGYNLSANKQFLLTNNGHSVKLNLPSDMHIQGLQSRYSATQLHLHWGNPNDPHGSEHTVSGQHFAAELHIVHYNSDLYPDASTASNKSEGLAVLAVLIEMGSFNPSYDKIFSHLQHVKYKGQEAFVPGFNIEELLPERTAEYYRYRGSLTTPPCNPTVLWTVFRNPVQISQEQLLALETALYCTHMDDPSPREMINNFRQVQKFDERLVYTSFSQGIILSLALAGILGICIVVVVSIWLFRRKSIKKGDNKGVIYKPATKMETEAHA

SEQ ID NO: 11778 - protein, 344 aa, Artificial Sequence
  Synthetic polypeptide
PTWRNPISTKNTKLTRRDGSKWTYFGPDGENSWSKKYPSCGGLLQSPIDLHSDILQYDASLTPLEFQGYNLSANKQFLLTNNGHSVKLNLPSDMHIQGLQSRYSATQLHLHWGNPNDPHGSEHTVSGQHFAAELHIVHYNSDLYPDASTASNKSEGLAVLAVLIEMGSFNPSYDKIFSHLQHVKYKGQEAFVPGFNIEELLPERTAEYYRYRGSLTTPPCNPTVLWTVFRNPVQISQEQLLALETALYCTHMDDPSPREMINNFRQVQKFDERLVYTSFSQVQVCTAAGLSLGIILSLALAGILGICIVVVVSIWLFRRKSIKKGDNKGVIYKPATKMETEAHA

SEQ ID NO: 11779 - protein, 33 aa, Artificial Sequence
  Synthetic polypeptide
PGVTVPSGLILVLMGRIAGPRSTRRVGACCSPP

SEQ ID NO: 11780 - protein, 33 aa, Artificial Sequence; identical to SEQ ID NO: 11779
  Synthetic polypeptide

SEQ ID NO: 11781 - protein, 333 aa, Artificial Sequence
  Synthetic polypeptide
PTWRNPISTKNTKLTRRDGSKWTYFGPDGENSWSKKYPSCGGLLQSPIDLHSDILQYDASLTPLEFQGYNLSANKQFLLTNNGHSVKLNLPSDMHIQGLQSRYSATQLHLHWGNPNDPHGSEHTVSGQHFAAELHIVHYNSDLYPDASTASNKSEGLAVLAVLIEMGSFNPSYDKIFSHLQHVKYKGQEAFVPGFNIEELLPERTAEYYRYRGSLTTPPCNPTVLWTVFRNPVQISQEQLLALETALYCTHMDDPSPREMINNFRQVQKFDERLVYTSFSQGIILSLALAGILGICIVVVVSIWLFRRKSIKKGDNKGVIYKPATKMETEAHA

SEQ ID NO: 11782 - protein, 273 aa, Artificial Sequence
  Synthetic polypeptide
PTWRNPISTKNTKLTRRDGSKWTYFVKLNLPSDMHIQGLQSRYSATQLHLHWGNPNDPHGSEHTVSGQHFAAELHIVHYNSDLYPDASTASNKSEGLAVLAVLIEMGSFNPSYDKIFSHLQHVKYKGQEAFVPGFNIEELLPERTAEYYRYRGSLTTPPCNPTVLWTVFRNPVQISQEQLLALETALYCTHMDDPSPREMINNFRQVQKFDERLVYTSFSQGIILSLALAGILGICIVVVVSIWLFRRKSIKKGDNKGVIYKPATKMETEAHA

SEQ ID NO: 11783 - protein, 11 aa, Artificial Sequence
  Synthetic polypeptide
PGVTVPSGLIL

SEQ ID NO: 11784 - protein, 41 aa, Artificial Sequence
  Synthetic polypeptide
LYKTKTNKQTKKLARGTVRVTLRRTSPGGKPSTHGGGAAPP

SEQ ID NO: 11785 - protein, 41 aa, Artificial Sequence; identical to SEQ ID NO: 11784
  Synthetic polypeptide

SEQ ID NO: 11786 - protein, 4 aa, Artificial Sequence
  Synthetic polypeptide
PEEL

SEQ ID NO: 11787 - protein, 4 aa, Artificial Sequence
  Synthetic polypeptide
PEEL

SEQ ID NO: 11788 - protein, 56 aa, Artificial Sequence
  Synthetic polypeptide
GQELKTSPGNNSETLTLQNKNKQTNKKISQRNCESDTEEDIARRKALHPRRRSSTS

SEQ ID NO: 11789 - protein, 56 aa, Artificial Sequence; identical to SEQ ID NO: 11788
  Synthetic polypeptide

SEQ ID NO: 11790 - protein, 59 aa, Artificial Sequence
  Synthetic polypeptide
LGDVIHHLKHQFSESNIGPNTPLWLVERTERGHPVPEPGGAQGVTGIPETSALPHRPQG

SEQ ID NO: 11791 - protein, 59 aa, Artificial Sequence; identical to SEQ ID NO: 11790
  Synthetic polypeptide

SEQ ID NO: 11792 - protein, 119 aa, Artificial Sequence
  Synthetic polypeptide
VQTPPSGLLKGLKEGILYLNQEVPKELLEFLRLRHFPTDPKASNWGTLREFLPGDSSSQQHQRPVLSFHVDPYVCNPSPESLPNVVVNGVLQGLYSFSISPDKAQPKAACHPAPLPPMP

SEQ ID NO: 11793 - protein, 6 aa, Artificial Sequence
  Synthetic polypeptide
KRASCT

SEQ ID NO: 11794 - protein, 6 aa, Artificial Sequence
  Synthetic polypeptide
KRASCT

SEQ ID NO: 11795 - protein, 46 aa, Artificial Sequence
  Synthetic polypeptide
VQTPPSGLLKGLKEGILYLNQEVPKELLEFLRLRHFPTDPKASNWG

SEQ ID NO: 11796 - protein, 29 aa, Artificial Sequence
  Synthetic polypeptide
GRAWWLMPVIPALWEAEKRMVCHSLKLRP

SEQ ID NO: 11797 - protein, 29 aa, Artificial Sequence
  Synthetic polypeptide
GRAWWLMPVIPALWEAEKRMVCHSLKLRP

SEQ ID NO: 11798 - protein, 29 aa, Artificial Sequence
  Synthetic polypeptide
GRAWWLMPVIPALWEAEKRMVCHSLKLRP

SEQ ID NO: 11799 - protein, 15 aa, Artificial Sequence
  Synthetic polypeptide
SQHFGRLRKEWFVIH

SEQ ID NO: 11800 - protein, 15 aa, Artificial Sequence
  Synthetic polypeptide
SQHFGRLRKEWFVIH

SEQ ID NO: 11801 - protein, 15 aa, Artificial Sequence
  Synthetic polypeptide
SQHFGRLRKEWFVIH

SEQ ID NO: 11802 - protein, 29 aa, Artificial Sequence
  Synthetic polypeptide
GRAWWLMPVIPALWEAEKRMKQMSDRREN

SEQ ID NO: 11803 - protein, 10 aa, Artificial Sequence
  Synthetic polypeptide
SQHFGRLRKE

SEQ ID NO: 11804 - protein, 24 aa, Artificial Sequence
  Synthetic polypeptide
RLSGNCARLQECKISLEQKILLWK

SEQ ID NO: 11805 - protein, 31 aa, Artificial Sequence
  Synthetic polypeptide
DEPEGSPEIALGYRSVRYPWNRRSYCGSDFQ

SEQ ID NO: 11806 - protein, 61 aa, Artificial Sequence
  Synthetic polypeptide
GGDSLHKLTLPAAIHVRCDLLLLAFCHDCEASPPMWNCMSLMVPLLFGVQLEQDILKLLNF

SEQ ID NO: 11807 - protein, 24 aa, Artificial Sequence
  Synthetic polypeptide
DVTCCSLPSAMIVKPPHPCGTVCH

SEQ ID NO: 11808 - protein, 552 aa, Artificial Sequence
  Synthetic polypeptide
SLPTHVELYVIDGATALWCAAGAGHFEVVKLLVSHGANVNHTTVTNSTPLRAACFDGRLDIVKYLVENNANISIANKYDNTCLMIAAYKGHTDVVRYLLEQRADPNAKAHCGATALHFAAEAGHIDIVKELIKWRAAIVVNGHGMTPLKVAAESCKADVVELLLSHADCDRRSRIEALELLGASFANDRENYDIIKTYHYLYLAMLERFQDGDNILEKEVLPPIHAYGNRTECRNPQELESIRQDRDALHMEGLIVRERILGADNIDVSHPIIYRGAVYADNMEFEQCIKLWLHALHLRQKGNRNTHKDLLRFAQVFSQMIHLNETVKAPDIECVLRCSVLEIEQSMNRVKNISDADVHNAMDNYECNLYTFLYLVCISTKTQCSEEDQCKINKQIYNLIHLDPRTREGFTLLHLAVNSNTPVDDFHTNDVCSFPNALVTKLLLDCGAEVNAVDNEGNSALHIIVQYNRPISDFLTLHSIIISLVEAGAHTDMTNKQNKTPLDKSTTGVSEILLKTQMKMSLKCLAARAVRANDINYQDQIPRTLEEFVGFH

SEQ ID NO: 11809 - protein, 33 aa, Artificial Sequence
  Synthetic polypeptide
WTSGLSTLNFSLLIYKMRPLQIPLRQMEGLQVS

SEQ ID NO: 11810 - protein, 33 aa, Artificial Sequence; identical to SEQ ID NO: 11809
  Synthetic polypeptide

SEQ ID NO: 11811 - protein, 33 aa, Artificial Sequence; identical to SEQ ID NO: 11809
  Synthetic polypeptide

SEQ ID NO: 11812 - protein, 166 aa, Artificial Sequence
  Synthetic polypeptide
DKWKDYRFLEIQKPRLCKVIRVLAFAYPYTWDSLPIFYRLFLFPGESAQNEATSYHQKHMIMTLLASFLYSAHLPERLAPGRFDYIGHSHQLFHVCVILATHMQMEAILLDKTLRKEWLLATSKPFSFSQIAGAILLCIIFSLSNIIYFSAALYRIPKPELHKKET

SEQ ID NO: 11813 - protein, 166 aa, Artificial Sequence; identical to SEQ ID NO: 11812
  Synthetic polypeptide

SEQ ID NO: 11814 - protein, 166 aa, Artificial Sequence; identical to SEQ ID NO: 11812
  Synthetic polypeptide

SEQ ID NO: 11815 - protein, 27 aa, Artificial Sequence
  Synthetic polypeptide
NEAITNTPKTNGRITGFLKSRSPDSVR

SEQ ID NO: 11816 - protein, 27 aa, Artificial Sequence
  Synthetic polypeptide
NEAITNTPKTNGRITGFLKSRSPDSVR

SEQ ID NO: 11817 - protein, 27 aa, Artificial Sequence
  Synthetic polypeptide
NEAITNTPKTNGRITGFLKSRSPDSVR

SEQ ID NO: 11818 - protein, 538 aa, Artificial Sequence
  Synthetic polypeptide
TWEAEEKEQITISQLSLVDLAGSERTNRTRAEGNRLREAGNINQSLMTLRTCMDVLRENQMYGTNKMVPYRDSKLTHLFKNYFDGEGKVRMIVCVNPKAEDYEENLQVMRFAEVTQEVEVARPVDKAICGLTPGRRYRNQPRGPVGNEPLVTDVVLQSFPPLPSCEILDINDEQTLPRLIEALEKRHNLRQMMIDEFNKQSNAFKALLQEFDNAVLSKENHMQGKLNEKEKMISGQKLEIERLEKKNKTLEYKIEILEKTTTIYEEDKRNLQQELETQNQKLQRQFSDKRRLEARLQGMVTETTMKWEKECERRVAAKQLEMQNKLWVKDEKLKQLKAIVTEPKTEKPERPSRERDREKVTQRSVSPSPVPLLFQPDQNAPPIRLRHRRSRSAGDRWVDHKPASNMQTETVMQPHVPHAITVSVANEKALAKCEKYMLTHQELASDGEIETKLIKGDIYKTRGGGQSVQFTDIETLKQESPNGSRKRRSSTVAPAQPDGAESEWTDVETRCSVAVEMRAGSQLGPGYQHHAQPKRKKP

SEQ ID NO: 11819 - protein, 538 aa, Artificial Sequence; identical to SEQ ID NO: 11818
  Synthetic polypeptide

SEQ ID NO: 11820 - protein, 538 aa, Artificial Sequence; identical to SEQ ID NO: 11818
  Synthetic polypeptide

SEQ ID NO: 11821 - protein, 538 aa, Artificial Sequence; identical to SEQ ID NO: 11818
  Synthetic polypeptide

SEQ ID NO: 11822 - protein, 30 aa, Artificial Sequence
  Synthetic polypeptide
CTTPVIPATCVPEAGGSLEPGRQRKKNKSL

SEQ ID NO: 11823 - protein, 30 aa, Artificial Sequence; identical to SEQ ID NO: 11822
  Synthetic polypeptide

SEQ ID NO: 11824 - protein, 30 aa, Artificial Sequence; identical to SEQ ID NO: 11822
  Synthetic polypeptide

SEQ ID NO: 11825 - protein, 30 aa, Artificial Sequence; identical to SEQ ID NO: 11822
  Synthetic polypeptide

SEQ ID NO: 11826 - protein, 30 aa, Artificial Sequence; identical to SEQ ID NO: 11822
  Synthetic polypeptide

SEQ ID NO: 11827 - protein, 30 aa, Artificial Sequence; identical to SEQ ID NO: 11822
  Synthetic polypeptide

SEQ ID NO: 11828 - protein, 30 aa, Artificial Sequence; identical to SEQ ID NO: 11822
  Synthetic polypeptide

SEQ ID NO: 11829 - protein, 36 aa, Artificial Sequence
  Synthetic polypeptide
SQLLVYLRQEDRLNLGGRGKRTNHYKSVVLGRSCWK

SEQ ID NO: 11830 - protein, 36 aa, Artificial Sequence; identical to SEQ ID NO: 11829
  Synthetic polypeptide

SEQ ID NO: 11831 - protein, 36 aa, Artificial Sequence; identical to SEQ ID NO: 11829
  Synthetic polypeptide

SEQ ID NO: 11832 - protein, 36 aa, Artificial Sequence; identical to SEQ ID NO: 11829
  Synthetic polypeptide

SEQ ID NO: 11833 - protein, 36 aa, Artificial Sequence; identical to SEQ ID NO: 11829
  Synthetic polypeptide

SEQ ID NO: 11834 - protein, 36 aa, Artificial Sequence; identical to SEQ ID NO: 11829
  Synthetic polypeptide

SEQ ID NO: 11835 - protein, 36 aa, Artificial Sequence; identical to SEQ ID NO: 11829
  Synthetic polypeptide

SEQ ID NO: 11836 - protein, 634 aa, Artificial Sequence
  Synthetic polypeptide
TWEAEEKEQITISQLSLVDLAGSERTNRTRAEGNRLREAGNINQSLMTLRTCMDVLRENQMYGTNKMVPYRDSKLTHLFKNYFDGEGKVRMIVCVNPKAEDYEENLQVMRFAEVTQEVEVARPVDKAICGLTPGRRYRNQPRGPVGNEPLVTDVVLQSFPPLPSCEILDINDEQTLPRLIEALEKRHNLRQMMIDEFNKQSNAFKALLQEFDNAVLSKENHMQGKLNEKEKMISGQKLEIERLEKKNKTLEYKIEILEKTTTIYEEDKRNLQQELETQNQKLQRQFSDKRRLEARLQGMVTETTMKWEKECERRVAAKQLEMQNKLWVKDEKLKQLKAIVTEPKTEKPERPSRERDREKVTQRSVSPSPVPLSSNYIAQISNGQQLMSQPQLHRRSNSCSSISVASCISEWEQKIPTYNTPLKVTSIARRRQQEPGQSKTCIVSDRRRGMYWTEGREVVPTFRNEIEIEEDHCGRNAPPIRLRHRRSRSAGDRWVDHKPASNMQTETVMQPHVPHAITVSVANEKALAKCEKYMLTHQELASDGEIETKLIKGDIYKTRGGGQSVQFTDIETLKQESPNGRKRRSSTVAPAQPDGAESEWTDVETRCSVAVEMRAGSQLGPGYQHHAQPKRKKP

SEQ ID NO: 11837 - protein, 642 aa, Artificial Sequence
  Synthetic polypeptide
TWEAEEKEQITISQLSLVDLAGSERTNRTRAEGNRLREAGNINQSLMTLRTCMDVLRENQMYGTNKMVPYRDSKLTHLFKNYFDGEGKVRMIVCVNPKAEDYEENLQVMRFAEVTQEVEVARPVDKAICGLTPGRRYRNQPRGPVGNEPLVTDVVLQSFPPLPSCEILDINDEQTLPRLIEALEKRHNLRQMMIDEFNKQSNAFKALLQEFDNAVLSKENHMQGKLNEKEKMISGQKLEIERLEKKNKTLEYKIEILEKTTTIYEEDKRNLQQELETQNQKLQRQFSDKRRLEARLQGMVTETTMKWEKECERRVAAKQLEMQNKLWVKDEKLKQLKAIVTEPKTEKPERPSRERDREKVTQRSVSPSPVPLSSNYIAQISNGQQLMSQPQLHRRSNSCSSISVASCISEWEQKIPTYNTPLKVTSIARRRQQEPGQSKTCIVSDRRRGMYWTEGREVVPTFRNEIEIEEDHCGRLLFQPDQNAPPIRLRHRRSRSAGDRWVDHKPASNMQTETVMQPHVPHAITVSVANEKALAKCEKYMLTHQELASDGEIETKLIKGDIYKTRGGGQSVQFTDIETLKQESPNGSRKRRSSTVAPAQPDGAESEWTDVETRCSVAVEMRAGSQLGPGYQHHAQPKRKKP

SEQ ID NO: 11838 - protein, 146 aa, Artificial Sequence
  Synthetic polypeptide
TWEAEEKEQITISQLSLVDLAGSERTNRTRAEGNRLREAGNINQSLMTLRTCMDVLRENQMYGTNKMVPYRDSKLTHLFKNYFDGEGKVRMIVCVNPKAEDYEENLVILIFAEVTQEVEVARPVDKAICGLTPGRRYRNQPRGPVG

SEQ ID NO: 11839 - protein, 22 aa, Artificial Sequence
  Synthetic polypeptide
RQRIFTYQICKATNKCTERQLL

SEQ ID NO: 11840 - protein, 22 aa, Artificial Sequence
  Synthetic polypeptide
RQRIFTYQICKATNKCTERQLL

SEQ ID NO: 11841 - protein, 22 aa, Artificial Sequence
  Synthetic polypeptide
RQRIFTYQICKATNKCTERQLL

SEQ ID NO: 11842 - protein, 22 aa, Artificial Sequence
  Synthetic polypeptide
RQRIFTYQICKATNKCTERQLL

SEQ ID NO: 11843 - protein, 22 aa, Artificial Sequence
  Synthetic polypeptide
RQRIFTYQICKATNKCTERQLL

SEQ ID NO: 11844 - protein, 64 aa, Artificial Sequence
  Synthetic polypeptide
ILYKTMNFQWLIIIWKKLFNLPVSRNTNEDNVFSPIRFAKQPTNAQKDSFSEQSCVLQRETRQS

SEQ ID NO: 11845 - protein, 64 aa, Artificial Sequence; identical to SEQ ID NO: 11844
  Synthetic polypeptide

SEQ ID NO: 11846 - protein, 64 aa, Artificial Sequence; identical to SEQ ID NO: 11844
  Synthetic polypeptide

SEQ ID NO: 11847 - protein, 64 aa, Artificial Sequence; identical to SEQ ID NO: 11844
  Synthetic polypeptide

SEQ ID NO: 11848 - protein, 64 aa, Artificial Sequence; identical to SEQ ID NO: 11844
  Synthetic polypeptide

SEQ ID NO: 11849 - protein, 357 aa, Artificial Sequence
  Synthetic polypeptide
AEIQMKTTYFHLSDLQSNQQMHRKTASLNSPVSCKEKPDRVEEPPDYSLHWPEGLKGEEIKKCGREGITLNKYNQQYHKLFKDVPLEEVVLKVCSCALQRDFLLQGRLYISPNWLCFHASLFGKDIKVVIPVVSVQMIKKHKMARLLPNGLAITTNTSQKYIFVSLLSRDSVYDLLRRVCTHLQPSSKKSLSVREFSGEPESLEVLIPEMKWRKVCPSSRSLSLPDNIPCIPPSSVDSTDSFFPSRKPPMSEKSRAQVASENGGRWAWPMPGWGPACPKKMPNCSPTAKNAVYEEDELEEEPRSTGELRLWDYRLLKVFFVLICFLVMSSSYLAFRISRLEQQLCSLSWDDPVPGHR

SEQ ID NO: 11850 - protein, 224 aa, Artificial Sequence
  Synthetic polypeptide
AEIQMKTTYFHLSDLQSNQQMHRKTASLNSPVSCKEKPDRVEEPPDYSLHWPEGLKGEEIKKCGREGITLNKYNQQYHKLFKDVPLEEVVLKVCSCALQRDFLLQGRLYISPNWLCFHASLFGKDIKVVIPVVSVQMIKKHKMARLLPNGLAITTNTSQKYIFVSLLSRDSVYDLLRRVCTHLQPSSKKSLSVREFSGEPESLEVLIPEMKWRKVCPSSRSLSL

SEQ ID NO: 11851 - protein, 160 aa, Artificial Sequence
  Synthetic polypeptide
AEIQMKTTYFHLSDLQSNQQMHRKTASLNSPVSCKEKPDRVEEPPDYSLHWPEGLKGEEIKKCGREGITLNKYNQQYHKLFKDVPLEEVVLKVCSCALQRDFLLQGRLYISPNWLCFHASLFGKDIKVVIPVVSVQMIKKHKMARLLPNGLAITTNTSQK

SEQ ID NO: 11852 - protein, 62 aa, Artificial Sequence
  Synthetic polypeptide
AEIQMKTTYFHLSDLQSNQQMHRKTASLNSPVSCKEKPDRVEEPPDYSAIPLSQCGSLSQVR

SEQ ID NO: 11853 - protein, 179 aa, Artificial Sequence
  Synthetic polypeptide
AEIQMKTTYFHLSDLQSNQQMHRKTASLNSPVSCKEKPDRVEEPPDYSLHWPEGLKGEEIKKCGREGITLNKYNQQYHKLFKDVPLEEVVLKVCSCALQRDFLLQGRLYISPNWLCFHASLFGKDIKVVIPVVSVQMIKKHKMARLLPNGLAITTNTSQKYIFVSLLSRDSVYDLLRRV

SEQ ID NO: 11854 - protein, 116 aa, Artificial Sequence
  Synthetic polypeptide
KKGDNTGMGKGQHRMPSKDELVQRYNRMNTIPQTRSIQSRFLQSRNLNCIALCEVITSKDLQKHGNIWVCPVSDHVCTRFFFVYEDGQVGDANINTQDPKIQKEIMRVIGTQVYTN

SEQ ID NO: 11855 - protein, 116 aa, Artificial Sequence; identical to SEQ ID NO: 11854
  Synthetic polypeptide

SEQ ID NO: 11856 - protein, 116 aa, Artificial Sequence; identical to SEQ ID NO: 11854
  Synthetic polypeptide

SEQ ID NO: 11857 - protein, 32 aa, Artificial Sequence
  Synthetic polypeptide
TKQNRKKEIIQEWEKDSTGCPPRMSWSRDTTG

SEQ ID NO: 11858 - protein, 32 aa, Artificial Sequence; identical to SEQ ID NO: 11857
  Synthetic polypeptide

SEQ ID NO: 11859 - protein, 32 aa, Artificial Sequence; identical to SEQ ID NO: 11857
  Synthetic polypeptide

SEQ ID NO: 11860 - protein, 32 aa, Artificial Sequence; identical to SEQ ID NO: 11857
  Synthetic polypeptide

SEQ ID NO: 11861 - protein, 32 aa, Artificial Sequence; identical to SEQ ID NO: 11857
  Synthetic polypeptide

SEQ ID NO: 11862 - protein, 32 aa, Artificial Sequence; identical to SEQ ID NO: 11857
  Synthetic polypeptide

SEQ ID NO: 11863 - protein, 32 aa, Artificial Sequence; identical to SEQ ID NO: 11857
  Synthetic polypeptide

SEQ ID NO: 11864 - protein, 14 aa, Artificial Sequence
  Synthetic polypeptide
YRNGKRTAQDALQG

SEQ ID NO: 11865 - protein, 14 aa, Artificial Sequence
  Synthetic polypeptide
YRNGKRTAQDALQG

SEQ ID NO: 11866 - protein, 14 aa, Artificial Sequence
  Synthetic polypeptide
YRNGKRTAQDALQG

SEQ ID NO: 11867 - protein, 14 aa, Artificial Sequence
  Synthetic polypeptide
YRNGKRTAQDALQG

SEQ ID NO: 11868 - protein, 14 aa, Artificial Sequence
  Synthetic polypeptide
YRNGKRTAQDALQG

SEQ ID NO: 11869 - protein, 14 aa, Artificial Sequence
  Synthetic polypeptide
YRNGKRTAQDALQG

SEQ ID NO: 11870 - protein, 14 aa, Artificial Sequence
  Synthetic polypeptide
YRNGKRTAQDALQG

SEQ ID NO: 11871 - protein, 14 aa, Artificial Sequence
  Synthetic polypeptide
YRNGKRTAQDALQG

SEQ ID NO: 11872 - protein, 28 aa, Artificial Sequence
  Synthetic polypeptide
KKGDNTGMGKGQHRMPSKDELVQRYNRM

SEQ ID NO: 11873 - protein, 28 aa, Artificial Sequence
  Synthetic polypeptide
KKGDNTGMGKGQHRMPSKDELVQRYNRM

SEQ ID NO: 11874 - protein, 28 aa, Artificial Sequence
  Synthetic polypeptide
KKGDNTGMGKGQHRMPSKDELVQRYNRM

SEQ ID NO: 11875 - protein, 19 aa, Artificial Sequence
  Synthetic polypeptide
KKGDNTGMGKGQHRMPSKD

SEQ ID NO: 11876 - protein, 24 aa, Artificial Sequence
  Synthetic polypeptide
TKQNRKKEIIQEWEKDSTGCPPRM

SEQ ID NO: 11877 - protein, 38 aa, Artificial Sequence
  Synthetic polypeptide
KKGDNTGMGKGQHRMPSKDELVQRYNRMNTIPQTRSIQ

SEQ ID NO: 11878 - protein, 58 aa, Artificial Sequence
  Synthetic polypeptide
GWVWWLTPVIRHFGRPRRADHLRFFFAVQLVQSYMSFLMTMSLFHQSHCRKWMSSTSF

SEQ ID NO: 11879 - protein, 58 aa, Artificial Sequence; identical to SEQ ID NO: 11878
  Synthetic polypeptide

SEQ ID NO: 11880 - protein, 58 aa, Artificial Sequence; identical to SEQ ID NO: 11878
  Synthetic polypeptide

SEQ ID NO: 11881 - protein, 58 aa, Artificial Sequence; identical to SEQ ID NO: 11878
  Synthetic polypeptide

SEQ ID NO: 11882 - protein, 58 aa, Artificial Sequence
  Synthetic polypeptide
MGMVAHACNPALWKAKTGRSFEVLLCGPVGPKLHELLDDNVFVPPESLQEVDEFHLIL

SEQ ID NO: 11883 - protein, 344 aa, Artificial Sequence
  Synthetic polypeptide
MGMVAHACNPALWKAKTGRSFEVLLCGPVGPKLHELLDDNVFVPPESLQEVDEFHLILEYQAGEEWGQLKAPHANRFIFSHDLSNGAMNMLEVFVSSLEEFQPDLVVLSGLHMMEGQSKELQRKRLLEVVTSISDIPTGIPVHLELASMTNRELMSSIVHQVFPAVTSLGLNEQELLFLTQSASGPHSSLSSWNGVPDVGMVSDILFWILKEHGRSKSRASDLTRIHFHTLVYHILATVDGHWANQLAAVAAGARVAGTQACATETIDTSRVSLRAPQEFMTSHSEAGSRIVLNPNKPVVEWHREGISFHFTPVLVCKDPIRTVGLGDAISAEGLFYSEVHPHY

SEQ ID NO: 11884 - protein, 74 aa, Artificial Sequence
  Synthetic polypeptide
MGMVAHACNPALWKAKTGRSFEVLLCGPVGPKLHELLDDNVFVPPESLQEVDEFHLILEYQAAGLSRGDFPWAE

SEQ ID NO: 11885 - protein, 124 aa, Artificial Sequence
  Synthetic polypeptide
MGMVAHACNPALWKAKTGRSFEVLLCGPVGPKLHELLDDNVFVPPESLQEVDEFHLILEYQAGEEWGQLKAPHANRFIFSHDLSNGAMNMLEVFVSSLEEFQPDLVVLSGLHMMEGQSKELQRK

SEQ ID NO: 11886 - protein, 46 aa, Artificial Sequence
  Synthetic polypeptide
RRGAEPWRSRSLKTQWWHWWAPMPPCAAPSPLSLASAWHSSTSSGS

SEQ ID NO: 11887 - protein, 46 aa, Artificial Sequence; identical to SEQ ID NO: 11886
  Synthetic polypeptide

SEQ ID NO: 11888 - protein, 46 aa, Artificial Sequence; identical to SEQ ID NO: 11886
  Synthetic polypeptide

SEQ ID NO: 11889 - protein, 46 aa, Artificial Sequence; identical to SEQ ID NO: 11886
  Synthetic polypeptide

SEQ ID NO: 11890 - protein, 46 aa, Artificial Sequence; identical to SEQ ID NO: 11886
  Synthetic polypeptide

SEQ ID NO: 11891 - protein, 46 aa, Artificial Sequence; identical to SEQ ID NO: 11886
  Synthetic polypeptide

SEQ ID NO: 11892 - protein, 46 aa, Artificial Sequence; identical to SEQ ID NO: 11886
  Synthetic polypeptide

SEQ ID NO: 11893 - protein, 46 aa, Artificial Sequence; identical to SEQ ID NO: 11886
  Synthetic polypeptide

SEQ ID NO: 11894 - protein, 46 aa, Artificial Sequence; identical to SEQ ID NO: 11886
  Synthetic polypeptide

SEQ ID NO: 11895 - protein, 46 aa, Artificial Sequence; identical to SEQ ID NO: 11886
  Synthetic polypeptide

SEQ ID NO: 11896 - protein, 11 aa, Artificial Sequence
  Synthetic polypeptide
GAARSPGGPGP

SEQ ID NO: 11897 - protein, 11 aa, Artificial Sequence
  Synthetic polypeptide
GAARSPGGPGP

SEQ ID NO: 11898 - protein, 11 aa, Artificial Sequence
  Synthetic polypeptide
GAARSPGGPGP

SEQ ID NO: 11899 - protein, 11 aa, Artificial Sequence
  Synthetic polypeptide
GAARSPGGPGP

SEQ ID NO: 11900 - protein, 11 aa, Artificial Sequence
  Synthetic polypeptide
GAARSPGGPGP

SEQ ID NO: 11901 - protein, 11 aa, Artificial Sequence
  Synthetic polypeptide
GAARSPGGPGP

SEQ ID NO: 11902 - protein, 11 aa, Artificial Sequence
  Synthetic polypeptide
GAARSPGGPGP

SEQ ID NO: 11903 - protein, 11 aa, Artificial Sequence
  Synthetic polypeptide
GAARSPGGPGP

SEQ ID NO: 11904 - protein, 11 aa, Artificial Sequence
  Synthetic polypeptide
GAARSPGGPGP

SEQ ID NO: 11905 - protein, 11 aa, Artificial Sequence
  Synthetic polypeptide
GAARSPGGPGP

SEQ ID NO: 11906 - protein, 11 aa, Artificial Sequence
  Synthetic polypeptide
GAARSPGGPGP

SEQ ID NO: 11907 - protein, 109 aa, Artificial Sequence
  Synthetic polypeptide
ARRGALEVQVPEDPVVALVGTDATLCCSFSPEPGFSLAQLNLIWQLTDTKQLVHSFAEGQDQGSAYANRTALFPDLLAQGNASLRLQRVRVADEGSFTCFVSIRDFGSA

SEQ ID NO: 11908 - protein, 109 aa, Artificial Sequence; identical to SEQ ID NO: 11907
  Synthetic polypeptide

SEQ ID NO: 11909 - protein, 511 aa, Artificial Sequence
  Synthetic polypeptide
ARRGALEVQVPEDPVVALVGTDATLCCSFSPEPGFSLAQLNLIWQLTDTKQLVHSFAEGQDQGSAYANRTALFPDLLAQGNASLRLQRVRVADEGSFTCFVSIRDFGSAAVSLQVAAPYSKPSMTLEPNKDLRPGDTVTITCSSYQGYPEAEVFWQDGQGVPLTGNVTTSQMANEQGLFDVHSILRVVLGANGTYSCLVRNPVLQQDAHSSVTITPQRSPTGAVEVQVPEDPVVALVGTDATLRCSFSPEPGFSLAQLNLIWQLTDTKQLVHSFTEGRDQGSAYANRTALFPDLLAQGNASLRLQRVRVADEGSFTCFVSIRDFGSAAVSLQVAAPYSKPSMTLEPNKDLRPGDTVTITCSSYRGYPEAEVFWQDGQGVPLTGNVTTSQMANEQGLFDVHSVLRVVLGANGTYSCLVRNPVLQQDAHGSVTITGQPMTFPPEALWVTVGLSVCLIALLVALAFVCWRKIKQSCEEENAGAEDQDGEGEGSKTALQPLKHSDSKEDDGQEIA

SEQ ID NO: 11910 - protein, 293 aa, Artificial Sequence
  Synthetic polypeptide
ARRGALEVQVPEDPVVALVGTDATLCCSFSPEPGFSLAQLNLIWQLTDTKQLVHSFAEGQDQGSAYANRTALFPDLLAQGNASLRLQRVRVADEGSFTCFVSIRDFGSAAVSLQVAAPYSKPSMTLEPNKDLRPGDTVTITCSSYRGYPEAEVFWQDGQGVPLTGNVTTSQMANEQGLFDVHSVLRVVLGANGTYSCLVRNPVLQQDAHGSVTITGQPMTFPPEALWVTVGLSVCLIALLVALAFVCWRKIKQSCEEENAGAEDQDGEGEGSKTALQPLKHSDSKEDDGQEIA

SEQ ID NO: 11911 - protein, 293 aa, Artificial Sequence; identical to SEQ ID NO: 11910
  Synthetic polypeptide

SEQ ID NO: 11912 - protein, 113 aa, Artificial Sequence
  Synthetic polypeptide
ARRGALEVQVPEDPVVALVGTDATLCCSFSPEPGFSLAQLNLIWQLTDTKQLVHSFAEGQDQGSAYANRTALFPDLLAQGNASLRLQRVRVADEGSFTCFVSIRDFGSAAVSL

SEQ ID NO: 11913 - protein, 133 aa, Artificial Sequence
  Synthetic polypeptide
ARRGALEVQVPEDPVVALVGTDATLCCSFSPEPGFSLAQLNLIWQLTDTKQLVHSFAEGQDQGSAYANRTALFPDLLAQGNASLRLQRVRVADEGSFTCFVSIRDFGSAAVSLQVAAPYSKPSMTLEPNKDLR

SEQ ID NO: 11914 - protein, 510 aa, Artificial Sequence
  Synthetic polypeptide
ARRGALEVQVPEDPVVALVGTDATLCCSFSPEPGFSLAQLNLIWQLTDTKQLVHSFAEGQDQGSAYANRTALFPDLLAQGNASLRLQRVRVADEGSFTCFVSIRDFGSAAVSLQVAAPYSKPSMTLEPNKDLRPGDTVTITCSSYQGYPEAEVFWQDGQGVPLTGNVTTSQMANEQGLFDVHSILRVVLGANGTYSCLVRNPVLQQDAHSSVTITPQRSPTGAVEVQVPEDPVVALVGTDATLRCSFSPEPGFSLAQLNLIWQLTDTKQLVHSFTEGRDQGSAYANRTALFPDLLAQGNASLRLQRVRVADEGSFTCFVSIRDFGSAAVSLQVAAPYSKPSMTLEPNKDLRPGDTVTITCSSYRGYPEAEVFWQDGQGVPLTGNVTTSQMANEQGLFDVHSVLRVVLGANGTYSCLVRNPVLQQDAHGSVTITGQPMTFPPEALWVTVGLSVCLIALLVALAFVCWRKIKQSCEEENAGAEDQDGEGEGSKTALQPLKHSDSKEGKDTWA

SEQ ID NO: 11915 - protein, 84 aa, Artificial Sequence
  Synthetic polypeptide
ARRGALEVQVPEDPVVALVGTDATLCCSFSPEPGFSLAQLNLIWQLTDTKQLVHSFAEGQDQGSAYANRTALFPDLLAQGNASL

SEQ ID NO: 11916 - protein, 29 aa, Artificial Sequence
  Synthetic polypeptide
RRGAEPWRSRSLKTQWWHWWAPMPPCAAP

SEQ ID NO: 11917 - protein, 28 aa, Artificial Sequence
  Synthetic polypeptide
ARRGALEVQVPEDPVVALVGTDATLCCS

SEQ ID NO: 11918 - protein, 142 aa, Artificial Sequence
  Synthetic polypeptide
ARRGALEVQVPEDPVVALVGTDATLCCSFSPEPGFSLAQLNLIWQLTDTKQLVHSFAEGQDQGSAYANRTALFPDLLAQGNASLRLQRVRVADEGSFTCFVSIRDFGSAAVSLQVAAPYSKPSMTLEPNKDLRPGDTVTITC

SEQ ID NO: 11919 - protein, 8 aa, Artificial Sequence
  Synthetic polypeptide
SQHFGRPR

SEQ ID NO: 11920 - protein, 8 aa, Artificial Sequence
  Synthetic polypeptide
SQHFGRPR

SEQ ID NO: 11921 - protein, 8 aa, Artificial Sequence
  Synthetic polypeptide
SQHFGRPR

SEQ ID NO: 11922 - protein, 8 aa, Artificial Sequence
  Synthetic polypeptide
SQHFGRPR

SEQ ID NO: 11923 - protein, 8 aa, Artificial Sequence
  Synthetic polypeptide
SQHFGRPR

SEQ ID NO: 11924 - protein, 8 aa, Artificial Sequence
  Synthetic polypeptide
SQHFGRPR

SEQ ID NO: 11925 - protein, 22 aa, Artificial Sequence
  Synthetic polypeptide
GQAWYFTPVISALWEAEMMDKK

SEQ ID NO: 11926 - protein, 22 aa, Artificial Sequence
  Synthetic polypeptide
GQAWYFTPVISALWEAEMMDKK

SEQ ID NO: 11927 - protein, 22 aa, Artificial Sequence
  Synthetic polypeptide
GQAWYFTPVISALWEAEMMDKK

SEQ ID NO: 11928 - protein, 22 aa, Artificial Sequence
  Synthetic polypeptide
GQAWYFTPVISALWEAEMMDKK

SEQ ID NO: 11929 - protein, 22 aa, Artificial Sequence
  Synthetic polypeptide
GQAWYFTPVISALWEAEMMDKK

SEQ ID NO: 11930 - protein, 22 aa, Artificial Sequence
  Synthetic polypeptide
GQAWYFTPVISALWEAEMMDKK

SEQ ID NO: 11931 - protein, 23 aa, Artificial Sequence
  Synthetic polypeptide
PGMVLHTCNLSTLGGRDDGQEIA

SEQ ID NO: 11932 - protein, 23 aa, Artificial Sequence
  Synthetic polypeptide
PGMVLHTCNLSTLGGRDDGQEIA

SEQ ID NO: 11933 - protein, 23 aa, Artificial Sequence
  Synthetic polypeptide
PGMVLHTCNLSTLGGRDDGQEIA

SEQ ID NO: 11934 - protein, 23 aa, Artificial Sequence
  Synthetic polypeptide
PGMVLHTCNLSTLGGRDDGQEIA

SEQ ID NO: 11935 - protein, 23 aa, Artificial Sequence
  Synthetic polypeptide
PGMVLHTCNLSTLGGRDDGQEIA

SEQ ID NO: 11936 - protein, 23 aa, Artificial Sequence
  Synthetic polypeptide
PGMVLHTCNLSTLGGRDDGQEIA

SEQ ID NO: 11937 - protein, 16 aa, Artificial Sequence
  Synthetic polypeptide
PSNSSAWMPIVLPRAG

SEQ ID NO: 11938 - protein, 16 aa, Artificial Sequence
  Synthetic polypeptide
PSNSSAWMPIVLPRAG

SEQ ID NO: 11939 - protein, 16 aa, Artificial Sequence
  Synthetic polypeptide
PSNSSAWMPIVLPRAG

SEQ ID NO: 11940 - protein, 16 aa, Artificial Sequence
  Synthetic polypeptide
PSNSSAWMPIVLPRAG

SEQ ID NO: 11941 - protein, 138 aa, Artificial Sequence
  Synthetic polypeptide
GHSSLSSAGSVFSWLWCSCRFAAGPFPLFSLCILPGALSHAPDFSYCPGVADTQHSHLPARPAWPVTFQQLRMDAHSPPESWMTAAVSPVTSSWKAPAPSGSWTRTLLTPKQKTDLWFSLTSRLTMKVGSPGATPTPF

SEQ ID NO: 11942 - protein, 138 aa, Artificial Sequence; identical to SEQ ID NO: 11941
  Synthetic polypeptide

SEQ ID NO: 11943 - protein, 136 aa, Artificial Sequence
  Synthetic polypeptide
GHSSLSSAGSVFSWLWCSCRFAAGPFPLFSLCILPGALSHAPDFSYCPGVADTQHSHLPARPAWPVTFQQLRMDAHSPPESWMTAAVSPVTSSWKAPAPSGSWTRTLLTPKQKTDLWFSLTSRLTMKPRRLASWLR

SEQ ID NO: 11944 - protein, 136 aa, Artificial Sequence; identical to SEQ ID NO: 11943
  Synthetic polypeptide

SEQ ID NO: 11945 - protein, 42 aa, Artificial Sequence
  Synthetic polypeptide
GYLQRSSSSWEPRPWPSWCSCLCSMAGTSCSSVPWSPRGPSG

SEQ ID NO: 11946 - protein, 42 aa, Artificial Sequence; identical to SEQ ID NO: 11945
  Synthetic polypeptide

SEQ ID NO: 11947 - protein, 42 aa, Artificial Sequence; identical to SEQ ID NO: 11945
  Synthetic polypeptide

SEQ ID NO: 11948 - protein, 42 aa, Artificial Sequence; identical to SEQ ID NO: 11945
  Synthetic polypeptide

SEQ ID NO: 11949 - protein, 42 aa, Artificial Sequence; identical to SEQ ID NO: 11945
  Synthetic polypeptide

SEQ ID NO: 11950 - protein, 42 aa, Artificial Sequence; identical to SEQ ID NO: 11945
  Synthetic polypeptide

SEQ ID NO: 11951 - protein, 42 aa, Artificial Sequence; identical to SEQ ID NO: 11945
  Synthetic polypeptide

SEQ ID NO: 11952 - protein, 42 aa, Artificial Sequence; identical to SEQ ID NO: 11945
  Synthetic polypeptide

SEQ ID NO: 11953 - protein, 63 aa, Artificial Sequence
  Synthetic polypeptide
ATYKDHLLPGNHGPGLPGAHACAPWQEPPALPFPGVLVALLADFGPGCDPAEHGSPLGLPGDS

SEQ ID NO: 11954 - protein, 63 aa, Artificial Sequence; identical to SEQ ID NO: 11953
  Synthetic polypeptide

SEQ ID NO: 11955 - protein, 63 aa, Artificial Sequence; identical to SEQ ID NO: 11953
  Synthetic polypeptide

SEQ ID NO: 11956 - protein, 63 aa, Artificial Sequence; identical to SEQ ID NO: 11953
  Synthetic polypeptide

SEQ ID NO: 11957 - protein, 63 aa, Artificial Sequence; identical to SEQ ID NO: 11953
  Synthetic polypeptide

SEQ ID NO: 11958 - protein, 63 aa, Artificial Sequence; identical to SEQ ID NO: 11953
  Synthetic polypeptide

SEQ ID NO: 11959 - protein, 63 aa, Artificial Sequence; identical to SEQ ID NO: 11953
  Synthetic polypeptide

SEQ ID NO: 11960 - protein, 63 aa, Artificial Sequence; identical to SEQ ID NO: 11953
  Synthetic polypeptide

SEQ ID NO: 11961 - protein, 232 aa, Artificial Sequence
  Synthetic polypeptide
LPTKIIFFLGTTALAFLVLMPVLHGRNLLLFRSLESSWPFWLTLALAVILQNMAAHWVFLETHDGHPQLTNRRVLYAATFLLFPLNVLVGAMVATWRVLLSALYNAIHLGQMDLSLLPPRAATLDPGYYTYRNFLKIEVSQSHPAMTAFCSLLLQAQSLLPRTMAAPQDSLRPGEEDEGMQLLQTKDSMAKGARPGASRGRARWGLAYTLLHNPTLQVFRKTALLGANGAQP

SEQ ID NO: 11962 - protein, 232 aa, Artificial Sequence; identical to SEQ ID NO: 11961
  Synthetic polypeptide

SEQ ID NO: 11963 - protein, 232 aa, Artificial Sequence; identical to SEQ ID NO: 11961
  Synthetic polypeptide

SEQ ID NO: 11964 - protein, 232 aa, Artificial Sequence; identical to SEQ ID NO: 11961
  Synthetic polypeptide

SEQ ID NO: 11965 - protein, 232 aa, Artificial Sequence; identical to SEQ ID NO: 11961
  Synthetic polypeptide

SEQ ID NO: 11966 - protein, 232 aa, Artificial Sequence; identical to SEQ ID NO: 11961
  Synthetic polypeptide

SEQ ID NO: 11967 - protein, 232 aa, Artificial Sequence; identical to SEQ ID NO: 11961
  Synthetic polypeptide

SEQ ID NO: 11968 - protein, 232 aa, Artificial Sequence; identical to SEQ ID NO: 11961
  Synthetic polypeptide

SEQ ID NO: 11969 - protein, 50 aa, Artificial Sequence
  Synthetic polypeptide
GYLQRSSSSWEPRPWPSWCSCLCSMAGTSCSSVPWSPREHGSPLGLPGDS

SEQ ID NO: 11970 - protein, 199 aa, Artificial Sequence
  Synthetic polypeptide
ATYKDHLLPGNHGPGLPGAHACAPWQEPPALPFPGVLVNMAAHWVFLETHDGHPQLTNRRVLYAATFLLFPLNVLVGAMVATWRVLLSALYNAIHLGQMDLSLLPPRAATLDPGYYTYRNFLKIEVSQSHPAMTAFCSLLLQAQSLLPRTMAAPQDSLRPGEEDEGMQLLQTKDSMAKGARPGASRGRARWGLAYTLLH

SEQ ID NO: 11971 - protein, 37 aa, Artificial Sequence
  Synthetic polypeptide
LPTKIIFFLGTTALAFLVLMPVLHGRNLLLFRSLESS

SEQ ID NO: 11972 - protein, 69 aa, Artificial Sequence
  Synthetic polypeptide
GYLQRAPGAADHLLPGNHGPGLPGAHACAPWQEPPALPFPGVLVALLADFGPGCDPAEHGSPLGLPGDS

SEQ ID NO: 11973 - protein, 69 aa, Artificial Sequence; identical to SEQ ID NO: 11972
  Synthetic polypeptide

SEQ ID NO: 11974 - protein, 69 aa, Artificial Sequence; identical to SEQ ID NO: 11972
  Synthetic polypeptide

SEQ ID NO: 11975 - protein, 69 aa, Artificial Sequence; identical to SEQ ID NO: 11972
  Synthetic polypeptide

SEQ ID NO: 11976 - protein, 69 aa, Artificial Sequence; identical to SEQ ID NO: 11972
  Synthetic polypeptide

SEQ ID NO: 11977 - protein, 69 aa, Artificial Sequence; identical to SEQ ID NO: 11972
  Synthetic polypeptide

SEQ ID NO: 11978 - protein, 69 aa, Artificial Sequence; identical to SEQ ID NO: 11972
  Synthetic polypeptide

SEQ ID NO: 11979 - protein, 69 aa, Artificial Sequence; identical to SEQ ID NO: 11972
  Synthetic polypeptide

SEQ ID NO: 11980 - protein, 238 aa, Artificial Sequence
  Synthetic polypeptide
ATYKGLLVQQIIFFLGTTALAFLVLMPVLHGRNLLLFRSLESSWPFWLTLALAVILQNMAAHWVFLETHDGHPQLTNRRVLYAATFLLFPLNVLVGAMVATWRVLLSALYNAIHLGQMDLSLLPPRAATLDPGYYTYRNFLKIEVSQSHPAMTAFCSLLLQAQSLLPRTMAAPQDSLRPGEEDEGMQLLQTKDSMAKGARPGASRGRARWGLAYTLLHNPTLQVFRKTALLGANGAQP

SEQ ID NO: 11981 - protein, 238 aa, Artificial Sequence; identical to SEQ ID NO: 11980
  Synthetic polypeptide

SEQ ID NO: 11982 - protein, 238 aa, Artificial Sequence; identical to SEQ ID NO: 11980
  Synthetic polypeptide

SEQ ID NO: 11983 - protein, 238 aa, Artificial Sequence; identical to SEQ ID NO: 11980
  Synthetic polypeptide

SEQ ID NO: 11984 - protein, 238 aa, Artificial Sequence; identical to SEQ ID NO: 11980
  Synthetic polypeptide

SEQ ID NO: 11985 - protein, 238 aa, Artificial Sequence; identical to SEQ ID NO: 11980
  Synthetic polypeptide

SEQ ID NO: 11986 - protein, 238 aa, Artificial Sequence; identical to SEQ ID NO: 11980
  Synthetic polypeptide

SEQ ID NO: 11987 - protein, 238 aa, Artificial Sequence; identical to SEQ ID NO: 11980
  Synthetic polypeptide

SEQ ID NO: 11988 - protein, 47 aa, Artificial Sequence
  Synthetic polypeptide
LPTKGSWCSRSSSSWEPRPWPSWCSCLCSMAGTSCSSVPWSPRGPSG

SEQ ID NO: 11989 - protein, 47 aa, Artificial Sequence; identical to SEQ ID NO: 11988
  Synthetic polypeptide

SEQ ID NO: 11990 - protein, 47 aa, Artificial Sequence; identical to SEQ ID NO: 11988
  Synthetic polypeptide

SEQ ID NO: 11991 - protein, 47 aa, Artificial Sequence; identical to SEQ ID NO: 11988
  Synthetic polypeptide

SEQ ID NO: 11992 - protein, 47 aa, Artificial Sequence; identical to SEQ ID NO: 11988
  Synthetic polypeptide

SEQ ID NO: 11993 - protein, 47 aa, Artificial Sequence; identical to SEQ ID NO: 11988
  Synthetic polypeptide

SEQ ID NO: 11994 - protein, 47 aa, Artificial Sequence; identical to SEQ ID NO: 11988
  Synthetic polypeptide

SEQ ID NO: 11995 - protein, 47 aa, Artificial Sequence; identical to SEQ ID NO: 11988
  Synthetic polypeptide

SEQ ID NO: 11996 - protein, 205 aa, Artificial Sequence
  Synthetic polypeptide
GYLQRAPGAADHLLPGNHGPGLPGAHACAPWQEPPALPFPGVLVNMAAHWVFLETHDGHPQLTNRRVLYAATFLLFPLNVLVGAMVATWRVLLSALYNAIHLGQMDLSLLPPRAATLDPGYYTYRNFLKIEVSQSHPAMTAFCSLLLQAQSLLPRTMAAPQDSLRPGEEDEGMQLLQTKDSMAKGARPGASRGRARWGLAYTLLH

SEQ ID NO: 11997 - protein, 43 aa, Artificial Sequence
  Synthetic polypeptide
ATYKGLLVQQIIFFLGTTALAFLVLMPVLHGRNLLLFRSLESS

SEQ ID NO: 11998 - protein, 55 aa, Artificial Sequence
  Synthetic polypeptide
LPTKGSWCSRSSSSWEPRPWPSWCSCLCSMAGTSCSSVPWSPREHGSPLGLPGDS

SEQ ID NO: 11999 - protein, 57 aa, Artificial Sequence
  Synthetic polypeptide
SQHFGRLRHEDCLSSEIQDQPGRHGKCPPATPAYHPACTTPAWPRCQSLCCCSWPCW

SEQ ID NO: 12000 - protein, 57 aa, Artificial Sequence; identical to SEQ ID NO: 11999
  Synthetic polypeptide

SEQ ID NO: 12001 - protein, 57 aa, Artificial Sequence; identical to SEQ ID NO: 11999
  Synthetic polypeptide

SEQ ID NO: 12002 - protein, 57 aa, Artificial Sequence; identical to SEQ ID NO: 11999
  Synthetic polypeptide

SEQ ID NO: 12003 - protein, 57 aa, Artificial Sequence; identical to SEQ ID NO: 11999
  Synthetic polypeptide

SEQ ID NO: 12004 - protein, 57 aa, Artificial Sequence; identical to SEQ ID NO: 11999
  Synthetic polypeptide

SEQ ID NO: 12005 - protein, 57 aa, Artificial Sequence; identical to SEQ ID NO: 11999
  Synthetic polypeptide

SEQ ID NO: 12006 - protein, 57 aa, Artificial Sequence; identical to SEQ ID NO: 11999
  Synthetic polypeptide

SEQ ID NO: 12007 - protein, 57 aa, Artificial Sequence; identical to SEQ ID NO: 11999
  Synthetic polypeptide

SEQ ID NO: 12008 - protein, 57 aa, Artificial Sequence; identical to SEQ ID NO: 11999
  Synthetic polypeptide

SEQ ID NO: 12009 - protein, 57 aa, Artificial Sequence; identical to SEQ ID NO: 11999
  Synthetic polypeptide

SEQ ID NO: 12010 - protein, 51 aa, Artificial Sequence
  Synthetic polypeptide
AQKSKTSLGDMGSALLPHQHTTRPVPRLPGLAVNPCAAAPGHAGEAPPALA

SEQ ID NO: 12011 - protein, 51 aa, Artificial Sequence; identical to SEQ ID NO: 12010
  Synthetic polypeptide

SEQ ID NO: 12012 - protein, 51 aa, Artificial Sequence; identical to SEQ ID NO: 12010
  Synthetic polypeptide

SEQ ID NO: 12013 - protein, 51 aa, Artificial Sequence; identical to SEQ ID NO: 12010
  Synthetic polypeptide

SEQ ID NO: 12014 - protein, 51 aa, Artificial Sequence; identical to SEQ ID NO: 12010
  Synthetic polypeptide

SEQ ID NO: 12015 - protein, 51 aa, Artificial Sequence; identical to SEQ ID NO: 12010
  Synthetic polypeptide

SEQ ID NO: 12016 - protein, 51 aa, Artificial Sequence; identical to SEQ ID NO: 12010
  Synthetic polypeptide

SEQ ID NO: 12017 - protein, 51 aa, Artificial Sequence; identical to SEQ ID NO: 12010
  Synthetic polypeptide

SEQ ID NO: 12018 - protein, 51 aa, Artificial Sequence; identical to SEQ ID NO: 12010
  Synthetic polypeptide

SEQ ID NO: 12019 - protein, 51 aa, Artificial Sequence; identical to SEQ ID NO: 12010
  Synthetic polypeptide

SEQ ID NO: 12020 - protein, 51 aa, Artificial Sequence; identical to SEQ ID NO: 12010
  Synthetic polypeptide

SEQ ID NO: 12021 - protein, 644 aa, Artificial Sequence
  Synthetic polypeptide
GLLELRNPRPAWATWEVPSCHTSIPPGLYHACLASLSILVLLLLAMLVRRRQLWPDCVRGRPGLPSPVDFLAGDRPRAVPAAVFMVLLSSLCLLLPDEDALPFLTLASAPSQDGKTEAPRGAWKILGLFYYAALYYPLAACATAGHTAAHLLGSTLSWAHLGVQVWQRAECPQVPKIYKYYSLLASLPLLLGLGFLSLWYPVQLVRSFSRRTGAGSKGLQSSYSEEYLRNLLCRKKLGSSYHTSKHGFLSWARVCLRHCIYTPQPGFHLPLKLVLSATLTGTAIYQVALLLLVGVVPTIQKVRAGVTTDVSYLLAGFGIVLSEDKQEVVELVKHHLWALEVCYISALVLSCLLTFLVLMRSLVTHRTNLRALHRGAALDLSPLHRSPHPSRQAIFCWMSFSAYQTAFICLGLLVQQIIFFLGTTALAFLVLMPVLHGRNLLLFRSLESSWPFWLTLALAVILQNMAAHWVFLETHDGHPQLTNRRVLYAATFLLFPLNVLVGAMVATWRVLLSALYNAIHLGQMDLSLLPPRAATLDPGYYTYRNFLKIEVSQSHPAMTAFCSLLLQAQSLLPRTMAAPQDSLRPGEEDEGMQLLQTKDSMAKGARPGASRGRARWGLAYTLLHNPTLQVFRKTALLGANGAQP

SEQ ID NO: 12022 - protein, 644 aa, Artificial Sequence; identical to SEQ ID NO: 12021
  Synthetic polypeptide

SEQ ID NO: 12023 - protein, 644 aa, Artificial Sequence; identical to SEQ ID NO: 12021
  Synthetic polypeptide

SEQ ID NO: 12024 - protein, 644 aa, Artificial Sequence; identical to SEQ ID NO: 12021
  Synthetic polypeptide

SEQ ID NO: 12025 - protein, 644 aa, Artificial Sequence; identical to SEQ ID NO: 12021
  Synthetic polypeptide

SEQ ID NO: 12026 - protein, 644 aa, Artificial Sequence; identical to SEQ ID NO: 12021
  Synthetic polypeptide

SEQ ID NO: 12027 - protein, 635 aa, Artificial Sequence
  Synthetic polypeptide
GLLELRNPRPAWATWEVPSCHTSIPPGLYHACLASLSILVLLLLAMLVRRRQLWPDCVRGRPGLPRPRAVPAAVFMVLLSSLCLLLPDEDALPFLTLASAPSQDGKTEAPRGAWKILGLFYYAALYYPLAACATAGHTAAHLLGSTLSWAHLGVQVWQRAECPQVPKIYKYYSLLASLPLLLGLGFLSLWYPVQLVRSFSRRTGAGSKGLQSSYSEEYLRNLLCRKKLGSSYHTSKHGFLSWARVCLRHCIYTPQPGFHLPLKLVLSATLTGTAIYQVALLLLVGVVPTIQKVRAGVTTDVSYLLAGFGIVLSEDKQEVVELVKHHLWALEVCYISALVLSCLLTFLVLMRSLVTHRTNLRALHRGAALDLSPLHRSPHPSRQAIFCWMSFSAYQTAFICLGLLVQQIIFFLGTTALAFLVLMPVLHGRNLLLFRSLESSWPFWLTLALAVILQNMAAHWVFLETHDGHPQLTNRRVLYAATFLLFPLNVLVGAMVATWRVLLSALYNAIHLGQMDLSLLPPRAATLDPGYYTYRNFLKIEVSQSHPAMTAFCSLLLQAQSLLPRTMAAPQDSLRPGEEDEGMQLLQTKDSMAKGARPGASRGRARWGLAYTLLHNPTLQVFRKTALLGANGAQP

SEQ ID NO: 12028 - protein, 636 aa, Artificial Sequence
  Synthetic polypeptide
GLLELRNPRPAWATWEVPSCHTSIPPGLYHACLASLSILVLLLLAMLVRRRQLWPDCVRGRPGLPSPVDFLAGDRPRAVPAAVFMVLLSSLCLLLPDEDALPFLTLASAPSQGAWKILGLFYYAALYYPLAACATAGHTAAHLLGSTLSWAHLGVQVWQRAECPQVPKIYKYYSLLASLPLLLGLGFLSLWYPVQLVRSFSRRTGAGSKGLQSSYSEEYLRNLLCRKKLGSSYHTSKHGFLSWARVCLRHCIYTPQPGFHLPLKLVLSATLTGTAIYQVALLLLVGVVPTIQKVRAGVTTDVSYLLAGFGIVLSEDKQEVVELVKHHLWALEVCYISALVLSCLLTFLVLMRSLVTHRTNLRALHRGAALDLSPLHRSPHPSRQAIFCWMSFSAYQTAFICLGLLVQQIIFFLGTTALAFLVLMPVLHGRNLLLFRSLESSWPFWLTLALAVILQNMAAHWVFLETHDGHPQLTNRRVLYAATFLLFPLNVLVGAMVATWRVLLSALYNAIHLGQMDLSLLPPRAATLDPGYYTYRNFLKIEVSQSHPAMTAFCSLLLQAQSLLPRTMAAPQDSLRPGEEDEGMQLLQTKDSMAKGARPGASRGRARWGLAYTLLHNPTLQVFRKTALLGANGAQP

SEQ ID NO: 12029 - protein, 454 aa, Artificial Sequence
  Synthetic polypeptide
GLLELRNPRPAWATWEVPSCHTSIPPGLYHACLASLSILVLLLLAMLVRRRQLWPDCVRGRPGLPSPVDFLAGDRPRAVPAAVFMVLLSSLCLLLPDEDALPFLTLASAPSQDGKTEAPRGAWKILGLFYYAALYYPLAACATAGHTAAHLLGSTLSWAHLGVQVWQRAECPQVPKIYKYYSLLASLPLLLGLGFLSLWYPVQLVRSFSRRTGAGSKGLQSSYSEEYLRNLLCRKKLGSRMAAVEDWLLLPRILVIKRDNYQLGTAGRPWPGLGHLGSCWPFSWAPWEGGGLPGLSGAVHHTPSFEDYRIPSPAEAGAFSYTDRDGHLPGGPAAAGGRGTHYPEGEGRGHHGCLLPAGRLWNRALRGQAGGGGAGEAPSVGSGSVLHLSLGLVLLTHLPGPDALTGDTQDQPSSSAPRSCPGLESLASESPSLPPSHILLDELQCLPDSLYLPW

SEQ ID NO: 12030 - protein, 136 aa, Artificial Sequence
  Synthetic polypeptide
GLLELRNPRPAWATWEVPSCHTSIPPGLYHACLASLSILVLLLLAMLVRRRQLWPDCVRGRPGLPSPVDFLAGDRPRAVPAAVFMVLLSSLCLLLPDEDALPFLTLASAPSQDGKTEAPRGNLPKITELRLVRAWI

SEQ ID NO: 12031 - protein, 65 aa, Artificial Sequence
  Synthetic polypeptide
GLLELRNPRPAWATWEVPSCHTSIPPGLYHACLASLSILVLLLLAMLVRRRQLWPDCVRGRPGLP

SEQ ID NO: 12032 - protein, 47 aa, Artificial Sequence
  Synthetic polypeptide
SQHFGRLRHEDCLSSEIQDQPGRHGKCPPATPAYHPACTTPAWPRCQ

SEQ ID NO: 12033 - protein, 39 aa, Artificial Sequence
  Synthetic polypeptide
AQKSKTSLGDMGSALLPHQHTTRPVPRLPGLAVSESNPS

SEQ ID NO: 12034 - protein, 64 aa, Artificial Sequence
  Synthetic polypeptide
GLLELRNPRPAWATWEVPSCHTSIPPGLYHACLASLSVSPTQVEPGLQAAASLGSGTCVPHWGW

SEQ ID NO: 12035 - protein, 305 aa, Artificial Sequence
  Synthetic polypeptide
ISLMRSGGFKKGNFPAQAVFSCLPPCEMCLSSSAMIVRPPHPRGTDLNEKFYSFMQKMVKEHYKTFEKGHIRDITDSLIEHCQEKQLDENANVQLSDEKIINIVLDLFGAGFDTVTTAISWSLMYLVMNPRVQRKIQEELDTVIGRSRRPRLSDRSHLPYMEAFILETFRHSSFVPFTIPHSTTRDTSLKGFYIPKGRCVFVNQWQINHDQKLWVNPSEFLPERFLTPDGAIDKVLSEKVIIFGMGKRKCIGETIARWEVFLFLAILLQRVEFSVPLGVKVDMTPIYGLTMKHACCEHFQMQLRS

SEQ ID NO: 12036 - protein, 305 aa, Artificial Sequence; identical to SEQ ID NO: 12035
  Synthetic polypeptide

SEQ ID NO: 12037 - protein, 305 aa, Artificial Sequence; identical to SEQ ID NO: 12035
  Synthetic polypeptide

SEQ ID NO: 12038 - protein, 9 aa, Artificial Sequence
  Synthetic polypeptide
GLPTHAELT

SEQ ID NO: 12039 - protein, 9 aa, Artificial Sequence
  Synthetic polypeptide
GLPTHAELT

SEQ ID NO: 12040 - protein, 9 aa, Artificial Sequence
  Synthetic polypeptide
GLPTHAELT

SEQ ID NO: 12041 - protein, 9 aa, Artificial Sequence
  Synthetic polypeptide
GLPTHAELT

SEQ ID NO: 12042 - protein, 9 aa, Artificial Sequence
  Synthetic polypeptide
GLPTHAELT

SEQ ID NO: 12043 - protein, 9 aa, Artificial Sequence
  Synthetic polypeptide
GLPTHAELT

SEQ ID NO: 12044 - protein, 276 aa, Artificial Sequence
  Synthetic polypeptide
ISLMRSGGFKKGNFPAQAVFSCLPPCEMCLSSSAMIVRPPHPRGTDLNEKFYSFMQKMVKEHYKTFEKGHIRDITDSLIEHCQEKQLDENANVQLSDEKIINIVLDLFGAGFDTVTTAISWSLMYLVMNPRVQRKIQEELDTVIGRSRRPRLSDRSHLPYMEAFILETFRHSSFVPFTIPHRKLWVNPSEFLPERFLTPDGAIDKVLSEKVIIFGMGKRKCIGETIARWEVFLFLAILLQRVEFSVPLGVKVDMTPIYGLTMKHACCEHFQMQLRS

SEQ ID NO: 12045 - protein, 47 aa, Artificial Sequence
  Synthetic polypeptide
ISLMRSGGFKKGNFPAQAVFSCLPPCEMCLSSSAMIVRPPHPRGTDL

SEQ ID NO: 12046 - protein, 47 aa, Artificial Sequence; identical to SEQ ID NO: 12045
  Synthetic polypeptide

SEQ ID NO: 12047 - protein, 185 aa, Artificial Sequence
  Synthetic polypeptide
GKAQWLTPVIPALWEAEVWAHRWMDLSEHGFGLALLNDCKYGASVRGSILSLSLLRAPKAPDATADTGRHEFTYALMPHKAPSPAPATSWSAFSVSSPAVVLETVKQAESSPQRRSLVLRLYEAHGSHVDCWLHLSLPVQEAILCDLLERPDPAGHLTLRDNRLKLTFSPFQVLSLLLVLQPPPH

SEQ ID NO: 12048 - protein, 66 aa, Artificial Sequence
  Synthetic polypeptide
FQHFGRPRCGPIAGWICQNTALGWPCSTTASMARQCEAASSASRSCGRLKPRTLLLTRGATSSPMH

SEQ ID NO: 12049 - protein, 66 aa, Artificial Sequence; identical to SEQ ID NO: 12048
  Synthetic polypeptide

SEQ ID NO: 12050 - protein, 66 aa, Artificial Sequence; identical to SEQ ID NO: 12048
  Synthetic polypeptide

SEQ ID NO: 12051 - protein, 66 aa, Artificial Sequence; identical to SEQ ID NO: 12048
  Synthetic polypeptide

SEQ ID NO: 12052 - protein, 57 aa, Artificial Sequence
  Synthetic polypeptide
QGTVAHACNSSTLGGRGVGPSLDGSVRTRLWAGPAQRLQVWRVSARQHPQPLALAGA

SEQ ID NO: 12053 - protein, 57 aa, Artificial Sequence; identical to SEQ ID NO: 12052
  Synthetic polypeptide

SEQ ID NO: 12054 - protein, 57 aa, Artificial Sequence; identical to SEQ ID NO: 12052
  Synthetic polypeptide

SEQ ID NO: 12055 - protein, 57 aa, Artificial Sequence; identical to SEQ ID NO: 12052
  Synthetic polypeptide

SEQ ID NO: 12056 - protein, 208 aa, Artificial Sequence
  Synthetic polypeptide
GKAQWLTPVIPALWEAEVWAHRWMDLSEHGFGLALLNDCKYGASVRGSILSLSLLRAPKAPDATADTGRHEFTYALMPHKGSFQDAGVIQAAYSLNFPLLALPAPSPAPATSWSAFSVSSPAVVLETVKQAESSPQRRSLVLRLYEAHGSHVDCWLHLSLPVQEAILCDLLERPDPAGHLTLRDNRLKLTFSPFQVLSLLLVLQPPPH

SEQ ID NO: 12057 - protein, 208 aa, Artificial Sequence; identical to SEQ ID NO: 12056
  Synthetic polypeptide

SEQ ID NO: 12058 - protein, 208 aa, Artificial Sequence; identical to SEQ ID NO: 12056
  Synthetic polypeptide

SEQ ID NO: 12059 - protein, 105 aa, Artificial Sequence
  Synthetic polypeptide
SPASYSLCVLRRSSELPEYEQPHLSDTVMGRWTSLLPQTDPLQPRKHSLGGLAAPLHGVRCPWCSCAGWPADHQARLCWAPAPADYGAQEEPEGRHEGETHTQGL

SEQ ID NO: 12060 - protein, 105 aa, Artificial Sequence; identical to SEQ ID NO: 12059
  Synthetic polypeptide

SEQ ID NO: 12061 - protein, 105 aa, Artificial Sequence; identical to SEQ ID NO: 12059
  Synthetic polypeptide

SEQ ID NO: 12062 - protein, 105 aa, Artificial Sequence; identical to SEQ ID NO: 12059
  Synthetic polypeptide

SEQ ID NO: 12063 - protein, 105 aa, Artificial Sequence; identical to SEQ ID NO: 12059
  Synthetic polypeptide

SEQ ID NO: 12064 - protein, 126 aa, Artificial Sequence
  Synthetic polypeptide
GGPQNSLSMSSPISQTPSWVDGLLFYHKQTHYSPGSTPLVGWLRPYMVSDVLGVAVPAGPLTTKPDYAGHQLQQIMEHKKSQKEGMKEKLTHKASENGHYELEHLSTPKLKGSSHSPDHPGCLMEN

SEQ ID NO: 12065 - protein, 126 aa, Artificial Sequence; identical to SEQ ID NO: 12064
  Synthetic polypeptide

SEQ ID NO: 12066 - protein, 126 aa, Artificial Sequence; identical to SEQ ID NO: 12064
  Synthetic polypeptide

SEQ ID NO: 12067 - protein, 126 aa, Artificial Sequence; identical to SEQ ID NO: 12064
  Synthetic polypeptide

SEQ ID NO: 12068 - protein, 126 aa, Artificial Sequence; identical to SEQ ID NO: 12064
  Synthetic polypeptide

SEQ ID NO: 12069 - protein, 10 aa, Artificial Sequence
  Synthetic polypeptide
AAPSLRHRHG

SEQ ID NO: 12070 - protein, 10 aa, Artificial Sequence
  Synthetic polypeptide
AAPSLRHRHG

SEQ ID NO: 12071 - protein, 10 aa, Artificial Sequence
  Synthetic polypeptide
AAPSLRHRHG

SEQ ID NO: 12072 - protein, 10 aa, Artificial Sequence
  Synthetic polypeptide
AAPSLRHRHG

SEQ ID NO: 12073 - protein, 10 aa, Artificial Sequence
  Synthetic polypeptide
AAPSLRHRHG

SEQ ID NO: 12074 - protein, 5 aa, Artificial Sequence
  Synthetic polypeptide
IVRGS

SEQ ID NO: 12075 - protein, 5 aa, Artificial Sequence
  Synthetic polypeptide
IVRGS

SEQ ID NO: 12076 - protein, 5 aa, Artificial Sequence
  Synthetic polypeptide
IVRGS

SEQ ID NO: 12077 - protein, 5 aa, Artificial Sequence
  Synthetic polypeptide
IVRGS

SEQ ID NO: 12078 - protein, 5 aa, Artificial Sequence
  Synthetic polypeptide
IVRGS

SEQ ID NO: 12079 - protein, 5 aa, Artificial Sequence
  Synthetic polypeptide
IVRGS

SEQ ID NO: 12080 - protein, 3 aa, Artificial Sequence
  Synthetic polypeptide
EEV

SEQ ID NO: 12081 - protein, 3 aa, Artificial Sequence
  Synthetic polypeptide
EEV

SEQ ID NO: 12082 - protein, 3 aa, Artificial Sequence
  Synthetic polypeptide
EEV

SEQ ID NO: 12083 - protein, 3 aa, Artificial Sequence
  Synthetic polypeptide
EEV

SEQ ID NO: 12084 - protein, 3 aa, Artificial Sequence
  Synthetic polypeptide
EEV

SEQ ID NO: 12085 - protein, 3 aa, Artificial Sequence
  Synthetic polypeptide
EEV

SEQ ID NO: 12086 - protein, 35 aa, Artificial Sequence
  Synthetic polypeptide
NSSSFSSSSVYTKMKMTTMKTFMMIYFHLMNSKRK

SEQ ID NO: 12087 - protein, 35 aa, Artificial Sequence; identical to SEQ ID NO: 12086
  Synthetic polypeptide

SEQ ID NO: 12088 - protein, 35 aa, Artificial Sequence; identical to SEQ ID NO: 12086
  Synthetic polypeptide

SEQ ID NO: 12089 - protein, 35 aa, Artificial Sequence; identical to SEQ ID NO: 12086
  Synthetic polypeptide

SEQ ID NO: 12090 - protein, 35 aa, Artificial Sequence; identical to SEQ ID NO: 12086
  Synthetic polypeptide

SEQ ID NO: 12091 - protein, 35 aa, Artificial Sequence; identical to SEQ ID NO: 12086
  Synthetic polypeptide

SEQ ID NO: 12092 - protein, 21 aa, Artificial Sequence
  Synthetic polypeptide
EEIMLLPGSLGCWGHSTTQNR

SEQ ID NO: 12093 - protein, 21 aa, Artificial Sequence
  Synthetic polypeptide
EEIMLLPGSLGCWGHSTTQNR

SEQ ID NO: 12094 - protein, 21 aa, Artificial Sequence
  Synthetic polypeptide
EEIMLLPGSLGCWGHSTTQNR

SEQ ID NO: 12095 - protein, 21 aa, Artificial Sequence
  Synthetic polypeptide
EEIMLLPGSLGCWGHSTTQNR

SEQ ID NO: 12096 - protein, 21 aa, Artificial Sequence
  Synthetic polypeptide
EEIMLLPGSLGCWGHSTTQNR

SEQ ID NO: 12097 - protein, 21 aa, Artificial Sequence
  Synthetic polypeptide
EEIMLLPGSLGCWGHSTTQNR

SEQ ID NO: 12098 - protein, 21 aa, Artificial Sequence
  Synthetic polypeptide
EEIMLLPGSLGCWGHSTTQNR

SEQ ID NO: 12099 - protein, 21 aa, Artificial Sequence
  Synthetic polypeptide
EEIMLLPGSLGCWGHSTTQNR

SEQ ID NO: 12100 - protein, 21 aa, Artificial Sequence
  Synthetic polypeptide
EEIMLLPGSLGCWGHSTTQNR

SEQ ID NO: 12101 - protein, 21 aa, Artificial Sequence
  Synthetic polypeptide
EEIMLLPGSLGCWGHSTTQNR

SEQ ID NO: 12102 - protein, 74 aa, Artificial Sequence
  Synthetic polypeptide
SQLLGRLRQESHLNPGGGGCGERRSCSYLGLSAAGGIPQPKTGDQRFYWWCSDSNFNSRRWYWPRNFSCSYEDF

SEQ ID NO: 12103 - protein, 74 aa, Artificial Sequence; identical to SEQ ID NO: 12102
  Synthetic polypeptide

SEQ ID NO: 12104 - protein, 74 aa, Artificial Sequence; identical to SEQ ID NO: 12102
  Synthetic polypeptide

SEQ ID NO: 12105 - protein, 74 aa, Artificial Sequence; identical to SEQ ID NO: 12102
  Synthetic polypeptide

SEQ ID NO: 12106 - protein, 74 aa, Artificial Sequence; identical to SEQ ID NO: 12102
  Synthetic polypeptide

SEQ ID NO: 12107 - protein, 373 aa, Artificial Sequence
  Synthetic polypeptide
TQEVEAAVRGDHAPTWVSRLLGAFHNPKQVTRGFTGGVQTVTLIPGDGIGPEISAAVMKIFDAAKAPIQWEERNVTAIQGPGGKWMIPSEAKESMDKNKMGLKGPLKTPIAAGHPSMNLLLRKTFDLYANVRPCVSIEGYKTPYTDVNIVTIRENTEGEYSGIEHVIVDGVVQSIKLITEGASKRIAEFAFEYARNNHRSNVTAVHKANIMRMSDGLFLQKCREVAESCKDIKFNEMYLDTVCLNMVQDPSQFDVLVMPNLYGDILSDLCAGLIGGLGVTPSGNIGANGVAIFESVHGTAPDIAGKDMANPTALLLSAVMMLRHMGLFDHAARIEAACFATIKDGKSLTKDLGGNAKCSDFTEEICRRVKDLD

SEQ ID NO: 12108 - protein, 67 aa, Artificial Sequence
  Synthetic polypeptide
TQEVEAAVRGDHAPTWVSRLLGAFHNPKQVTRGFTGGVQTVTLIPGDGIGPEISAAVMKIFDAAKAL

SEQ ID NO: 12109 - protein, 67 aa, Artificial Sequence; identical to SEQ ID NO: 12108
  Synthetic polypeptide

SEQ ID NO: 12110 - protein, 67 aa, Artificial Sequence; identical to SEQ ID NO: 12108
  Synthetic polypeptide

SEQ ID NO: 12111 - protein, 338 aa, Artificial Sequence
  Synthetic polypeptide
TQEVEAAVRGDHAPTWVSRLLGAFHNPKQVTRGFTGGVQTVTLIPGDGIGPEISAAVMKIFDAAKAPIQWEERNVTAIQGPGGKWMIPSEAKESMDKNKMGLKGYKTPYTDVNIVTIRENTEGEYSGIEHVIVDGVVQSIKLITEGASKRIAEFAFEYARNNHRSNVTAVHKANIMRMSDGLFLQKCREVAESCKDIKFNEMYLDTVCLNMVQDPSQFDVLVMPNLYGDILSDLCAGLIGGLGVTPSGNIGANGVAIFESVHGTAPDIAGKDMANPTALLLSAVMMLRHMGLFDHAARIEAACFATIKDGKSLTKDLGGNAKCSDFTEEICRRVKDLD

SEQ ID NO: 12112 - protein, 58 aa, Artificial Sequence
  Synthetic polypeptide
SQLLGRLRQESHLNPGGGGCGERRSCSYLGLSAAGGIPQPKTGDQRFYWWYQLCQAYV

SEQ ID NO: 12113 - protein, 58 aa, Artificial Sequence; identical to SEQ ID NO: 12112
  Synthetic polypeptide

SEQ ID NO: 12114 - protein, 58 aa, Artificial Sequence; identical to SEQ ID NO: 12112
  Synthetic polypeptide

SEQ ID NO: 12115 - protein, 44 aa, Artificial Sequence
  Synthetic polypeptide
TQEVEAAVRGDHAPTWVSRLLGAFHNPKQVTRGFTGGINFAKLM

SEQ ID NO: 12116 - protein, 44 aa, Artificial Sequence; identical to SEQ ID NO: 12115
  Synthetic polypeptide

SEQ ID NO: 12117 - protein, 44 aa, Artificial Sequence; identical to SEQ ID NO: 12115
  Synthetic polypeptide

SEQ ID NO: 12118 - protein, 76 aa, Artificial Sequence
  Synthetic polypeptide
SQLLGRLRQESHLNPGGGGCGERRSCSYLGLSAAGGIPQPKTGDQRFYWWCTYSVGGAERHCHSRTWRKVDDPFRG

SEQ ID NO: 12119 - protein, 182 aa, Artificial Sequence
  Synthetic polypeptide
TQEVEAAVRGDHAPTWVSRLLGAFHNPKQVTRGFTGGAPIQWEERNVTAIQGPGGKWMIPSEAKESMDKNKMGLKGPLKTPIAAGHPSMNLLLRKTFDLYANVRPCVSIEGYKTPYTDVNIVTIRENTEGEYSGIEHVIVDGVVQSIKLITEGASKRIAEFAFEYARNNHRSNVTAVHKANI

SEQ ID NO: 12120 - protein, 50 aa, Artificial Sequence
  Synthetic polypeptide
SQLLGRLRQESHLNPGGGGCGERRSCSYLGLSAAGGIPQPKTGDQRFYWW

SEQ ID NO: 12121 - protein, 49 aa, Artificial Sequence
  Synthetic polypeptide
TQEVEAAVRGDHAPTWVSRLLGAFHNPKQVTRGFTGGEMVLAQKFQLQL

SEQ ID NO: 12122 - protein, 57 aa, Artificial Sequence
  Synthetic polypeptide
QGRINHHSWWGECAPCAHRGGREDGAAHHQQRHAHWGPEEVPVHAAHLEVHSGPRHL

SEQ ID NO: 12123 - protein, 57 aa, Artificial Sequence; identical to SEQ ID NO: 12122
  Synthetic polypeptide

SEQ ID NO: 12124 - protein, 57 aa, Artificial Sequence; identical to SEQ ID NO: 12122
  Synthetic polypeptide

SEQ ID NO: 12125 - protein, 160 aa, Artificial Sequence
  Synthetic polypeptide
SRAELIITAGGENVPPVPIEEAVKMELPIISNAMLIGDQRKFLSMLLTLKCTLDPDTSDQTDNLTEQAMEFCQRVGSRATTVSEIIEKKDEAVYQAIEEGIRRVNMNAAARPYHIQKWAILERDFSISGGELGPTMKLKRLTVLEKYKGIIDSFYQEQKM

SEQ ID NO: 12126 - protein, 160 aa, Artificial Sequence; identical to SEQ ID NO: 12125
  Synthetic polypeptide

SEQ ID NO: 12127 - protein, 160 aa, Artificial Sequence; identical to SEQ ID NO: 12125
  Synthetic polypeptide

SEQ ID NO: 12128 - protein, 4 aa, Artificial Sequence
  Synthetic polypeptide
AGQN

SEQ ID NO: 12129 - protein, 4 aa, Artificial Sequence
  Synthetic polypeptide
AGQN

SEQ ID NO: 12130 - protein, 4 aa, Artificial Sequence
  Synthetic polypeptide
AGQN

SEQ ID NO: 12131 - protein, 233 aa, Artificial Sequence
  Synthetic polypeptide
RPAGQHGETPSTKNTKISQRFHHPKLSSLHRENFIWNLKNVPLLEKYLYALGQNRNREIVEHVIHLFKEEVMTKLSHFRECINHGDLNDHNILIESSKSASGNAEYQVSGILDFGDMSYGYYVFEVAITIMYMMIESKSPIQVGGHVLAGFESITPLTAVEKGALFLLVCSRFCQSLVMAAYSCQLYPENKDYLMVTAKTGWKHLQQMFDMGQKAVEEIWFETAKSYESGISM

SEQ ID NO: 12132 - protein, 233 aa, Artificial Sequence; identical to SEQ ID NO: 12131
  Synthetic polypeptide

SEQ ID NO: 12133 - protein, 43 aa, Artificial Sequence
  Synthetic polypeptide
SQHFGRPRQVDHLKSGVRDQLANMVKPHLLKIQKLARDSITQS

SEQ ID NO: 12134 - protein, 43 aa, Artificial Sequence; identical to SEQ ID NO: 12133
  Synthetic polypeptide

SEQ ID NO: 12135 - protein, 43 aa, Artificial Sequence; identical to SEQ ID NO: 12133
  Synthetic polypeptide

SEQ ID NO: 12136 - protein, 43 aa, Artificial Sequence; identical to SEQ ID NO: 12133
  Synthetic polypeptide

SEQ ID NO: 12137 - protein, 43 aa, Artificial Sequence; identical to SEQ ID NO: 12133
  Synthetic polypeptide

SEQ ID NO: 12138 - protein, 9 aa, Artificial Sequence
  Synthetic polypeptide
PEIPSPKVK

SEQ ID NO: 12139 - protein, 9 aa, Artificial Sequence
  Synthetic polypeptide
PEIPSPKVK

SEQ ID NO: 12140 - protein, 9 aa, Artificial Sequence
  Synthetic polypeptide
PEIPSPKVK

SEQ ID NO: 12141 - protein, 9 aa, Artificial Sequence
  Synthetic polypeptide
PEIPSPKVK

SEQ ID NO: 12142 - protein, 9 aa, Artificial Sequence
  Synthetic polypeptide
PEIPSPKVK

SEQ ID NO: 12143 - protein, 80 aa, Artificial Sequence
  Synthetic polypeptide
RPAGQHGETPSTKNTKISQRFHHPKLSSLHRENFIWNLKNVPLLEKYLYALGQNRNREIVEHVIHLFKEEVMTKLSHFRE

SEQ ID NO: 12144 - protein, 80 aa, Artificial Sequence; identical to SEQ ID NO: 12143
  Synthetic polypeptide

SEQ ID NO: 12145 - protein, 86 aa, Artificial Sequence
  Synthetic polypeptide
RPAGQHGETPSTKNTKISQRFHHPKLSSLHRENFIWNLKNVPLLEKYLYALGQNRNREIVEHVIHLFKEEVMTKLSHFRECEYSPN

SEQ ID NO: 12146 - protein, 4 aa, Artificial Sequence
  Synthetic polypeptide
IAWV

SEQ ID NO: 12147 - protein, 4 aa, Artificial Sequence
  Synthetic polypeptide
IAWV

SEQ ID NO: 12148 - protein, 4 aa, Artificial Sequence
  Synthetic polypeptide
IAWV

SEQ ID NO: 12149 - protein, 4 aa, Artificial Sequence
  Synthetic polypeptide
IAWV

SEQ ID NO: 12150 - protein, 4 aa, Artificial Sequence
  Synthetic polypeptide
IAWV

SEQ ID NO: 12151 - protein, 4 aa, Artificial Sequence
  Synthetic polypeptide
IAWV

SEQ ID NO: 12152 - protein, 4 aa, Artificial Sequence
  Synthetic polypeptide
IAWV

SEQ ID NO: 12153 - protein, 4 aa, Artificial Sequence
  Synthetic polypeptide
IAWV

SEQ ID NO: 12154 - protein, 70 aa, Artificial Sequence
  Synthetic polypeptide
YWKCSQEEEKSLTLQEKVELLGFECRCGNVYCGVHRYSDVHNCSYNYKADAAEKIRKENPVVVGEKIQKI

SEQ ID NO: 12155 - protein, 70 aa, Artificial Sequence; identical to SEQ ID NO: 12154
  Synthetic polypeptide

SEQ ID NO: 12156 - protein, 70 aa, Artificial Sequence; identical to SEQ ID NO: 12154
  Synthetic polypeptide

SEQ ID NO: 12157 - protein, 70 aa, Artificial Sequence; identical to SEQ ID NO: 12154
  Synthetic polypeptide

SEQ ID NO: 12158 - protein, 70 aa, Artificial Sequence; identical to SEQ ID NO: 12154
  Synthetic polypeptide

SEQ ID NO: 12159 - protein, 70 aa, Artificial Sequence; identical to SEQ ID NO: 12154
  Synthetic polypeptide

SEQ ID NO: 12160 - protein, 70 aa, Artificial Sequence; identical to SEQ ID NO: 12154
  Synthetic polypeptide

SEQ ID NO: 12161 - protein, 48 aa, Artificial Sequence
  Synthetic polypeptide
HYKKKLNCLGLNAGVEMFTVVYTVTQMYTIALTITKPMLLRKSEKKIQ

SEQ ID NO: 12162 - protein, 48 aa, Artificial Sequence; identical to SEQ ID NO: 12161
  Synthetic polypeptide

SEQ ID NO: 12163 - protein, 48 aa, Artificial Sequence; identical to SEQ ID NO: 12161
  Synthetic polypeptide

SEQ ID NO: 12164 - protein, 48 aa, Artificial Sequence; identical to SEQ ID NO: 12161
  Synthetic polypeptide

SEQ ID NO: 12165 - protein, 48 aa, Artificial Sequence; identical to SEQ ID NO: 12161
  Synthetic polypeptide

SEQ ID NO: 12166 - protein, 48 aa, Artificial Sequence; identical to SEQ ID NO: 12161
  Synthetic polypeptide

SEQ ID NO: 12167 - protein, 48 aa, Artificial Sequence; identical to SEQ ID NO: 12161
  Synthetic polypeptide

SEQ ID NO: 12168 - protein, 48 aa, Artificial Sequence
  Synthetic polypeptide
YWKCSQEEEKSLTLQEKVELLGFECRCGNVYCGVHRYSDVHNCSYNYK

SEQ ID NO: 12169 - protein, 36 aa, Artificial Sequence
  Synthetic polypeptide
HYKKKLNCLGLNAGVEMFTVVYTVTQMYTIALTITK

SEQ ID NO: 12170 - protein, 72 aa, Artificial Sequence
  Synthetic polypeptide
PAKTEDRCGHWRPDPGPQHHQAPLYWSCPLQTPGCLQSAYTQQLHGPGSGCLEGGESVLAELAVCEPSQAQR

SEQ ID NO: 12171 - protein, 72 aa, Artificial Sequence; identical to SEQ ID NO: 12170
  Synthetic polypeptide

SEQ ID NO: 12172 - protein, 72 aa, Artificial Sequence; identical to SEQ ID NO: 12170
  Synthetic polypeptide

SEQ ID NO: 12173 - protein, 72 aa, Artificial Sequence; identical to SEQ ID NO: 12170
  Synthetic polypeptide

SEQ ID NO: 12174 - protein, 135 aa, Artificial Sequence
  Synthetic polypeptide
MPRPRIGVAIGDQILDLSIIKHLFTGPVLSKHQDVFNQPTLNSFMGLGQAAWKEARVFLQNLLSVSQARLRDDTELRKCAFISQASATMHLPATIGDYTDFYSSRQHATNVGIMFRDKENALMPNWLHLPVGYHG

SEQ ID NO: 12175 - protein, 393 aa, Artificial Sequence
  Synthetic polypeptide
MPRPRIGVAIGDQILDLSIIKHLFTGPVLSKHQDVFNQPTLNSFMGLGQAAWKEARVFLQNLLSVSQARLRDDTELRKCAFISQASATMHLPATIGDYTDFYSSRQHATNVGIMFRDKENALMPNWLHLPVGYHGRASSVVVSGTPIRRPMGQMKPDDSKPPVYGACKLLDMELEMAFFVGPGNRLGEPIPISKAHEHIFGMVLMNDWSARDIQKWEYVPLGPFLGKSFGTTVSPWVVPMDALMPFAVPNPKQDPRPLPYLCHDEPYTFDINLSVNLKGEGMSQAATICKSNFKYMYWTMLQQLTHHSVNGCNLRPGDLLASGTISGPEPENFGSMLELSWKGTKPIDLGNGQTRKFLLDGDEVIITGYCQGDGYRIGFGQCAGKVLPALLPS

SEQ ID NO: 12176 - protein, 393 aa, Artificial Sequence; identical to SEQ ID NO: 12175
  Synthetic polypeptide

SEQ ID NO: 12177 - protein, 393 aa, Artificial Sequence; identical to SEQ ID NO: 12175
  Synthetic polypeptide

SEQ ID NO: 12178 - protein, 16 aa, Artificial Sequence
  Synthetic polypeptide
QRRRNEPGGYHMQVQF

SEQ ID NO: 12179 - protein, 16 aa, Artificial Sequence
  Synthetic polypeptide
QRRRNEPGGYHMQVQF

SEQ ID NO: 12180 - protein, 16 aa, Artificial Sequence
  Synthetic polypeptide
QRRRNEPGGYHMQVQF

SEQ ID NO: 12181 - protein, 16 aa, Artificial Sequence
  Synthetic polypeptide
QRRRNEPGGYHMQVQF

SEQ ID NO: 12182 - protein, 16 aa, Artificial Sequence
  Synthetic polypeptide
QRRRNEPGGYHMQVQF

SEQ ID NO: 12183 - protein, 116 aa, Artificial Sequence
  Synthetic polypeptide
KGEGMSQAATICKSNFKYMYWTMLQQLTHHSVNGCNLRPGDLLASGTISGPEPENFGSMLELSWKGTKPIDLGNGQTRKFLLDGDEVIITGYCQGDGYRIGFGQCAGKVLPALLPS

SEQ ID NO: 12184 - protein, 116 aa, Artificial Sequence; identical to SEQ ID NO: 12183
  Synthetic polypeptide

SEQ ID NO: 12185 - protein, 116 aa, Artificial Sequence; identical to SEQ ID NO: 12183
  Synthetic polypeptide

SEQ ID NO: 12186 - protein, 116 aa, Artificial Sequence; identical to SEQ ID NO: 12183
  Synthetic polypeptide

SEQ ID NO: 12187 - protein, 4 aa, Artificial Sequence
  Synthetic polypeptide
KEKE

SEQ ID NO: 12188 - protein, 4 aa, Artificial Sequence
  Synthetic polypeptide
KEKE

SEQ ID NO: 12189 - protein, 4 aa, Artificial Sequence
  Synthetic polypeptide
KEKE

SEQ ID NO: 12190 - protein, 4 aa, Artificial Sequence
  Synthetic polypeptide
KEKE

SEQ ID NO: 12191 - protein, 4 aa, Artificial Sequence
  Synthetic polypeptide
KEKE

SEQ ID NO: 12192 - protein, 57 aa, Artificial Sequence
  Synthetic polypeptide
KGEGMSQAATICKSNFKYMYWTMLQQLTHHSVNGCNLRPGDLLASGTISGPVSIWLH

SEQ ID NO: 12193 - protein, 41 aa, Artificial Sequence
  Synthetic polypeptide
EHGLGSRTVPCSNLSNSTYLLSVSFFRAAHTFLHVVKIHRS

SEQ ID NO: 12194 - protein, 35 aa, Artificial Sequence
  Synthetic polypeptide
SMDLEAGQSPVRISATLLTCSVCHSFALHTPSSTW

SEQ ID NO: 12195 - protein, 59 aa, Artificial Sequence
  Synthetic polypeptide
AWTWKPDSPLFESQQLYLPAQCVILSRCTHLPPRGEDTSLLTDPKGDIDPWKMVALGKC

SEQ ID NO: 12196 - protein, 43 aa, Artificial Sequence
  Synthetic polypeptide
FRHARKRLQSASCKRKAESSQCNKERKRNHMLRLLRSMVLREF

SEQ ID NO: 12197 - protein, 18 aa, Artificial Sequence
  Synthetic polypeptide
DLWYSGSFEIFQDAIEEL

SEQ ID NO: 12198 - protein, 29 aa, Artificial Sequence
  Synthetic polypeptide
GKKKKSYAEVAKIYGTQGVLRFSKMPSRN

SEQ ID NO: 12199 - protein, 41 aa, Artificial Sequence
  Synthetic polypeptide
PGSATYQLSYFGQALGLLRLFPNFKIKSILAEEEPWHSSRS

SEQ ID NO: 12200 - protein, 3 aa, Artificial Sequence
  Synthetic polypeptide
FQN

SEQ ID NO: 12201 - protein, 411 aa, Artificial Sequence
  Synthetic polypeptide
GCFLISKLKAYWQRKSPGIPAGANRKKKVNGSSPDTATSGGYHSPGDSATGIYGEGRASSTTLQDLESQYQELAVALDSSSAIISQLTENINSLVRTSKEEKKHEIHLVQKLGRSLFKLKNQTAEPLAPQPPAGPSKVEQLQDETNHLRKELESVGRQLQAEVENNQMLSLLNRRQEERLREQEERLREQEERLCEQEERLCEQEERLREQEERLCEQEKLPGQERLLEEVEKLLKQERRQEEQERLLERERLLDEVEELLEQERLRQQDERLWQQETLRELERLRELERMLELGWEALYEQRAEPRSGFEELNNENKSTLQLEQQVKELEKSGGAEEPRGSESAAAARPVPGAPVPQGAWMCGQAGWTPQEHPGLSGEAVGTGEAAGGAGEAACHSFRAAENRELNITII

SEQ ID NO: 12202 - protein, 41 aa, Artificial Sequence; identical to SEQ ID NO: 12199
  Synthetic polypeptide

SEQ ID NO: 12203 - protein, 41 aa, Artificial Sequence; identical to SEQ ID NO: 12199
  Synthetic polypeptide

SEQ ID NO: 12204 - protein, 423 aa, Artificial Sequence
  Synthetic polypeptide
GCFLISKLKAYWQRKSPGIPAGANRKKKVNGSSPDTATSGGYHSPGDSATGIYGEGRASSTTLQDLESQYQELAVALDSSSAIISQLTENINSLVRTSKEEKKHEIHLVQKLGRSLFKLKNQTAEPLAPQPPAGPSKVEQLQDETNHLRKELESVGRQLQAEVENNQMLSLLNRRQEERLREQEERLREQEERLCEQEERLCEQEERLREQEERLCEQEKLPGQERLLEEVEKLLKQERRQEEQERLLERERLLDEVEELLEQERLRQQDERLWQQETLRELERLRELERMLELGWEALYEQRAEPRSGFEELNNENKSTLQLEQQVKELEKSATTCPHAQGLPAGGAEEPRGSESAAAARPVPGAPVPQGAWMCGQAGWTPQEHPGLSGEAVGTGEAAGGAGEAACHSFRAAENRELNITII

SEQ ID NO: 12205 - protein, 3 aa, Artificial Sequence
  Synthetic polypeptide
FQN

SEQ ID NO: 12206 - protein, 3 aa, Artificial Sequence
  Synthetic polypeptide
FQN

SEQ ID NO: 12207 - protein, 411 aa, Artificial Sequence; identical to SEQ ID NO: 12201
  Synthetic polypeptide

SEQ ID NO: 12208 - protein, 502 aa, Artificial Sequence
  Synthetic polypeptide
KFSYDFQDSEETVTSRMLFPTSAQESSRGLPDANDLCLGLQSLSLTGWDRPWSTQDSDSSAQSSTHSVLSMLHNPLGNVLGKPPLSFLPLDPLGSDLVDKFPAPSVRGSRLDTRPILDSRSSSPSDSDTSGFSSGSDHLSDLISSLRISPPLPFLSLSGGGPRDPLKMGVGSRMDQEQAALAAVTPSPTSASKRWPGASVWPSWDLLEAPKDPFSIEREARLHRQAAAVNEATCTWSGQLPPRNYKNPIYSCKVFLGGVPWDITEAGLVNTFRVFGSLSVEWPGKDGKHPRCPPKGYVYLVFELEKSVRSLLQACSHDPLSPDGLSEYYFKMSSRRMRCKEVQVIPWVLADSNFVRSPSQRLDPSRTVFVGALHGMLNAEALAAILNDLFGGVVYAGIDTDKHKYPIGSGRVTFNNQRSYLKAVSAAFVEIKTTKFTKKVQIDPYLEDSLCHICSSQPGPFFCRDQVCFKYFCRSCWHWRHSMEGLRHHSPLMRNQKNRDSS

SEQ ID NO: 12209 - protein, 502 aa, Artificial Sequence; identical to SEQ ID NO: 12208
  Synthetic polypeptide

SEQ ID NO: 12210 - protein, 502 aa, Artificial Sequence; identical to SEQ ID NO: 12208
  Synthetic polypeptide

SEQ ID NO: 12211 - protein, 66 aa, Artificial Sequence
  Synthetic polypeptide
NFHIKLVDKAEAEFERIDSNFESSPMTSRTLKKQLQAGCFSQPLRKNLPVASQMQMTCALACSPSV

SEQ ID NO: 12212 - protein, 66 aa, Artificial Sequence; identical to SEQ ID NO: 12211
  Synthetic polypeptide

SEQ ID NO: 12213 - protein, 66 aa, Artificial Sequence; identical to SEQ ID NO: 12211
  Synthetic polypeptide

SEQ ID NO: 12214 - protein, 66 aa, Artificial Sequence; identical to SEQ ID NO: 12211
  Synthetic polypeptide

SEQ ID NO: 12215 - protein, 507 aa, Artificial Sequence
  Synthetic polypeptide
KFSYDFQDSEETVTSRMLFPTSAQESSRGLPDANDLCLGLQSLSLTGWDRPWSTQDSDSSAQSSTHSVLSMLHNPLGNVLGKPPLSFLPLDPLGSDLVDKFPAPSVRGSRLDTRPILDSRSSSPSDSDTSGFSSGSDHLSDLISSLRISPPLPFLSLSGGGPRDPLKMGVGSRMDQEQAALAAVTPSPTSASKRWPGASVWPSWDLLEAPKDPFSIEREARLHRQAAAVNEATCTWSGQLPPRNYKNPIYSCKVFLGGVPWDITEAGLVNTFRVFGSLSVEWPGKDGKHPRCPPKGNMPKGYVYLVFELEKSVRSLLQACSHDPLSPDGLSEYYFKMSSRRMRCKEVQVIPWVLADSNFVRSPSQRLDPSRTVFVGALHGMLNAEALAAILNDLFGGVVYAGIDTDKHKYPIGSGRVTFNNQRSYLKAVSAAFVEIKTTKFTKKVQIDPYLEDSLCHICSSQPGPFFCRDQVCFKYFCRSCWHWRHSMEGLRHHSPLMRNQKNRDSS

SEQ ID NO: 12216 - protein, 48 aa, Artificial Sequence
  Synthetic polypeptide
EVRSPSARQLPHLRSEEPLRPAATPSGKVSHFVTQAGAQRHNLGSLQP

SEQ ID NO: 12217 - protein, 67 aa, Artificial Sequence
  Synthetic polypeptide
EVRSLSARQPPHLGRSLTLSPRLEHSGTTSGHCSLDFPGSNNPPTSASQVAGTTGACHPHPANFRIF

SEQ ID NO: 12218 - protein, 74 aa, Artificial Sequence
  Synthetic polypeptide
GASPPGSHPIWEGLSLCHPGWSTAAQPRVTAALTSLAQTILPPQPPKLLELQVHATHTRLIFVFFEETGSRHVA

SEQ ID NO: 12219 - protein, 56 aa, Artificial Sequence
  Synthetic polypeptide
EVRSPSARQLPHLRSEEPLRPAATPSGKQDLATLPRLASNSWLQVIFPPRPPRVLG

SEQ ID NO: 12220 - protein, 31 aa, Artificial Sequence
  Synthetic polypeptide
EVRSLSARQPPHLGNRILLHCPGWPRTPGFK

SEQ ID NO: 12221 - protein, 57 aa, Artificial Sequence
  Synthetic polypeptide
GASPPGSHPIWETGSCYIAQAGLELLASSDLPASASQSAGITGVSHHTQPALLLISL

SEQ ID NO: 12222 - protein, 90 aa, Artificial Sequence
  Synthetic polypeptide
MPSSTVISWRCSEPHRSSQHWGRHLREGGRQHRCQPDCVPGCAGLYQCCPLLAGRHGGHPRAQLPAHLLLHPAACSLLDGCGVGGLPSGS

SEQ ID NO: 12223 - protein, 90 aa, Artificial Sequence; identical to SEQ ID NO: 12222
  Synthetic polypeptide

SEQ ID NO: 12224 - protein, 90 aa, Artificial Sequence; identical to SEQ ID NO: 12222
  Synthetic polypeptide

SEQ ID NO: 12225 - protein, 90 aa, Artificial Sequence; identical to SEQ ID NO: 12222
  Synthetic polypeptide

SEQ ID NO: 12226 - protein, 140 aa, Artificial Sequence
  Synthetic polypeptide
AGDAQNLIEAASTGAAISVKVVANIAANLIAFLAVLDFINAALSWLGDMVDIQGLSFQLICSYILRPVAFLMGVAWEDCPVVAELLGIKLFLNEFVAYQDLSKYKQRRLAGAEEWVGDRKQWISRRGLAMLTRLVLNSWP

SEQ ID NO: 12227 - protein, 44 aa, Artificial Sequence
  Synthetic polypeptide
KNCDIGIFSQVFKKCKIPTFAKARKLDSLNAQQYSHKLEMLRTS

SEQ ID NO: 12228 - protein, 44 aa, Artificial Sequence; identical to SEQ ID NO: 12227
  Synthetic polypeptide

SEQ ID NO: 12229 - protein, 44 aa, Artificial Sequence; identical to SEQ ID NO: 12227
  Synthetic polypeptide

SEQ ID NO: 12230 - protein, 44 aa, Artificial Sequence; identical to SEQ ID NO: 12227
  Synthetic polypeptide

SEQ ID NO: 12231 - protein, 233 aa, Artificial Sequence
  Synthetic polypeptide
AGDAQNLIEAASTGAAISVKVVANIAANLIAFLAVLDFINAALSWLGDMVDIQGLSFQLICSYILRPVAFLMGVAWEDCPVVAELLGIKLFLNEFVAYQDLSKYKQRRLAGAEEWVGDRKQWISVRAEVLTTFALCGFANFSSIGIMLGGLTSMVPQRKSDFSQIVLRALFTGACVSLVNACMAGILYMPRGAEVDCMSLLNTTLSSSSFEIYQCCREAFQRIFKSTPAESQP

SEQ ID NO: 12232 - protein, 246 aa, Artificial Sequence
  Synthetic polypeptide
AGDAQNLIEAASTGAAISVKVVANIAANLIAFLAVLDFINAALSWLGDMVDIQGLSFQLICSYILRPVAFLMGVAWEDCPVVAELLGIKLFLNEFVAYQDLSKYKQRRLAGAEEWVGDRKQWISVRAEVLTTFALCGFANFSSIGIMLGGLTSMVPQRKSDFSQIVLRALFTGACVSLVNACMAGILYMPRGAEVDCMSLLNTTLSSSSFEIYQCCREAFQSVNPEFSPEALDNCCRFYNHTICAQ

SEQ ID NO: 12233 - protein, 246 aa, Artificial Sequence; identical to SEQ ID NO: 12232
  Synthetic polypeptide

SEQ ID NO: 12234 - protein, 185 aa, Artificial Sequence
  Synthetic polypeptide
GRARWLTPVIPALWEAEAGGSPEVRSSRPAWATWRNPVSTKIQKLARDAQNLIEAASTGAAISVKVVANIAANLIAFLAVLDFINAALSWLGDMVDIQGLSFQLICSYILRPVAFLMGVAWEDCPVVAELLGIKLFLNEFVAYQDLSKYKQRRLAGAEEWVGDRKQWISRRGLAMLTRLVLNSWP

SEQ ID NO: 12235 - protein, 7 aa, Artificial Sequence
  Synthetic polypeptide
PEMLRTS

SEQ ID NO: 12236 - protein, 7 aa, Artificial Sequence
  Synthetic polypeptide
PEMLRTS

SEQ ID NO: 12237 - protein, 7 aa, Artificial Sequence
  Synthetic polypeptide
PEMLRTS

SEQ ID NO: 12238 - protein, 7 aa, Artificial Sequence
  Synthetic polypeptide
PEMLRTS

SEQ ID NO: 12239 - protein, 105 aa, Artificial Sequence
  Synthetic polypeptide
GQEFKTSLGNMEKPCLYKNTKISQRCSEPHRSSQHWGRHLREGGRQHRCQPDCVPGCAGLYQCCPLLAGRHGGHPRAQLPAHLLLHPAACSLLDGCGVGGLPSGS

SEQ ID NO: 12240 - protein, 105 aa, Artificial Sequence; identical to SEQ ID NO: 12239
  Synthetic polypeptide

SEQ ID NO: 12241 - protein, 105 aa, Artificial Sequence; identical to SEQ ID NO: 12239
  Synthetic polypeptide

SEQ ID NO: 12242 - protein, 105 aa, Artificial Sequence; identical to SEQ ID NO: 12239
  Synthetic polypeptide

SEQ ID NO: 12243 - protein, 278 aa, Artificial Sequence
  Synthetic polypeptide
GRARWLTPVIPALWEAEAGGSPEVRSSRPAWATWRNPVSTKIQKLARDAQNLIEAASTGAAISVKVVANIAANLIAFLAVLDFINAALSWLGDMVDIQGLSFQLICSYILRPVAFLMGVAWEDCPVVAELLGIKLFLNEFVAYQDLSKYKQRRLAGAEEWVGDRKQWISVRAEVLTTFALCGFANFSSIGIMLGGLTSMVPQRKSDFSQIVLRALFTGACVSLVNACMAGILYMPRGAEVDCMSLLNTTLSSSSFEIYQCCREAFQRIFKSTPAESQP

SEQ ID NO: 12244 - protein, 291 aa, Artificial Sequence
  Synthetic polypeptide
GRARWLTPVIPALWEAEAGGSPEVRSSRPAWATWRNPVSTKIQKLARDAQNLIEAASTGAAISVKVVANIAANLIAFLAVLDFINAALSWLGDMVDIQGLSFQLICSYILRPVAFLMGVAWEDCPVVAELLGIKLFLNEFVAYQDLSKYKQRRLAGAEEWVGDRKQWISVRAEVLTTFALCGFANFSSIGIMLGGLTSMVPQRKSDFSQIVLRALFTGACVSLVNACMAGILYMPRGAEVDCMSLLNTTLSSSSFEIYQCCREAFQSVNPEFSPEALDNCCRFYNHTICAQ

SEQ ID NO: 12245 - protein, 291 aa, Artificial Sequence; identical to SEQ ID NO: 12244
  Synthetic polypeptide

SEQ ID NO: 12246 - protein, 42 aa, Artificial Sequence
  Synthetic polypeptide
GPGMVISNTLSRLHVGIWSHGELHQEDISPDPAGRRGLQPGW

SEQ ID NO: 12247 - protein, 42 aa, Artificial Sequence; identical to SEQ ID NO: 12246
  Synthetic polypeptide

SEQ ID NO: 12248 - protein, 42 aa, Artificial Sequence; identical to SEQ ID NO: 12246
  Synthetic polypeptide

SEQ ID NO: 12249 - protein, 275 aa, Artificial Sequence
  Synthetic polypeptide
IDSWAWSPSYRISFSGVEAQEWSFLTPSPGCTWEFGAMVNYIKKTYPLTQLVVVGFSLGGNIVCKYLGETQANQEKVLCCVSVCQGYSALRAQETFMQWDQCRRFYNFLMADNMKKIILSHRQALFGDHVKKPQSLEDTDLSRLYTATSLMQIDDNVMRKFHGYNSLKEYYEEESCMRYLHRIYVPLMLVNAADDPLVHESLLTIPKSLSEKRENVMFVLPLHGGHLGFFEGSVLFPEPLTWMDKLVVEYANAICQWERNKLQCSDTEQVEADLE

SEQ ID NO: 12250 - protein, 275 aa, Artificial Sequence; identical to SEQ ID NO: 12249
  Synthetic polypeptide

SEQ ID NO: 12251 - protein, 275 aa, Artificial Sequence; identical to SEQ ID NO: 12249
  Synthetic polypeptide

SEQ ID NO: 12252 - protein, 13 aa, Artificial Sequence
  Synthetic polypeptide
HPLQAARGNLEPW

SEQ ID NO: 12253 - protein, 13 aa, Artificial Sequence
  Synthetic polypeptide
HPLQAARGNLEPW

SEQ ID NO: 12254 - protein, 13 aa, Artificial Sequence
  Synthetic polypeptide
HPLQAARGNLEPW

SEQ ID NO: 12255 - protein, 24 aa, Artificial Sequence
  Synthetic polypeptide
PGAVAHACNPSTLGGRVRCWRRSP

SEQ ID NO: 12256 - protein, 24 aa, Artificial Sequence
  Synthetic polypeptide
PGAVAHACNPSTLGGRVRCWRRSP

SEQ ID NO: 12257 - protein, 24 aa, Artificial Sequence
  Synthetic polypeptide
PGAVAHACNPSTLGGRVRCWRRSP

SEQ ID NO: 12258 - protein, 24 aa, Artificial Sequence
  Synthetic polypeptide
PGAVAHACNPSTLGGRVRCWRRSP

SEQ ID NO: 12259 - protein, 24 aa, Artificial Sequence
  Synthetic polypeptide
PGAVAHACNPSTLGGRVRCWRRSP

SEQ ID NO: 12260 - protein, 24 aa, Artificial Sequence
  Synthetic polypeptide
PGAVAHACNPSTLGGRVRCWRRSP

SEQ ID NO: 12261 - protein, 624 aa, Artificial Sequence
  Synthetic polypeptide
SQHFGRPSEVLAEESIVCLQKALNHLREIWELIGIPEDQRLQRTEVVKKHIKELLDMMIAEEESLKERLIKSISVCQKELNTLCSELHVEPFQEEGETTILQLEKDLRTQVELMRKQKKERKQELKLLQEQDQELCEILCMPHYDIDSASVPSLEELNQFRQHVTTLRETKASRREEFVSIKRQIILCMEALDHTPDTSFERDVVCEDEDAFCLSLENIATLQKLLRQLEMQKSQNEAVCEGLRTQIRELWDRLQIPEEEREAVATIMSGSKAKVRKALQLEVDRLEELKMQNMKKVIEAIRVELVQYWDQCFYSQEQRQAFAPFCAEDYTESLLQLHDAEIVRLKNYYEVHKELFEGVQKWEETWRLFLEFERKASDPNRFTNRGGNLLKEEKQRAKLQKMLPKLEEELKARIELWEQEHSKAFMVNGQKFMEYVAEQWEMHRLEKERAKQERQLKNKKQTETEMLYGSAPRTPSKRRGLAPNTPGKARKLNTTTMSNATANSSIRPIFGGTVYHSPVSRLPPSGSKPVAASTCSGKKTPRTGRHGANKENLELNGSILSGGYPGSAPLQRNFSINSVASTYSEFAKDPSLSDSSTVGLQRELSKASKSDATSGILNSTNIQS

SEQ ID NO: 12262 - protein, 570 aa, Artificial Sequence
  Synthetic polypeptide
SQHFGRPSEVLAEESIVCLQKALNHLREIWELIGIPEDQRLQRTEVVKKHIKELLDMMIAEEESLKERLIKSISVCQKELNTLCSELHVEPFQEEGETTILQLEKDLRTQVELMRKQKKERKQELKLLQEQDQELCEILCMPHYDIDSASVPSLEELNQFRQHVTTLRETKASRREEFVSIKRQIILCMEALDHTPDTSFERDVVCEDEDAFCLSLENIATLQKLLRQLEMQKSQNEAVCEGLRTQIRELWDRLQIPEEEREAVATIMSGSKAKVRKALQLEVDRLEELKMQNMKKVIEAIRVELVQYWDQCFYSQEQRQAFAPFCAEDYTESLLQLHDAEIVRLKNYYEVHKELFEGVQKWEETWRLFLEFERKASDPNRFTNRGGNLLKEEKQRAKLQKMLPKLEEELKARIELWEQEHSKAFMVNGQKFMEYVAEQWEMHRLEKERAKQERQLKNKKQTETEMLYGSAPRTPSKRRGLAPNTPGKARKLNTTTMSNATANSSIRPIFGGTVYHSPVSRLPPSGSKPVAASTCSGKKTPRTGRHGANKENLELNGSILSARTFKGFQI

SEQ ID NO: 12263 - protein, 610 aa, Artificial Sequence
  Synthetic polypeptide
SQHFGRPSEVLAEESIVCLQKALNHLREIWELIGIPEDQRLQRTEVVKKHIKELLDMMIAEEESLKERLIKSISVCQKELNTLCSELHVEPFQEEGETTILQLEKDLRTQVELMRKQKKERKQELKLLQEQDQELCEILCMPHYDIDSASVPSLEELNQFRQHVTTLRETKASRREEFVSIKRQIILCMEALDHTPDTSFERDVVCEDEDAFCLSLENIATLQKLLRQLEMQKSQNEAVCEGLRTQIRELWDRLQIPEEEREAVATIMSGSKAKVRKALQLEVDRLEELKMQNMKKVIEAIRVELVQYWDQCFYSQEQRQAFAPFCAEDYTESLLQLHDAEIVRLKNYYEVHKELFEGVQKWEETWRLFLEFERKASDPNRFTNRGGNLLKEEKQRAKLQKMLPKLEEELKARIELWEQEHSKAFMVNGQKFMEYVAEQWEMHRLEKERAKQERQLKNKKQTETEMLYGSAPRTPSKRRGLAPNTPGKARKLNTTTMSNATANSSIRPIFGGTVYHSPVSRLPPSGSKPVAASTCSGKKTPRTGRHGANKENLELNGSILSGGYPGSAPLQRNFSINSVASTYSEFARELSKASKSDATSGILNSTNIQS

SEQ ID NO: 12264 - protein, 529 aa, Artificial Sequence
  Synthetic polypeptide
SQHFGRPSEVLAEESIVCLQKALNHLREIWELIGIPEDQRLQRTEVVKKHIKEEGETTILQLEKDLRTQVELMRKQKKERKQELKLLQEQDQELCEILCMPHYDIDSASVPSLEELNQFRQHVTTLRETKASRREEFVSIKRQIILCMEALDHTPDTSFERDVVCEDEDAFCLSLENIATLQKLLRQLEMQKSQNEAVCEGLRTQIRELWDRLQIPEEEREAVATIMSGSKAKVRKALQLEVDRLEELKMQNMKKVIEAIRVELVQYWDQCFYSQEQRQAFAPFCAEDYTESLLQLHDAEIVRLKNYYEVHKELFEGVQKWEETWRLFLEFERKASDPNRFTNRGGNLLKEEKQRAKLQKMLPKLEEELKARIELWEQEHSKAFMVNGQKFMEYVAEQWEMHRLEKERAKQERQLKNKKQTETEMLYGSAPRTPSKRRGLAPNTPGKARKLNTTTMSNATANSSIRPIFGGTVYHSPVSRLPPSGSKPVAASTCSGKKTPRTGRHGANKENLELNGSILSARTFKGFQI

SEQ ID NO: 12265 - protein, 158 aa, Artificial Sequence
  Synthetic polypeptide
SQHFGRPSEVLAEESIVCLQKALNHLREIWELIGIPEDQRLQRTEVVKKHIKEEGETTILQLEKDLRTQVELMRKQKKERKQELKLLQEQDQELCEILCMPHYDIDSASVPSLEELNQFRQHVTTLRETKASRREEFVSIKRQIILCMEALDHTPDTS

SEQ ID NO: 12266 - protein, 114 aa, Artificial Sequence
  Synthetic polypeptide
SQHFGRPSEVLAEESIVCLQKALNHLREIWELIGIPEDQRLQRTEVVKKHIKELLDMMIAEEESLKERLIKSISVCQKELNTLCSELHVEPFQEFTWNLITVVRCLIQEEGETT

SEQ ID NO: 12267 - protein, 27 aa, Artificial Sequence
  Synthetic polypeptide
KDQQDGPHQMWLLDLGLLSSHDGRERG

SEQ ID NO: 12268 - protein, 47 aa, Artificial Sequence
  Synthetic polypeptide
CPVLPDDSAESLCKKISKMVRTRCGSLTLDFLVPMMVGKEVKEDTQV

SEQ ID NO: 12269 - protein, 15 aa, Artificial Sequence
  Synthetic polypeptide
PVPWWTLDDTSRERG

SEQ ID NO: 12270 - protein, 21 aa, Artificial Sequence
  Synthetic polypeptide
QCPGGLSMILVGKEVKEDTQV

SEQ ID NO: 12271 - protein, 24 aa, Artificial Sequence
  Synthetic polypeptide
LPFPAAHHHLQELPGVCGPEGVPG

SEQ ID NO: 12272 - protein, 24 aa, Artificial Sequence
  Synthetic polypeptide
LPFPAAHHHLQELPGVCGPEGVPG

SEQ ID NO: 12273 - protein, 24 aa, Artificial Sequence
  Synthetic polypeptide
LPFPAAHHHLQELPGVCGPEGVPG

SEQ ID NO: 12274 - protein, 24 aa, Artificial Sequence
  Synthetic polypeptide
LPFPAAHHHLQELPGVCGPEGVPG

SEQ ID NO: 12275 - protein, 24 aa, Artificial Sequence
  Synthetic polypeptide
LPFPAAHHHLQELPGVCGPEGVPG

SEQ ID NO: 12276 - protein, 24 aa, Artificial Sequence
  Synthetic polypeptide
LPFPAAHHHLQELPGVCGPEGVPG

SEQ ID NO: 12277 - protein, 24 aa, Artificial Sequence
  Synthetic polypeptide
LPFPAAHHHLQELPGVCGPEGVPG

SEQ ID NO: 12278 - protein, 24 aa, Artificial Sequence
  Synthetic polypeptide
LPFPAAHHHLQELPGVCGPEGVPG

SEQ ID NO: 12279 - protein, 240 aa, Artificial Sequence
  Synthetic polypeptide
FLSPLLTIIFKNFQECVDQKVYQAEMDELPAAFVDGSKNGGDKHGANSLKITEKVSGQHVEIQAKYIGTTIVVRQVGRYLTFAVRMPEEVVNAVEDWDSQGLYLCLRGCPLNQQIDFQAFHTNAEGTGARRLAAASPAPTAPETFPYETAVAKCKEKLPVEDLYYQACVFDLLTTGDVNFTLAAYYALEDVKMLHSNKDKLHLYDRTRDLPGRAAAGLPLAPRPLLGALVPLLALLPVFC

SEQ ID NO: 12280 - protein, 240 aa, Artificial Sequence; identical to SEQ ID NO: 12279
  Synthetic polypeptide

SEQ ID NO: 12281 - protein, 240 aa, Artificial Sequence; identical to SEQ ID NO: 12279
  Synthetic polypeptide

SEQ ID NO: 12282 - protein, 240 aa, Artificial Sequence; identical to SEQ ID NO: 12279
  Synthetic polypeptide

SEQ ID NO: 12283 - protein, 240 aa, Artificial Sequence; identical to SEQ ID NO: 12279
  Synthetic polypeptide

SEQ ID NO: 12284 - protein, 240 aa, Artificial Sequence; identical to SEQ ID NO: 12279
  Synthetic polypeptide

SEQ ID NO: 12285 - protein, 240 aa, Artificial Sequence; identical to SEQ ID NO: 12279
  Synthetic polypeptide

SEQ ID NO: 12286 - protein, 48 aa, Artificial Sequence
  Synthetic polypeptide
SFPRCSPSSSRTSRSVWTRRCTRLRWTSSRPPSWMALRTVGTSTGPTA

SEQ ID NO: 12287 - protein, 48 aa, Artificial Sequence; identical to SEQ ID NO: 12286
  Synthetic polypeptide

SEQ ID NO: 12288 - protein, 48 aa, Artificial Sequence; identical to SEQ ID NO: 12286
  Synthetic polypeptide

SEQ ID NO: 12289 - protein, 48 aa, Artificial Sequence; identical to SEQ ID NO: 12286
  Synthetic polypeptide

SEQ ID NO: 12290 - protein, 48 aa, Artificial Sequence; identical to SEQ ID NO: 12286
  Synthetic polypeptide

SEQ ID NO: 12291 - protein, 48 aa, Artificial Sequence; identical to SEQ ID NO: 12286
  Synthetic polypeptide

SEQ ID NO: 12292 - protein, 48 aa, Artificial Sequence; identical to SEQ ID NO: 12286
  Synthetic polypeptide

SEQ ID NO: 12293 - protein, 24 aa, Artificial Sequence
  Synthetic polypeptide
FLSPLLTIIFKNFQECVDQKVYQA

SEQ ID NO: 12294 - protein, 24 aa, Artificial Sequence
  Synthetic polypeptide
SFPRCSPSSSRTSRSVWTRRCTRL

SEQ ID NO: 12295 - protein, 315 aa, Artificial Sequence
  Synthetic polypeptide
FFIMPENLAQKLPNLVELYLHSNNIVVVPEAIGSLVKLQCLDLSDNALEIVCPEIGRLRALRHLRLANNQLQFLPPEVGDLKELQTLDISTNRLLTLPERLHMCLSLQYLTVDRNRLWYVPRHLCQLPSLNELSMAGNRLAFLPLDLGRSRELQYVYVDNNIHLKGLPSYLYNKVIGCSGCGAPIQVSEVKLLSFSSGQRTVFLPAEVKAIGTEHDHVLPLQELAMRGLYHTYHSLLKDLNFLSPISLPRSLLELLHCPLGHCHRCSEPMFTIVYPKLFPLRETPMAGLHQWKTTVSFVAYCCSTQCLQTFDLLS

SEQ ID NO: 12296 - protein, 35 aa, Artificial Sequence
  Synthetic polypeptide
LQENKLRVPTDSSLCQKTLLRSFQTLWNYTCTQIT

SEQ ID NO: 12297 - protein, 35 aa, Artificial Sequence; identical to SEQ ID NO: 12296
  Synthetic polypeptide

SEQ ID NO: 12298 - protein, 35 aa, Artificial Sequence; identical to SEQ ID NO: 12296
  Synthetic polypeptide

SEQ ID NO: 12299 - protein, 35 aa, Artificial Sequence; identical to SEQ ID NO: 12296
  Synthetic polypeptide

SEQ ID NO: 12300 - protein, 35 aa, Artificial Sequence; identical to SEQ ID NO: 12296
  Synthetic polypeptide

SEQ ID NO: 12301 - protein, 35 aa, Artificial Sequence; identical to SEQ ID NO: 12296
  Synthetic polypeptide

SEQ ID NO: 12302 - protein, 48 aa, Artificial Sequence
  Synthetic polypeptide
RSVTVSRHPQMGPSSCRKTSSGFPLILHYARKPCSEASKPCGTIPALK

SEQ ID NO: 12303 - protein, 48 aa, Artificial Sequence; identical to SEQ ID NO: 12302
  Synthetic polypeptide

SEQ ID NO: 12304 - protein, 48 aa, Artificial Sequence; identical to SEQ ID NO: 12302
  Synthetic polypeptide

SEQ ID NO: 12305 - protein, 48 aa, Artificial Sequence; identical to SEQ ID NO: 12302
  Synthetic polypeptide

SEQ ID NO: 12306 - protein, 48 aa, Artificial Sequence; identical to SEQ ID NO: 12302
  Synthetic polypeptide

SEQ ID NO: 12307 - protein, 48 aa, Artificial Sequence; identical to SEQ ID NO: 12302
  Synthetic polypeptide

SEQ ID NO: 12308 - protein, 22 aa, Artificial Sequence
  Synthetic polypeptide
FFIMPENLAQKLPNLVELWNLN

SEQ ID NO: 12309 - protein, 31 aa, Artificial Sequence
  Synthetic polypeptide
LQENKLRVPTDSSLCQKTLLRSFQTLWNCGT

SEQ ID NO: 12310 - protein, 48 aa, Artificial Sequence
  Synthetic polypeptide
RSVTVSRHPQMGPSSCRKTSSGFPLILHYARKPCSEASKPCGTVELEL

SEQ ID NO: 12311 - protein, 246 aa, Artificial Sequence
  Synthetic polypeptide
FFIMPENLAQKLPNLVELYLHSNNIVVVPEAIGSLVKLQCLDLSDNALEIVCPEIGRLRALRHLRLANNQLQFLPPDLGRSRELQYVYVDNNIHLKGLPSYLYNKVIGCSGCGAPIQVSEVKLLSFSSGQRTVFLPAEVKAIGTEHDHVLPLQELAMRGLYHTYHSLLKDLNFLSPISLPRSLLELLHCPLGHCHRCSEPMFTIVYPKLFPLRETPMAGLHQWKTTVSFVAYCCSTQCLQTFDLLS

SEQ ID NO: 12312 - protein, 99 aa, Artificial Sequence
  Synthetic polypeptide
FFIMPENLAQKLPNLVELYLHSNNIVVVPEAIGSLVKLQCLDLSDNALEIVCPEIGRLRALRHLRLANNQLQFLPPVPHCGPKSSMVCAAPSLPAAQPQ

SEQ ID NO: 12313 - protein, 260 aa, Artificial Sequence
  Synthetic polypeptide
FFIMPENLAQKLPNLVELYLHSNNIVVVPEAIGSLVKLQCLDLSDNALEIVCPEIGRLRALRHLRLANNQLQFLPPEVGDLKELQTLDISTNRLLTLPERLHMCLSLQYLTVDRNRLWYVPRHLCQLPSLNELSMAGNRLAFLPLDLGRSRELQYVYVDNNIHLKGLPSYLYNKVIGCSGCGAPIQVSEVKLLSFSSGQRTVFLPAEVKAIGTEHDHVLPLQELAMRGLYHTYHSLLKGRQLLVLWLTAAPPSVCRLLTC

SEQ ID NO: 12314 - protein, 293 aa, Artificial Sequence
  Synthetic polypeptide
FFIMPENLAQKLPNLVELYLHSNNIVVVPEAIGSLVKLQCLDLSDNALEIVCPEIGRLRALRHLRLANNQLQFLPPEVGDLKELQTLDISTNRLLTLPERLHMCLSLQYLTVDRNRLWYVPRHLCQLPSLNELSMAGNRLAFLPLDLGRSRELQYVYVDNNIHLKGLPSYLYNKVIGCSGCGAPIQVSEVKLLSFSSGQRTVFLPAEVKAIGTEHDHVLPLQELAMRGLYHTYHSLLKDLNFLSPISLPRSLLELLHCPLGHCHRCSEPMFTIVYPKLFPLRETPMAGLHQWK

SEQ ID NO: 12315 - protein, 41 aa, Artificial Sequence
  Synthetic polypeptide
FFIMPENLAQKLPNLVELKTTVSFVAYCCSTQCLQTFDLLS

SEQ ID NO: 12316 - protein, 28 aa, Artificial Sequence
  Synthetic polypeptide
LQENKLRVPTDSSLCQKTLLRSFQTLWN

SEQ ID NO: 12317 - protein, 47 aa, Artificial Sequence
  Synthetic polypeptide
RSVTVSRHPQMGPSSCRKTSSGFPLILHYARKPCSEASKPCGTEDNC

SEQ ID NO: 12318 - protein, 118 aa, Artificial Sequence
  Synthetic polypeptide
FFIMPENLAQKLPNLVELYLHSNNIVVVPEAIGSLVKLQCLDLSDNALEIVCPEIGRLRALRHLRLANNQLQFLPPEVGDLKELQTLDISTNRLLTLPERLHMCLSLQYLTVDRNRLW

SEQ ID NO: 12319 - protein, 114 aa, Artificial Sequence
  Synthetic polypeptide
RPPTAAPSPPAPASASVRSFSRPFLVCSRSVGSTFQYTQKAPPFPTALGSCSHARALLCVHSGGHGDFLKAEARRSVLCAETFGSSPAHADEKPEFSQGLPGNKSEVPKTERSG

SEQ ID NO: 12320 - protein, 172 aa, Artificial Sequence
  Synthetic polypeptide
VLRLLLHRRQPRRLPLSALSRAPFWSAADLWALLSNTLRKPHRFPPPWVPAPTLAPFSAFTAAATVISLKLRHAGPCCAQKPSALLQLTQTKSRSSPRAYQVTNRKYPKLKEVDDVLGGAAAWENVDSTAESCPKCEHPRAYFMQLQTRSADEPMTTFYKCCNAQCGHRWRD

SEQ ID NO: 12321 - protein, 30 aa, Artificial Sequence
  Synthetic polypeptide
GTQVRAVRRNLRLFSSSRRRKAGVLPGPTR

SEQ ID NO: 12322 - protein, 76 aa, Artificial Sequence
  Synthetic polypeptide
LMLVIPALWEAKASGSTEAGERGVHHRRHPADPQAAAAGDTGHAAAAGHDQVPAGARARHQGQHPLHRQGEVHGHA

SEQ ID NO: 12323 - protein, 85 aa, Artificial Sequence
  Synthetic polypeptide
SRHFGRPRQVDQLRLVNEVFTIDDTLQTLKLRLRETQDTLQLLVMTKCRLEHELAIKANTLCIDKEKCMGMRKTFPCTPRLVGHT

SEQ ID NO: 12324 - protein, 22 aa, Artificial Sequence
  Synthetic polypeptide
ESQNLYLVCACYELGNLGRSDI

SEQ ID NO: 12325 - protein, 22 aa, Artificial Sequence
  Synthetic polypeptide
ESQNLYLVCACYELGNLGRSDI

SEQ ID NO: 12326 - protein, 22 aa, Artificial Sequence
  Synthetic polypeptide
ESQNLYLVCACYELGNLGRSDI

SEQ ID NO: 12327 - protein, 22 aa, Artificial Sequence
  Synthetic polypeptide
ESQNLYLVCACYELGNLGRSDI

SEQ ID NO: 12328 - protein, 22 aa, Artificial Sequence
  Synthetic polypeptide
ESQNLYLVCACYELGNLGRSDI

SEQ ID NO: 12329 - protein, 407 aa, Artificial Sequence
  Synthetic polypeptide
PRKERYIVISKVDEEERKRREQQKHAKEQEELNDAVGFSRVIHAIANSGKLVIGHNMLLDVMHTVHQFYCPLPADLSEFKEMTTCVFPRLLDTKLMASTQPFKDIINNTSLAELEKRLKETPFNPPKVESAEGFPSYDTASEQLHEAGYDAYITGLCFISMANYLGSFLSPPKIHVSARSKLIEPFFNKLFLMRVMDIPYLNLEGPDLQPKRDHVLHVTFPKEWKTSDLYQLFSAFGNIQISWIDDTSAFVSLSQPEQVKIAVNTSKYAESYRIQTYAEYMGRKQEEKQIKRKWTEDSWKEADSKRLNPQCIPYTLQNHYYRNNSFTAPSTVGKRNLSPSQEEAGLEDGVSGEISDTELEQTDSCAEPLSEGRKKAKKLKRMKKELSPAGSISKNSPATLFEVPDTW

SEQ ID NO: 12330 - protein, 407 aa, Artificial Sequence; identical to SEQ ID NO: 12329
  Synthetic polypeptide

SEQ ID NO: 12331 - protein, 407 aa, Artificial Sequence; identical to SEQ ID NO: 12329
  Synthetic polypeptide

SEQ ID NO: 12332 - protein, 407 aa, Artificial Sequence; identical to SEQ ID NO: 12329
  Synthetic polypeptide

SEQ ID NO: 12333 - protein, 7 aa, Artificial Sequence
  Synthetic polypeptide
PRKERYI

SEQ ID NO: 12334 - protein, 1056 aa, Artificial Sequence
  Synthetic polypeptide
LGTQFAFFKVLPGDYEILATHPTWALKEASTTVRVTNSNANAASPLIVAGYNVSGSVRSDGEPMKGVKFLLFSSLVTKEDVLGCNVSPVPGFQPQDESLVYLCYTVSREDGSFSFYSLPSGGYTVIPFYRGERITFDVAPSRLDFTVEHDSLKIEPVFHVMGFSVTGRVLNGPEGDGVPEAVVTLNNQIKVKTKADGSFRLENITTGTYTIHAQKEHLYFETVTIKIAPNTPQLADIIATGFSVCGQISIIRFPDTVKQMNKYKVVLSSQDKDKSLVTVETDAHGSFCFKAKPGTYKVQVMVPEAETRAGLTLKPQTFPLTVTNRPMMDVAFVQFLASVSGKVSCLDTCGDLLVTLQSLSRQGEKRSLQLSGKVNAMTFTFDNVLPGKYKISIMHEDWCWKNKSLEVEVLEDDMSAVEFRQTGYMLRCSLSHAITLEFYQDGNGRENVGIYNLSKGVNRFCLSKPGVYKVTPRSCHRFEQAFYTYDTSSPSILTLTAIRHHVLGTITTDKMMDVTVTIKSSIDSEPALVLGPLKSVQELRREQQLAEIEARRQEREKNGNEEGEERMTKPPVQEMVDELQGPFSYDFSYWARSGEKITVTPSSKELLFYPPSMEAVVSGESCPGKLIEIHGKAGLFLEGQIHPELEGVEIVISEKGASSPLITVFTDDKGAYSVGPLHSDLEYTVTSQKEGYVLTAVEGTIGDFKAYALAGVSFEIKAEDDQPLPGVLLSLSGGLFRSNLLTQDNGILTFSNLSPGQYYFKPMMKEFRFEPSSQMIEVQEGQNLKITITGYRTAYSCYGTVSSLNGEPEQGVAMEAVGQNDCSIYGEDTVTDEEGKFRLRGLLPGCVYHVQLKAEGNDHIERALPHHRVIEVGNNDIDDVNIIVFRQINQFDLSGNVITSSEYLPTLWVKLYKSENLDNPIQTVSLGQSLFFHFPPLLRDGENYVVLLDSTLPRSQYDYILPQVSFTAVGYHKHITLIFNPTRKLPEQDIAQGSYIALPLTLLVLLAGYNHDKLIPLLLQLTSRLQGVRALGQAASDNSGPEDAKRQAKKQKTRRT

SEQ ID NO: 12335 - protein, 25 aa, Artificial Sequence
  Synthetic polypeptide
MAHSLHFLKFCLEIMKSSQLIQPGR

SEQ ID NO: 12336 - protein, 7 aa, Artificial Sequence
  Synthetic polypeptide
WHTVCIF

SEQ ID NO: 12337 - protein, 760 aa, Artificial Sequence
  Synthetic polypeptide
RNSPRSALFRVGHMSSVELDDELLDPDMDPPHPFPKEIPHNEKLLSLKYESLDYDNSENQLFLEEERRINHTAFRTVEIKRWVICALIGILTGLVACFIDIVVENLAGLKYRVIKGNIDKFTEKGGLSFSLLLWATLNAAFVLVGSVIVAFIEPVAAGSGIPQIKCFLNGVKIPHVVRLKTLVIKVSGVILSVVGGLAVGKEGPMIHSGSVIAAGISQGRSTSLKRDFKIFEYFRRDTEKRDFVSAGAAAGVSAAFGAPVGGVLFSLEEGASFWNQFLTWRIFFASMISTFTLNFVLSIYHGNMWDLSSPGLINFGRFDSEKMAYTIHEIPVFIAMGVVGGVLGAVFNALNYWLTMFRIRYIHRPCLQVIEAVLVAAVTATVAFVLIYSSRDCQPLQGGSMSYPLQLFCADGEYNSMAAAFFNTPEKSVVSLFHDPPGSYNPLTLGLFTLVYFFLACWTYGLTVSAGVFIPSLLIGAAWGRLFGISLSYLTGAAIWADPGKYALMGAAAQLGGIVRMTLSLTVIMMEATSNVTYGFPIMLVLMTAKIVGDVFIEGLYDMHIQLQSVPFLHWEAPVTSHSLTAREVMSTPVTCLRRREKVGVIVDVLSDTASNHNGFPVVEHADDTQPARLQGLILRSQLIVLLKHKVFVERSNLGLVQRRLRLKDFRDAYPRFPPIQSIHVSQDERECTMDLSEFMNPSPYTVPQEASLPRVFKLFRALGLRHLVVVDNRNQVVGLVTRKDLARYRLGKRGLEELSLAQT

SEQ ID NO: 12338 - protein, 29 aa, Artificial Sequence
  Synthetic polypeptide
RMHSAEHGACHKLRSEETHHVLRFSESDI

SEQ ID NO: 12339 - protein, 29 aa, Artificial Sequence
  Synthetic polypeptide
RMHSAEHGACHKLRSEETHHVLRFSESDI

SEQ ID NO: 12340 - protein, 38 aa, Artificial Sequence
  Synthetic polypeptide
KVNACIALSTVPVTNYALKKLTTFCAFPSRTYEQRGAG

SEQ ID NO: 12341 - protein, 38 aa, Artificial Sequence; identical to SEQ ID NO: 12340
  Synthetic polypeptide

SEQ ID NO: 12342 - protein, 108 aa, Artificial Sequence
  Synthetic polypeptide
RNSPRSALFRVGHMSSVELDDELLDPDMDPPHPFPKEIPHNEKLLSLKYESLDYDNSENQLFLEEERRINHTAFRTVEIKRWVICALIGILTGLVACFIDIVVENLAG

SEQ ID NO: 12343 - protein, 36 aa, Artificial Sequence
  Synthetic polypeptide
VLMRSDGFISIWHFPCWHSFSLLPPGEEEPSAMIDG

SEQ ID NO: 12344 - protein, 36 aa, Artificial Sequence; identical to SEQ ID NO: 12343
  Synthetic polypeptide

SEQ ID NO: 12345 - protein, 36 aa, Artificial Sequence; identical to SEQ ID NO: 12343
  Synthetic polypeptide

SEQ ID NO: 12346 - protein, 36 aa, Artificial Sequence; identical to SEQ ID NO: 12343
  Synthetic polypeptide

SEQ ID NO: 12347 - protein, 36 aa, Artificial Sequence; identical to SEQ ID NO: 12343
  Synthetic polypeptide

SEQ ID NO: 12348 - protein, 36 aa, Artificial Sequence; identical to SEQ ID NO: 12343
  Synthetic polypeptide

SEQ ID NO: 12349 - protein, 1548 aa, Artificial Sequence
  Synthetic polypeptide
YWTQYLTLLCLSFTSEKGDDKNNYRMKGDNTHEDWNVTWNTSNPDFTKCFQNTVLVWVPCFYLWACFPFYFLYLSRHDRGYIQMTPLNKTKTALGFLLWIVCWADLFYSFWERSRGIFLAPVFLVSPTLLGITMLLATFLIQLERRKGVQSSGIMLTFWLVALVCALAILRSKIMTALKEDAQVDLFRDITFYVYFSLLLIQLVLSCFSDRSPLFSETIHDPNPCPESSASFLSRITFWWITGLIVRGYRQPLEGSDLWSLNKEDTSEQVVPVLVKNWKKECAKTRKQPVKVVYSSKDPAQPKESSKVDANEEVEALIVKSPQKEWNPSLFKVLYKTFGPYFLMSFFFKAIHDLMMFSGPQILKLLIKFVNDTKAPDWQGYFYTVLLFVTACLQTLVLHQYFHICFVSGMRIKTAVIGAVYRKALVITNSARKSSTVGEIVNLMSVDAQRFMDLATYINMIWSAPLQVILALYLLWLNLGPSVLAGVAVMVLMVPVNAVMAMKTKTYQVAHMKSKDNRIKLMNEILNGIKVLKLYAWELAFKDKVLAIRQEELKVLKKSAYLSAVGTFTWVCTPFLVALCTFAVYVTIDENNILDAQTAFVSLALFNILRFPLNILPMVISSIVQASVSLKRLRIFLSHEELEPDSIERRPVKDGGGTNSITVRNATFTWARSDPPTLNGITFSIPEGALVAVVGQVGCGKSSLLSALLAEMDKVEGHVAIKGSVAYVPQQAWIQNDSLRENILFGCQLEEPYYRSVIQACALLPDLEILPSGDRTEIGEKGVNLSGGQKQRVSLARAVYSNADIYLFDDPLSAVDAHVGKHIFENVIGPKGMLKNKTRILVTHSMSYLPQVDVIIVMSGGKISEMGSYQELLARDGAFAEFLRTYASTEQEQDAEENGVTGVSGPGKEAKQMENGMLVTDSAGKQLQRQLSSSSSYSGDISRHHNSTAELQKAEAKKEETWKLMEADKAQTGQVKLSVYWDYMKAIGLFISFLSIFLFMCNHVSALASNYWLSLWTDDPIVNGTQEHTKVRLSVYGALGISQGIAVFGYSMAVSIGGILASRCLHVDLLHSILRSPMSFFERTPSGNLVNRFSKELDTVDSMIPEVIKMFMGSLFNVIGACIVILLATPIAAIIIPPLGLIYFFVQRFYVASSRQLKRLESVSRSPVYSHFNETLLGVSVIRAFEEQERFIHQSDLKVDENQKAYYPSIVANRWLAVRLECVGNCIVLFAALFAVISRHSLSAGLVGLSVSYSLQVTTYLNWLVRMSSEMETNIVAVERLKEYSETEKEAPWQIQETAPPSSWPQVGRVEFRNYCLRYREDLDFVLRHINVTINGGEKVGIVGRTGAGKSSLTLGLFRINESAEGEIIIDGINIAKIGLHDLRFKITIIPQDPVLFSGSLRMNLDPFSQYSDEEVWTSLELAHLKDFVSALPDKLDHECAEGGENLSVGQRQLVCLARALLRKTKILVLDEATAAVDLETDDLIQSTIRTQFEDCTVLTIAHRLNTIMDYTRVIVLDKGEIQEYGAPSDLLQQRGLFYSMAKDAGLV

SEQ ID NO: 12350 - protein, 57 aa, Artificial Sequence
  Synthetic polypeptide
KEIIHMRTGMSRGIPATPTSPSAFRTRSSCGCLVFTSGPVSPSTSSISPDMTEATFR

SEQ ID NO: 12351 - protein, 57 aa, Artificial Sequence; identical to SEQ ID NO: 12350
  Synthetic polypeptide

SEQ ID NO: 12352 - protein, 57 aa, Artificial Sequence; identical to SEQ ID NO: 12350
  Synthetic polypeptide

SEQ ID NO: 12353 - protein, 57 aa, Artificial Sequence; identical to SEQ ID NO: 12350
  Synthetic polypeptide

SEQ ID NO: 12354 - protein, 57 aa, Artificial Sequence; identical to SEQ ID NO: 12350
  Synthetic polypeptide

SEQ ID NO: 12355 - protein, 57 aa, Artificial Sequence; identical to SEQ ID NO: 12350
  Synthetic polypeptide

SEQ ID NO: 12356 - protein, 1483 aa, Artificial Sequence
  Synthetic polypeptide
YWTQYLTLLCLSFTSEKGDDKNNYRMKGDNTHEDWNVTWNTSNPDFTKCFQNTVLVWVPCFYLWACFPFYFLYLSRHDRGYIQMTPLNKTKTALGFLLWIVCWADLFYSFWERSRGIFLAPVFLVSPTLLGITMLLATFLIQLERRKGVQSSGIMLTFWLVALVCALAILRSKIMTALKEDAQVDLFRDITFYVYFSLLLIQLVLSCFSDRSPLFSETIHDPNPCPESSASFLSRITFWWITGLIVRGYRQPLEGSDLWSLNKEDTSEQVVPVLVKNWKKECAKTRKQPVKVVYSSKDPAQPKESSKVDANEEVEALIVKSPQKEWNPSLFKVLYKTFGPYFLMSFFFKAIHDLMMFSGPQILKLLIKFVNDTKAPDWQGYFYTVLLFVTACLQTLVLHQYFHICFVSGMRIKTAVIGAVYRKALVITNSARKSSTVGEIVNLMSVDAQRFMDLATYINMIWSAPLQVILALYLLWLNLGPSVLAGVAVMVLMVPVNAVMAMKTKTYQVAHMKSKDNRIKLMNEILNGIKVLKLYAWELAFKDKVLAIRQEELKVLKKSAYLSAVGTFTWVCTPFLVALCTFAVYVTIDENNILDAQTAFVSLALFNILRFPLNILPMVISSIVQASVSLKRLRIFLSHEELEPDSIERRPVKDGGGTNSITVRNATFTWARSDPPTLNGITFSIPEGALVAVVGQVGCGKSSLLSALLAEMDKVEGHVAIKGSVAYVPQQAWIQNDSLRENILFGCQLEEPYYRSVIQACALLPDLEILPSGDRTEIGEKGVNLSGGQKQRVSLARAVYSNADIYLFDDPLSAVDAHVGKHIFENVIGPKGMLKNKTRILVTHSMSYLPQVDVIIVMSGGKISEMGSYQELLARDGAFAEFLRTYASTEQEQDAEENGVTGVSGPGKEAKQMENGMLVTDSAGKQLQRQLSSSSSYSGDISRHHNSTAELQKAEAKKEETWKLMEADKAQTGQVKLSVYWDYMKAIGLFISFLSIFLFMCNHVSALASNYWLSLWTDDPIVNGTQEHTKVRLSVYGALGISQGIAVFGYSMAVSIGGILASRCLHVDLLHSILRSPMSFFERTPSGNLVNRFSKELDTVDSMIPEVIKMFMGSLFNVIGACIVILLATPIAAIIIPPLGLIYFFVQRFYVASSRQLKRLESVSRSPVYSHFNETLLGVSVIRAFEEQERFIHQSDLKVDENQKAYYPSIVANRWLAVRLECVGNCIVLFAALFAVISRHSLSAGLVGLSVSYSLQVTTYLNWLVRMSSEMETNIVAVERLKEYSETEKEAPWQIQETAPPSSWPQVGRVEFRNYCLRYREDLDFVLRHINVTINGGEKVGIVGRTGAGKSSLTLGLFRINESAEGEIIIDGINIAKIGLHDLRFKITIIPQDPVLFSGSLRMNLDPFSQYSDEEVWTSLELAHLKDFVSALPDKLDHECAEGGENLRVIVLDKGEIQEYGAPSDLLQQRGLFYSMAKDAGLV

SEQ ID NO: 12357 - protein, 1492 aa, Artificial Sequence
  Synthetic polypeptide
YWTQYLTLLCLSFTSEKGDDKNNYRMKGDNTHEDWNVTWNTSNPDFTKCFQNTVLVWVPCFYLWACFPFYFLYLSRHDRGYIQMTPLNKTKTALGFLLWIVCWADLFYSFWERSRGIFLAPVFLVSPTLLGITMLLATFLIQLERRKGVQSSGIMLTFWLVALVCALAILRSKIMTALKEDAQVDLFRDITFYVYFSLLLIQLVLSCFSDRSPLFSETIHDPNPCPESSASFLSRITFWWITGLIVRGYRQPLEGSDLWSLNKEDTSEQVVPVLVKNWKKECAKTRKQPVKVVYSSKDPAQPKESSKVDANEEVEALIVKSPQKEWNPSLFKVLYKTFGPYFLMSFFFKAIHDLMMFSGPQILKLLIKFVNDTKAPDWQGYFYTVLLFVTACLQTLVLHQYFHICFVSGMRIKTAVIGAVYRKALVITNSARKSSTVGEIVNLMSVDAQRFMDLATYINMIWSAPLQVILALYLLWLNLGPSVLAGVAVMVLMVPVNAVMAMKTKTYQVAHMKSKDNRIKLMNEILNGIKVLKLYAWELAFKDKVLAIRQEELKVLKKSAYLSAVGTFTWVCTPFLVALCTFAVYVTIDENNILDAQTAFVSLALFNILRFPLNILPMVISSIVQASVSLKRLRIFLSHEELEPDSIERRPVKDGGGTNSITVRNATFTWARSDPPTLNGITFSIPEGALVAVVGQVGCGKSSLLSALLAEMDKVEGHVAIKGSVAYVPQQAWIQNDSLRENILFGCQLEEPYYRSVIQACALLPDLEILPSGDRTEIGEKTRILVTHSMSYLPQVDVIIVMSGGKISEMGSYQELLARDGAFAEFLRTYASTEQEQDAEENGVTGVSGPGKEAKQMENGMLVTDSAGKQLQRQLSSSSSYSGDISRHHNSTAELQKAEAKKEETWKLMEADKAQTGQVKLSVYWDYMKAIGLFISFLSIFLFMCNHVSALASNYWLSLWTDDPIVNGTQEHTKVRLSVYGALGISQGIAVFGYSMAVSIGGILASRCLHVDLLHSILRSPMSFFERTPSGNLVNRFSKELDTVDSMIPEVIKMFMGSLFNVIGACIVILLATPIAAIIIPPLGLIYFFVQRFYVASSRQLKRLESVSRSPVYSHFNETLLGVSVIRAFEEQERFIHQSDLKVDENQKAYYPSIVANRWLAVRLECVGNCIVLFAALFAVISRHSLSAGLVGLSVSYSLQVTTYLNWLVRMSSEMETNIVAVERLKEYSETEKEAPWQIQETAPPSSWPQVGRVEFRNYCLRYREDLDFVLRHINVTINGGEKVGIVGRTGAGKSSLTLGLFRINESAEGEIIIDGINIAKIGLHDLRFKITIIPQDPVLFSGSLRMNLDPFSQYSDEEVWTSLELAHLKDFVSALPDKLDHECAEGGENLSVGQRQLVCLARALLRKTKILVLDEATAAVDLETDDLIQSTIRTQFEDCTVLTIAHRLNTIMDYTRVIVLDKGEIQEYGAPSDLLQQRGLFYSMAKDAGLV

SEQ ID NO: 12358 - protein, 1433 aa, Artificial Sequence
  Synthetic polypeptide
YWTQYLTLLCLSFTSEKGDDKNNYRMKGDNTHEDWNVTWNTSNPDFTKCFQNTVLVWVPCFYLWACFPFYFLYLSRHDRGYIQMTPLNKTKTALGFLLWIVCWADLFYSFWERSRGIFLAPVFLVSPTLLGITMLLATFLIQLERRKGVQSSGIMLTFWLVALVCALAILRSKIMTALKEDAQVDLFRDITFYVYFSLLLIQLVLSCFSDRSPLFSETIHDPNPCPESSASFLSRITFWWITGLIVRGYRQPLEGSDLWSLNKEDTSEQVVPVLVKNWKKECAKTRKQPVKVVYSSKDPAQPKESSKVDANEEVEALIVKSPQKEWNPSLFKVLYKTFGPYFLMSFFFKAIHDLMMFSGPQILKLLIKFVNDTKAPDWQGYFYTVLLFVTACLQTLVLHQYFHICFVSGMRIKTAVIGAVYRKALVITNSARKSSTVGEIVNLMSVDAQRFMDLATYINMIWSAPLQVILALYLLWLNLGPSVLAGVAVMVLMVPVNAVMAMKTKTYQVAHMKSKDNRIKLMNEILNGIKVLKLYAWELAFKDKVLAIRQEELKVLKKSAYLSAVGTFTWVCTPFLVALCTFAVYVTIDENNILDAQTAFVSLALFNILRFPLNILPMVISSIVQASVSLKRLRIFLSHEELEPDSIERRPVKDGGGTNSITVRNATFTWARSDPPTLNGITFSIPEGALVAVVGQVGCGKSSLLSALLAEMDKVEGHVAIKTRILVTHSMSYLPQVDVIIVMSGGKISEMGSYQELLARDGAFAEFLRTYASTEQEQDAEENGVTGVSGPGKEAKQMENGMLVTDSAGKQLQRQLSSSSSYSGDISRHHNSTAELQKAEAKKEETWKLMEADKAQTGQVKLSVYWDYMKAIGLFISFLSIFLFMCNHVSALASNYWLSLWTDDPIVNGTQEHTKVRLSVYGALGISQGIAVFGYSMAVSIGGILASRCLHVDLLHSILRSPMSFFERTPSGNLVNRFSKELDTVDSMIPEVIKMFMGSLFNVIGACIVILLATPIAAIIIPPLGLIYFFVQRFYVASSRQLKRLESVSRSPVYSHFNETLLGVSVIRAFEEQERFIHQSDLKVDENQKAYYPSIVANRWLAVRLECVGNCIVLFAALFAVISRHSLSAGLVGLSVSYSLQVTTYLNWLVRMSSEMETNIVAVERLKEYSETEKEAPWQIQETAPPSSWPQVGRVEFRNYCLRYREDLDFVLRHINVTINGGEKVGIVGRTGAGKSSLTLGLFRINESAEGEIIIDGINIAKIGLHDLRFKITIIPQDPVLFSGSLRMNLDPFSQYSDEEVWTSLELAHLKDFVSALPDKLDHECAEGGENLSVGQRQLVCLARALLRKTKILVLDEATAAVDLETDDLIQSTIRTQFEDCTVLTIAHRLNTIMDYTRVIVLDKGEIQEYGAPSDLLQQRGLFYSMAKDAGLV

SEQ ID NO: 12359 - protein, 1489 aa, Artificial Sequence
  Synthetic polypeptide
YWTQYLTLLCLSFTSEKGDDKNNYRMKGDNTHEDWNVTWNTSNPDFTKCFQNTVLVWVPCFYLWACFPFYFLYLSRHDRGYIQMTPLNKTKTALGFLLWIVCWADLFYSFWERSRGIFLAPVFLVSPTLLGITMLLATFLIQLERRKGVQSSGIMLTFWLVALVCALAILRSKIMTALKEDAQVDLFRDITFYVYFSLLLIQLVLSCFSDRSPLFSETIHDPNPCPESSASFLSRITFWWITGLIVRGYRQPLEGSDLWSLNKEDTSEQVVPVLVKNWKKECAKTRKQPVKVVYSSKDPAQPKESSKVDANEEVEALIVKSPQKEWNPSLFKVLYKTFGPYFLMSFFFKAIHDLMMFSGPQILKLLIKFVNDTKAPDWQGYFYTVLLFVTACLQTLVLHQYFHICFVSGMRIKTAVIGAVYRKALVITNSARKSSTVGEIVNLMSVDAQRFMDLATYINMIWSAPLQVILALYLLWLNLGPSVLAGVAVMVLMVPVNAVMAMKTKTYQVAHMKSKDNRIKLMNEILNGIKVLKLYAWELAFKDKVLAIRQEELKVLKKSAYLSAVGTFTWVCTPFLVALCTFAVYVTIDENNILDAQTAFVSLALFNILRFPLNILPMVISSIVQASVSLKRLRIFLSHEELEPDSIERRPVKDGGGTNSITVRNATFTWARSDPPTLNGITFSIPEGALVAVVGQVGCGKSSLLSALLAEMDKVEGHVAIKGVNLSGGQKQRVSLARAVYSNADIYLFDDPLSAVDAHVGKHIFENVIGPKGMLKNKTRILVTHSMSYLPQVDVIIVMSGGKISEMGSYQELLARDGAFAEFLRTYASTEQEQDAEENGVTGVSGPGKEAKQMENGMLVTDSAGKQLQRQLSSSSSYSGDISRHHNSTAELQKAEAKKEETWKLMEADKAQTGQVKLSVYWDYMKAIGLFISFLSIFLFMCNHVSALASNYWLSLWTDDPIVNGTQEHTKVRLSVYGALGISQGIAVFGYSMAVSIGGILASRCLHVDLLHSILRSPMSFFERTPSGNLVNRFSKELDTVDSMIPEVIKMFMGSLFNVIGACIVILLATPIAAIIIPPLGLIYFFVQRFYVASSRQLKRLESVSRSPVYSHFNETLLGVSVIRAFEEQERFIHQSDLKVDENQKAYYPSIVANRWLAVRLECVGNCIVLFAALFAVISRHSLSAGLVGLSVSYSLQVTTYLNWLVRMSSEMETNIVAVERLKEYSETEKEAPWQIQETAPPSSWPQVGRVEFRNYCLRYREDLDFVLRHINVTINGGEKVGIVGRTGAGKSSLTLGLFRINESAEGEIIIDGINIAKIGLHDLRFKITIIPQDPVLFSGSLRMNLDPFSQYSDEEVWTSLELAHLKDFVSALPDKLDHECAEGGENLSVGQRQLVCLARALLRKTKILVLDEATAAVDLETDDLIQSTIRTQFEDCTVLTIAHRLNTIMDYTRVIVLDKGEIQEYGAPSDLLQQRGLFYSMAKDAGLV

SEQ ID NO: 12360 - protein, 1558 aa, Artificial Sequence
  Synthetic polypeptide
YWTQYLTLLCLSFTSEKGDDKNNYRMKGDNTHEDWNVTWNTSNPDFTKCFQNTVLVWVPCFYLWACFPFYFLYLSRHDRGYIQMTPLNKTKTALGFLLWIVCWADLFYSFWERSRGIFLAPVFLVSPTLLGITMLLATFLIQLERRKGVQSSGIMLTFWLVALVCALAILRSKIMTALKEDAQVDLFRDITFYVYFSLLLIQLVLSCFSDRSPLFSETIHDPNPCPESSASFLSRITFWWITGLIVRGYRQPLEGSDLWSLNKEDTSEQVVPVLVKNWKKECAKTRKQPVKVVYSSKDPAQPKESSKVDANEEVEALIVKSPQKEWNPSLFKVLYKTFGPYFLMSFFFKAIHDLMMFSGPQILKLLIKFVNDTKAPDWQGYFYTVLLFVTACLQTLVLHQYFHICFVSGMRIKTAVIGAVYRKALVITNSARKSSTVGEIVNLMSVDAQRFMDLATYINMIWSAPLQVILALYLLWLNLGPSVLAGVAVMVLMVPVNAVMAMKTKTYQVAHMKSKDNRIKLMNEILNGIKVLKLYAWELAFKDKVLAIRQEELKVLKKSAYLSAVGTFTWVCTPFLVALCTFAVYVTIDENNILDAQTAFVSLALFNILRFPLNILPMVISSIVQASVSLKRLRIFLSHEELEPDSIERRPVKDGGGTNSITVRNATFTWARSDPPTLNGITFSIPEGALVAVVGQVGCGKSSLLSALLAEMDKVEGHVAIKGSVAYVPQQAWIQNDSLRENILFGCQLEEPYYRSVIQACALLPDLEILPSGDRTEIGEKGVNLSGGQKQRVSLARAVYSNADIYLFDDPLSAVDAHVGKHIFENVIGPKGMLKNKTRILVTHSMSYLPQVDVIIVMSGGKISEMGSYQELLARDGAFAEFLRTYASTEQEQDAEENGSTVMDEEEAGVTGVSGPGKEAKQMENGMLVTDSAGKQLQRQLSSSSSYSGDISRHHNSTAELQKAEAKKEETWKLMEADKAQTGQVKLSVYWDYMKAIGLFISFLSIFLFMCNHVSALASNYWLSLWTDDPIVNGTQEHTKVRLSVYGALGISQGIAVFGYSMAVSIGGILASRCLHVDLLHSILRSPMSFFERTPSGNLVNRFSKELDTVDSMIPEVIKMFMGSLFNVIGACIVILLATPIAAIIIPPLGLIYFFVQRFYVASSRQLKRLESVSRSPVYSHFNETLLGVSVIRAFEEQERFIHQSDLKVDENQKAYYPSIVANRWLAVRLECVGNCIVLFAALFAVISRHSLSAGLVGLSVSYSLQVTTYLNWLVRMSSEMETNIVAVERLKEYSETEKEAPWQIQETAPPSSWPQVGRVEFRNYCLRYREDLDFVLRHINVTINGGEKVGIVGRTGAGKSSLTLGLFRINESAEGEIIIDGINIAKIGLHDLRFKITIIPQDPVLFSGSLRMNLDPFSQYSDEEVWTSLELAHLKDFVSALPDKLDHECAEGGENLSVGQRQLVCLARALLRKTKILVLDEATAAVDLETDDLIQSTIRTQFEDCTVLTIAHRLNTIMDYTRVIVLDKGEIQEYGAPSDLLQQRGLFYSMAKDAGLV

SEQ ID NO: 12361 - protein, 110 aa, Artificial Sequence
  Synthetic polypeptide
FLQERMHGDQVIAKGRKICLNLSDISTTHDGKLTIKGRHRGADGSWEVVPDPGLISDQRVCRRRDHHRWHQHRQDRPARPPLQDHHHPPGPCFVFGFPPNEPGPIQPVLG

SEQ ID NO: 12362 - protein, 110 aa, Artificial Sequence; identical to SEQ ID NO: 12361
  Synthetic polypeptide

SEQ ID NO: 12363 - protein, 110 aa, Artificial Sequence; identical to SEQ ID NO: 12361
  Synthetic polypeptide

SEQ ID NO: 12364 - protein, 110 aa, Artificial Sequence; identical to SEQ ID NO: 12361
  Synthetic polypeptide

SEQ ID NO: 12365 - protein, 110 aa, Artificial Sequence; identical to SEQ ID NO: 12361
  Synthetic polypeptide

SEQ ID NO: 12366 - protein, 110 aa, Artificial Sequence; identical to SEQ ID NO: 12361
  Synthetic polypeptide

SEQ ID NO: 12367 - protein, 110 aa, Artificial Sequence; identical to SEQ ID NO: 12361
  Synthetic polypeptide

SEQ ID NO: 12368 - protein, 225 aa, Artificial Sequence
  Synthetic polypeptide
IFQIFQQLMMGNSPSKVGIVGRTGAGKSSLTLGLFRINESAEGEIIIDGINIAKIGLHDLRFKITIIPQDPVLFSGSLRMNLDPFSQYSDEEVWTSLELAHLKDFVSALPDKLDHECAEGGENLSVGQRQLVCLARALLRKTKILVLDEATAAVDLETDDLIQSTIRTQFEDCTVLTIAHRLNTIMDYTRVIVLDKGEIQEYGAPSDLLQQRGLFYSMAKDAGLV

SEQ ID NO: 12369 - protein, 225 aa, Artificial Sequence; identical to SEQ ID NO: 12368
  Synthetic polypeptide

SEQ ID NO: 12370 - protein, 225 aa, Artificial Sequence; identical to SEQ ID NO: 12368
  Synthetic polypeptide

SEQ ID NO: 12371 - protein, 225 aa, Artificial Sequence; identical to SEQ ID NO: 12368
  Synthetic polypeptide

SEQ ID NO: 12372 - protein, 225 aa, Artificial Sequence; identical to SEQ ID NO: 12368
  Synthetic polypeptide

SEQ ID NO: 12373 - protein, 225 aa, Artificial Sequence; identical to SEQ ID NO: 12368
  Synthetic polypeptide

SEQ ID NO: 12374 - protein, 20 aa, Artificial Sequence
  Synthetic polypeptide
WETHHQRSASWGGRELGSRP

SEQ ID NO: 12375 - protein, 20 aa, Artificial Sequence
  Synthetic polypeptide
WETHHQRSASWGGRELGSRP

SEQ ID NO: 12376 - protein, 20 aa, Artificial Sequence
  Synthetic polypeptide
WETHHQRSASWGGRELGSRP

SEQ ID NO: 12377 - protein, 20 aa, Artificial Sequence
  Synthetic polypeptide
WETHHQRSASWGGRELGSRP

SEQ ID NO: 12378 - protein, 20 aa, Artificial Sequence
  Synthetic polypeptide
WETHHQRSASWGGRELGSRP

SEQ ID NO: 12379 - protein, 20 aa, Artificial Sequence
  Synthetic polypeptide
WETHHQRSASWGGRELGSRP

SEQ ID NO: 12380 - protein, 20 aa, Artificial Sequence
  Synthetic polypeptide
WETHHQRSASWGGRELGSRP

SEQ ID NO: 12381 - protein, 160 aa, Artificial Sequence
  Synthetic polypeptide
IFQIFQQLMMGNSPSKVGIVGRTGAGKSSLTLGLFRINESAEGEIIIDGINIAKIGLHDLRFKITIIPQDPVLFSGSLRMNLDPFSQYSDEEVWTSLELAHLKDFVSALPDKLDHECAEGGENLRVIVLDKGEIQEYGAPSDLLQQRGLFYSMAKDAGLV

SEQ ID NO: 12382 - protein, 69 aa, Artificial Sequence
  Synthetic polypeptide
GQVRWLTAVIPALWEAEAGRSPEVDSLRPAWPTRVIVLDKGEIQEYGAPSDLLQQRGLFYSMAKDAGLV

SEQ ID NO: 12383 - protein, 69 aa, Artificial Sequence; identical to SEQ ID NO: 12382
  Synthetic polypeptide

SEQ ID NO: 12384 - protein, 69 aa, Artificial Sequence; identical to SEQ ID NO: 12382
  Synthetic polypeptide

SEQ ID NO: 12385 - protein, 69 aa, Artificial Sequence; identical to SEQ ID NO: 12382
  Synthetic polypeptide

SEQ ID NO: 12386 - protein, 69 aa, Artificial Sequence; identical to SEQ ID NO: 12382
  Synthetic polypeptide

SEQ ID NO: 12387 - protein, 69 aa, Artificial Sequence; identical to SEQ ID NO: 12382
  Synthetic polypeptide

SEQ ID NO: 12388 - protein, 69 aa, Artificial Sequence; identical to SEQ ID NO: 12382
  Synthetic polypeptide

SEQ ID NO: 12389 - protein, 7 aa, Artificial Sequence
  Synthetic polypeptide
DQLGQHG

SEQ ID NO: 12390 - protein, 7 aa, Artificial Sequence
  Synthetic polypeptide
DQLGQHG

SEQ ID NO: 12391 - protein, 7 aa, Artificial Sequence
  Synthetic polypeptide
DQLGQHG

SEQ ID NO: 12392 - protein, 7 aa, Artificial Sequence
  Synthetic polypeptide
DQLGQHG

SEQ ID NO: 12393 - protein, 7 aa, Artificial Sequence
  Synthetic polypeptide
DQLGQHG

SEQ ID NO: 12394 - protein, 7 aa, Artificial Sequence
  Synthetic polypeptide
DQLGQHG

SEQ ID NO: 12395 - protein, 7 aa, Artificial Sequence
  Synthetic polypeptide
DQLGQHG

SEQ ID NO: 12396 - protein, 44 aa, Artificial Sequence
  Synthetic polypeptide
FETSLANTGDRLGQRRNPGVRRPIGPPAAERSFLQHGQRRRLGV

SEQ ID NO: 12397 - protein, 44 aa, Artificial Sequence; identical to SEQ ID NO: 12396
  Synthetic polypeptide

SEQ ID NO: 12398 - protein, 44 aa, Artificial Sequence; identical to SEQ ID NO: 12396
  Synthetic polypeptide

SEQ ID NO: 12399 - protein, 44 aa, Artificial Sequence; identical to SEQ ID NO: 12396
  Synthetic polypeptide

SEQ ID NO: 12400 - protein, 44 aa, Artificial Sequence; identical to SEQ ID NO: 12396
  Synthetic polypeptide

SEQ ID NO: 12401 - protein, 44 aa, Artificial Sequence; identical to SEQ ID NO: 12396
  Synthetic polypeptide

SEQ ID NO: 12402 - protein, 44 aa, Artificial Sequence; identical to SEQ ID NO: 12396
  Synthetic polypeptide

SEQ ID NO: 12403 - protein, 72 aa, Artificial Sequence
  Synthetic polypeptide
FLYFRCLNRWASLAGPGQGSPPWPVGCCGSRRQLRVGSGSTGSPLPTWGCTHCAPGSASSPRTPSCSLALCG

SEQ ID NO: 12404 - protein, 26 aa, Artificial Sequence
  Synthetic polypeptide
TGGHRWQDRGREVLPGQWAAAAPGGS

SEQ ID NO: 12405 - protein, 227 aa, Artificial Sequence
  Synthetic polypeptide
WAHWSKDSLISILPVPKQVGIVGRTGAGKSSLASGLLRLQEAAEGGIWIDGVPIAHVGLHTLRSRISIIPQDPILFPGSLRMNLDLLQEHSDEAIWAALETVQLKALVASLPGQLQYKCADRGEDLSVGQKQLLCLARALLRKTQILILDEATAAVDPGTELQMQAMLGSWFAQCTVLLIAHRLRSVMDCARVLVMDKGQVAESGSPAQLLAQKGLFYRLAQESGLV

SEQ ID NO: 12406 - protein, 987 aa, Artificial Sequence
  Synthetic polypeptide
SCGTFLCETPVLAMHEENVYTVESNRVQVRTWQGTVKQLLLFSETEGNPCFLDICGNFLVVGTDLAHFKSFDLSRREAKAHCSCRSLAELVPGVGGIASLRCSSSGSTISILPSKADNSPDSKICFYDVEMDTVTVFDFKTGQIDRRETLSFNEQETNKSHLFVDEGLKNYVPVNHFWDQSEPRLFVCEAVQETPRSQPQSANGQPQDGRAGPAADVLILSFFISEEHGFLLHESFPRPATSHSLLGMEVPYYYFTRKPEEADREDEVEPGCHHIPQMVSRRPLRDFVGLEDCDKATRDAMLHFSFFVTIGDMDEAFKSIKLIKSEAVWENMARMCVKTQRLDVAKVCLGNMGHARGARALREAEQEPELEARVAVLATQLGMLEDAEQLYRKCKRHDLLNKFYQAAGRWQEALQVAEHHDRVHLRSTYHRYAGHLEASADCSRALSYYEKSDTHRFEVPRMLSEDLPSLELYVNKMKDKTLWRWWAQYLESQGEMDAALHYYELARDHFSLVRIHCFQGNVQKAAQIANETGNLAASYHLARQYESQEEVGQAVHFYTRAQAFKNAIRLCKENGLDDQLMNLALLSSPEDMIEAARYYEEKGVQMDRAVMLYHKAGHFSKALELAFATQQFVALQLIAEDLDETSDPALLARCSDFFIEHSQYERAVELLLAARKYQEALQLCLGQNMSITEEMAEKMTVAKDSSDLPEESRRELLEQIADCCMRQGSYHLATKKYTQAGNKLKAMRALLKSGDTEKITFFASVSRQKEIYIMAANYLQSLDWRKEPEIMKNIIGFYTKGRALDLLAGFYDACAQVEIDEYQNYDKAHGALTEAYKCLAKAKAKSPLDQETRLAQLQSRMALVKRFIQARRTYTEDPKESIKQCELLLEEPDLDSTIRIGDVYGFLVEHYVRKEEYQTAYRFLEEMRRRLPLANMSYYVSPQAVDAVHRGLGLPLPRTVPEQVRHNSMEDARELDEEVVEEADDDP

SEQ ID NO: 12407 - protein, 37 aa, Artificial Sequence
  Synthetic polypeptide
PWPRQFPVPQSLIFFICEVQIVHPYEAVGPSCVRRLC

SEQ ID NO: 12408 - protein, 11 aa, Artificial Sequence
  Synthetic polypeptide
CTPMKLWDLLV

SEQ ID NO: 12409 - protein, 11 aa, Artificial Sequence
  Synthetic polypeptide
CTPMKLWDLLV

SEQ ID NO: 12410 - protein, 7 aa, Artificial Sequence
  Synthetic polypeptide
SCGTFLC

SEQ ID NO: 12411 - protein, 33 aa, Artificial Sequence
  Synthetic polypeptide
PWPRQFPVPQSLIFFICEVQIVHPYEAVGPSCV

SEQ ID NO: 12412 - protein, 1059 aa, Artificial Sequence
  Synthetic polypeptide
STPLGTQFAFFKVLPGDYEILATHPTWALKEASTTVRVTNSNANAASPLIVAGYNVSGSVRSDGEPMKGVKFLLFSSLVTKEDVLGCNVSPVPGFQPQDESLVYLCYTVSREDGSFSFYSLPSGGYTVIPFYRGERITFDVAPSRLDFTVEHDSLKIEPVFHVMGFSVTGRVLNGPEGDGVPEAVVTLNNQIKVKTKADGSFRLENITTGTYTIHAQKEHLYFETVTIKIAPNTPQLADIVATGFSVCGQISIIRFPDTVKQMNKYKVVLSSQDKDKSLVTVETDAHGSFCFKANPGTYKVQVMVPEAETRAGLTLKPQTFPLTVTDRPVMDVAFVQFLASVSGKVSCLDTCGDLLVTLQSLSRQGEKRSLQLSGKVNAMTFTFDNVLPGKYKISIMHEDWCWKNKSLEVEVLEDDVSAVEFRQTGYMLRCSLSHAITLEFYQDGNGRENVGIYNLSKGVNRFCLSKPGVYKVTPRSCHRFEQAFYTYDTSSPSILTLTAIRHHVLGTITTDKMMDVTVTIKSSIDSEPALVLGPLKSVQELRREQQLAEIEARRQEREKNGNEEGEERMTKPPVQEMVDELQGPFSYDFSYWARSGEKITVTPSSKELLFYPPSMEAVVSGESCPGKLIEIHGKAGLFLEGQIHPELEGVEIVISEKGASSPLITVFTDDKGAYSVGPLHSDLEYTVTSQKEGYVLTAVEGTIGDFKAYALAGVSFEIKAEDDQPLPGVLLSLSGGLFRSNLLTQDNGILTFSNLSPGQYYFKPMMKEFRFEPSSQMIEVQEGQNLKITITGYRTAYSCYGTVSSLNGEPEQGVAMEAVGQNDCSIYGEDTVTDEEGKFRLRGLLPGCVYHVQLKAEGNDHIERALPHHRVIEVGNNDIDDVNIIVFRQINQFDLSGNVITSSEYLPTLWVKLYKSENLDNPIQTVSLGQSLFFHFPPLLRDGENYVVLLDSTLPRSQYDYILPQVSFTAVGYHKHITLIFNPTRKLPEQDIAQGSYIALPLTLLVLLAGYNHDKLIPLLLQLTSRLQGVGALGQAASDNSGPEDAKRQAKKQKTRRT

SEQ ID NO: 12413 - protein, 28 aa, Artificial Sequence
  Synthetic polypeptide
APLLAHSLHFLKFCLEIMKSSQLIQPGR

SEQ ID NO: 12414 - protein, 28 aa, Artificial Sequence
  Synthetic polypeptide
APLLAHSLHFLKFCLEIMKSSQLIQPGR

SEQ ID NO: 12415 - protein, 28 aa, Artificial Sequence
  Synthetic polypeptide
APLLAHSLHFLKFCLEIMKSSQLIQPGR

SEQ ID NO: 12416 - protein, 10 aa, Artificial Sequence
  Synthetic polypeptide
HPSWHTVCIF

SEQ ID NO: 12417 - protein, 10 aa, Artificial Sequence
  Synthetic polypeptide
HPSWHTVCIF

SEQ ID NO: 12418 - protein, 10 aa, Artificial Sequence
  Synthetic polypeptide
HPSWHTVCIF

SEQ ID NO: 12419 - protein, 10 aa, Artificial Sequence
  Synthetic polypeptide
HPSWHTVCIF

SEQ ID NO: 12420 - protein, 1104 aa, Artificial Sequence
  Synthetic polypeptide
STPLGTQFAFFKVLPGDYEILATHPTWALKEASTTVRVTNSNANAASPLIVAGYNVSGSVRSDGEPMKGVKFLLFSSLVTKEDVLGCNVSPVPGFQPQDESLVYLCYTVSREDGSFSFYSLPSGGYTVIPFYRGERITFDVAPSRLDFTVEHDSLKIEPVFHVMGFSVTGRVLNGPEGDGVPEAVVTLNNQIKVKTKADGSFRLENITTGTYTIHAQKEHLYFETVTIKIAPNTPQLADIVATGFSVCGQISIIRFPDTVKQMNKYKVVLSSQDKDKSLVTVETDAHGSFCFKANPGTYKVQVMVPEAETRAGLTLKPQTFPLTVTDRPVMDVAFVQFLASVSGKVSCLDTCGDLLVTLQSLSRQGEKRSLQLSGKVNAMTFTFDNVLPGKYKISIMHEDWCWKNKSLEVEVLEDDVSAVEFRQTGYMLRCSLSHAITLEFYQDGNGRENVGIYNLSKGVNRFCLSKPGVYKVTPRSCHRFEQAFYTYDTSSPSILTLTAIRHHVLGTITTDKMMDVTVTIKSSIDSEPALVLGPLKSVQELRREQQLAEIEARRQEREKNGNEEGEERMTKPPVQEMVDELQGPFSYDFSYWARSGEKITVTPSSKELLFYPPSMEAVVSGESCPGKLIEIHGKAGLFLEGQIHPELEGVEIVISEKGASSPLITVFTDDKGAYSVGPLHSDLEYTVTSQKEGYVLTAVEGTIGDFKAYALAGVSFEIKAEDDQPLPGVLLSLSGGLFRSNLLTQDNGILTFSNLSPGQYYFKPMMKEFRFEPSSQMIEVQEGQNLKITITGYRTAYSCYGTVSSLNGEPEQGVAMEAVGQNDCSIYGEDTVTDEEGKFRLRGLLPGCVYHVQLKAEGNDHIERALPHHRVIEVGNNDIDDVNIIVFRQINQFDLSGNVITSSEYLPTLWVKLYKSENLDNPIQTVSLGQSLFFHFPPLLRDGENYVVLLDSTLPRSQYDYILPQVSFTAVGYHKHITLIFNPTRKLPEQDIAQGSYIALPLTLLVLLAGYNHDKLIPLLLQLTSRLQGVGALGQAASDNSGPEDAKRQAKKQKTRRTLRLQEEFQLMWCLVPWRGTLGIHLFSSLPFASEILLETTATCIHY

SEQ ID NO: 12421 - protein, 1104 aa, Artificial Sequence; identical to SEQ ID NO: 12420
  Synthetic polypeptide

SEQ ID NO: 12422 - protein, 11 aa, Artificial Sequence
  Synthetic polypeptide
STPLGTQFAFF

SEQ ID NO: 12423 - protein, 11 aa, Artificial Sequence
  Synthetic polypeptide
APLLAHSLHFL

SEQ ID NO: 12424 - protein, 32 aa, Artificial Sequence
  Synthetic polypeptide
KCFIVLTTSAGIMDHEEARRKHTGGKILGFFF

SEQ ID NO: 12425 - protein, 32 aa, Artificial Sequence; identical to SEQ ID NO: 12424
  Synthetic polypeptide

SEQ ID NO: 12426 - protein, 32 aa, Artificial Sequence; identical to SEQ ID NO: 12424
  Synthetic polypeptide

SEQ ID NO: 12427 - protein, 32 aa, Artificial Sequence; identical to SEQ ID NO: 12424
  Synthetic polypeptide

SEQ ID NO: 12428 - protein, 32 aa, Artificial Sequence
  Synthetic polypeptide
SEFKPLFFCFKAMRSWASHSLDFFIRKSVSLY

SEQ ID NO: 12429 - protein, 32 aa, Artificial Sequence; identical to SEQ ID NO: 12428
  Synthetic polypeptide

SEQ ID NO: 12430 - protein, 32 aa, Artificial Sequence; identical to SEQ ID NO: 12428
  Synthetic polypeptide

SEQ ID NO: 12431 - protein, 32 aa, Artificial Sequence; identical to SEQ ID NO: 12428
  Synthetic polypeptide

SEQ ID NO: 12432 - protein, 32 aa, Artificial Sequence; identical to SEQ ID NO: 12428
  Synthetic polypeptide

SEQ ID NO: 12433 - protein, 28 aa, Artificial Sequence
  Synthetic polypeptide
DLGQVTALISSSVKVFHCTDNLSWHHGP

SEQ ID NO: 12434 - protein, 28 aa, Artificial Sequence
  Synthetic polypeptide
DLGQVTALISSSVKVFHCTDNLSWHHGP

SEQ ID NO: 12435 - protein, 28 aa, Artificial Sequence
  Synthetic polypeptide
DLGQVTALISSSVKVFHCTDNLSWHHGP

SEQ ID NO: 12436 - protein, 28 aa, Artificial Sequence
  Synthetic polypeptide
DLGQVTALISSSVKVFHCTDNLSWHHGP

SEQ ID NO: 12437 - protein, 6 aa, Artificial Sequence
  Synthetic polypeptide
KCFIVL

SEQ ID NO: 12438 - protein, 19 aa, Artificial Sequence
  Synthetic polypeptide
DLGQVTALISSSVKVFHCT

SEQ ID NO: 12439 - protein, 26 aa, Artificial Sequence
  Synthetic polypeptide
HFGWPRWEDCLSPGVQDQPWQHETSF

SEQ ID NO: 12440 - protein, 26 aa, Artificial Sequence
  Synthetic polypeptide
HFGWPRWEDCLSPGVQDQPWQHETSF

SEQ ID NO: 12441 - protein, 26 aa, Artificial Sequence
  Synthetic polypeptide
HFGWPRWEDCLSPGVQDQPWQHETSF

SEQ ID NO: 12442 - protein, 26 aa, Artificial Sequence
  Synthetic polypeptide
HFGWPRWEDCLSPGVQDQPWQHETSF

SEQ ID NO: 12443 - protein, 26 aa, Artificial Sequence
  Synthetic polypeptide
HFGWPRWEDCLSPGVQDQPWQHETSF

SEQ ID NO: 12444 - protein, 26 aa, Artificial Sequence
  Synthetic polypeptide
HFGWPRWEDCLSPGVQDQPWQHETSF

SEQ ID NO: 12445 - protein, 26 aa, Artificial Sequence
  Synthetic polypeptide
HFGWPRWEDCLSPGVQDQPWQHETSF

SEQ ID NO: 12446 - protein, 35 aa, Artificial Sequence
  Synthetic polypeptide
AQEFKTSLGNMKHLFENINHWHSLLLLAQHRGPVW

SEQ ID NO: 12447 - protein, 35 aa, Artificial Sequence; identical to SEQ ID NO: 12446
  Synthetic polypeptide

SEQ ID NO: 12448 - protein, 35 aa, Artificial Sequence; identical to SEQ ID NO: 12446
  Synthetic polypeptide

SEQ ID NO: 12449 - protein, 35 aa, Artificial Sequence; identical to SEQ ID NO: 12446
  Synthetic polypeptide

SEQ ID NO: 12450 - protein, 35 aa, Artificial Sequence; identical to SEQ ID NO: 12446
  Synthetic polypeptide

SEQ ID NO: 12451 - protein, 35 aa, Artificial Sequence; identical to SEQ ID NO: 12446
  Synthetic polypeptide

SEQ ID NO: 12452 - protein, 35 aa, Artificial Sequence; identical to SEQ ID NO: 12446
  Synthetic polypeptide

SEQ ID NO: 12453 - protein, 153 aa, Artificial Sequence
  Synthetic polypeptide
EETDTDLEVVLEKKGNMDEAHIDQVRRKALQEEIDRESGKTEASETRKWTGTQFGQWDTAGFENEDQKLKFLRLMGGFKNLSPSFSRPASTIARPNMALGKKAADSLQQNLQRDYDRAMSWKYSRGAGLGFSTAPNKIFYIDRNASKSVKLED

SEQ ID NO: 12454 - protein, 408 aa, Artificial Sequence
  Synthetic polypeptide
WFSSRMFVASERKMRAHQVLTFLLLFVITSVASENASTSRGCGLDLLPQYVSLCDLDAIWGIVVEAVAGAGALITLLLMLILLVRLPFIKEKEKKSPVGLHFLFLLGTLGLFGLTFAFIIQEDETICSVRRFLWGVLFALCFSCLLSQAWRVRRLVRHGTGPAGWQLVGLALCLMLVQVIIAVEWLVLTVLRDTRPACAYEPMDFVMALIYDMVLLVVTLGLALFTLCGKFKRWKLNGAFLLITAFLSVLIWVAWMTMYLFGNVKLQQGDAWNDPTLAITLAASGWVFVIFHAIPEIHCTLLPALQENTPNYFDTSQPRMRETAFEEDVQLPRAYMENKAFSMDEHNAALRTAGFPNGSLGKRPSGSLGKRPSAPFRSNVYQPTEMAVVLNGGTIPTAPPSHTGRHLW

SEQ ID NO: 12455 - protein, 13 aa, Artificial Sequence
  Synthetic polypeptide
GSHPECSWHQRER

SEQ ID NO: 12456 - protein, 32 aa, Artificial Sequence
  Synthetic polypeptide
VLIQNVRGIREKDESSPGAHLPPALRDHLGGL

SEQ ID NO: 12457 - protein, 35 aa, Artificial Sequence
  Synthetic polypeptide
MQQKRLENVRGIREKDESSPGAHLPPALRDHLGGL

SEQ ID NO: 12458 - protein, 410 aa, Artificial Sequence
  Synthetic polypeptide
CSRNALRMFVASERKMRAHQVLTFLLLFVITSVASENASTSRGCGLDLLPQYVSLCDLDAIWGIVVEAVAGAGALITLLLMLILLVRLPFIKEKEKKSPVGLHFLFLLGTLGLFGLTFAFIIQEDETICSVRRFLWGVLFALCFSCLLSQAWRVRRLVRHGTGPAGWQLVGLALCLMLVQVIIAVEWLVLTVLRDTRPACAYEPMDFVMALIYDMVLLVVTLGLALFTLCGKFKRWKLNGAFLLITAFLSVLIWVAWMTMYLFGNVKLQQGDAWNDPTLAITLAASGWVFVIFHAIPEIHCTLLPALQENTPNYFDTSQPRMRETAFEEDVQLPRAYMENKAFSMDEHNAALRTAGFPNGSLGKRPSGSLGKRPSAPFRSNVYQPTEMAVVLNGGTIPTAPPSHTGRHLW

SEQ ID NO: 12459 - protein, 17 aa, Artificial Sequence
  Synthetic polypeptide
SSEPGMEPVLLKKSSPQ

SEQ ID NO: 12460 - protein, 17 aa, Artificial Sequence
  Synthetic polypeptide
SSEPGMEPVLLKKSSPQ

SEQ ID NO: 12461 - protein, 17 aa, Artificial Sequence
  Synthetic polypeptide
SSEPGMEPVLLKKSSPQ

SEQ ID NO: 12462 - protein, 17 aa, Artificial Sequence
  Synthetic polypeptide
SSEPGMEPVLLKKSSPQ

SEQ ID NO: 12463 - protein, 70 aa, Artificial Sequence
  Synthetic polypeptide
LQSLAWSLSCSRSQVRSEVPAIDLARVLDLGPITRRGAQSPGVMNGTPSTAGFLVAWPMVLLTVLLAWLF

SEQ ID NO: 12464 - protein, 70 aa, Artificial Sequence; identical to SEQ ID NO: 12463
  Synthetic polypeptide

SEQ ID NO: 12465 - protein, 70 aa, Artificial Sequence; identical to SEQ ID NO: 12463
  Synthetic polypeptide

SEQ ID NO: 12466 - protein, 70 aa, Artificial Sequence; identical to SEQ ID NO: 12463
  Synthetic polypeptide

SEQ ID NO: 12467 - protein, 23 aa, Artificial Sequence
  Synthetic polypeptide
FRAWHGACLAQEVKSAVKYRPST

SEQ ID NO: 12468 - protein, 23 aa, Artificial Sequence
  Synthetic polypeptide
FRAWHGACLAQEVKSAVKYRPST

SEQ ID NO: 12469 - protein, 23 aa, Artificial Sequence
  Synthetic polypeptide
FRAWHGACLAQEVKSAVKYRPST

SEQ ID NO: 12470 - protein, 23 aa, Artificial Sequence
  Synthetic polypeptide
FRAWHGACLAQEVKSAVKYRPST

SEQ ID NO: 12471 - protein, 34 aa, Artificial Sequence
  Synthetic polypeptide
QWFSTGGDAPQEDIWQCLETTLGHAGGIWLWKPH

SEQ ID NO: 12472 - protein, 34 aa, Artificial Sequence; identical to SEQ ID NO: 12471
  Synthetic polypeptide

SEQ ID NO: 12473 - protein, 34 aa, Artificial Sequence; identical to SEQ ID NO: 12471
  Synthetic polypeptide

SEQ ID NO: 12474 - protein, 531 aa, Artificial Sequence
  Synthetic polypeptide
SGSQLGAMPPKKTFGNAWRPLWGMLVGSGYGNPIEASSYGLDLDCGAPGTPEAHVCFDPCQNYTLLDEPFRSTENSAGSQGCDKNMSGWYRFVGEGGVRMSETCVQVHRCQTDAPMWLNGTHPALGDGITNHTACAHWSGNCCFWKTEVLVKACPGGYHVYRLEGTPWCNLRYCTDPSTVEDKCEKACRPEEECLALNSTWGCFCRQDLNSSDVHSLQPQLDCGPREIKVKVDKCLLGGLGLGEEVIAYLRDPNCSSILQTEERNWVSVTSPVQASACRNILERNQTHAIYKNTLSLVNDFIIRDTILNINFQCAYPLDMKVSLQAALQPIVSSLNVSVDGNGEFIVRMALFQDQNYTNPYEGDAVELSVESVLYVGAILEQGDTSRFNLVLRNCYATPTEDKADLVKYFIIRNSCSNQRDSTIHVEENGQSSESRFSVQMFMFAGHYDLVFLHCEIHLCDSLNEQCQPSCSRSQVRSEVPAIDLARVLDLGPITRRGAQSPGVMNGTPSTAGFLVAWPMVLLTVLLAWLF

SEQ ID NO: 12475 - protein, 85 aa, Artificial Sequence
  Synthetic polypeptide
VVLNWGRCPPRRHLAMPGDHFGACWWDLVMETPLKPVRMGWTWTAELLAPQRLMSVLTPVRITPSWMNPSEAQRTQQGPRGAIKT

SEQ ID NO: 12476 - protein, 85 aa, Artificial Sequence; identical to SEQ ID NO: 12475
  Synthetic polypeptide

SEQ ID NO: 12477 - protein, 85 aa, Artificial Sequence; identical to SEQ ID NO: 12475
  Synthetic polypeptide

SEQ ID NO: 12478 - protein, 534 aa, Artificial Sequence
  Synthetic polypeptide
SGSQLGAMPPKKTFGNAWRPLWGMLVGSGYGNPIEASSYGLDLDCGAPGTPEAHVCFDPCQNYTLLDEPFRSTENSAGSQGCDKNMSGWYRFVGEGGVRMSETCVQVHRCQTDAPMWLNGTHPALGDGITNHTACAHWSGNCCFWKTEVLVKACPGGYHVYRLEGTPWCNLRYCTVPRDPSTVEDKCEKACRPEEECLALNSTWGCFCRQDLNSSDVHSLQPQLDCGPREIKVKVDKCLLGGLGLGEEVIAYLRDPNCSSILQTEERNWVSVTSPVQASACRNILERNQTHAIYKNTLSLVNDFIIRDTILNINFQCAYPLDMKVSLQAALQPIVSSLNVSVDGNGEFIVRMALFQDQNYTNPYEGDAVELSVESVLYVGAILEQGDTSRFNLVLRNCYATPTEDKADLVKYFIIRNSCSNQRDSTIHVEENGQSSESRFSVQMFMFAGHYDLVFLHCEIHLCDSLNEQCQPSCSRSQVRSEVPAIDLARVLDLGPITRRGAQSPGVMNGTPSTAGFLVAWPMVLLTVLLAWLF

SEQ ID NO: 12479 - protein, 125 aa, Artificial Sequence
  Synthetic polypeptide
SGSQLGAMPPKKTFGNAWRPLWGMLVGSGYGNPIEASSYGLDLDCGAPGTPEAHVCFDPCQNYTLLDEPFRSTENSAGSQGCDKNMSGWYRFVGEGGVRMSETCVQVHRCQTDAPMWLNGTHPAL

SEQ ID NO: 12480 - protein, 77 aa, Artificial Sequence
  Synthetic polypeptide
TSDSRFFSFGTQTGSPCTSACRWPIVGPCDHAGKRLPSPALWWVNGKGKELMWNFRELSENSQQAANVLSGACGLQR

SEQ ID NO: 12481 - protein, 55 aa, Artificial Sequence
  Synthetic polypeptide
IFLPYWMLPALEHQTPGSSVLELKLALLAPQPADGLLWDLVIMLASDSQAQPCGG

SEQ ID NO: 12482 - protein, 55 aa, Artificial Sequence; identical to SEQ ID NO: 12481
  Synthetic polypeptide

SEQ ID NO: 12483 - protein, 55 aa, Artificial Sequence; identical to SEQ ID NO: 12481
  Synthetic polypeptide

SEQ ID NO: 12484 - protein, 55 aa, Artificial Sequence; identical to SEQ ID NO: 12481
  Synthetic polypeptide

SEQ ID NO: 12485 - protein, 55 aa, Artificial Sequence; identical to SEQ ID NO: 12481
  Synthetic polypeptide

SEQ ID NO: 12486 - protein, 55 aa, Artificial Sequence; identical to SEQ ID NO: 12481
  Synthetic polypeptide

SEQ ID NO: 12487 - protein, 55 aa, Artificial Sequence; identical to SEQ ID NO: 12481
  Synthetic polypeptide

SEQ ID NO: 12488 - protein, 55 aa, Artificial Sequence; identical to SEQ ID NO: 12481
  Synthetic polypeptide

SEQ ID NO: 12489 - protein, 29 aa, Artificial Sequence
  Synthetic polypeptide
SCWQATPKPSPVVGEWEGEGINVEFQRTE

SEQ ID NO: 12490 - protein, 29 aa, Artificial Sequence
  Synthetic polypeptide
SCWQATPKPSPVVGEWEGEGINVEFQRTE

SEQ ID NO: 12491 - protein, 29 aa, Artificial Sequence
  Synthetic polypeptide
SCWQATPKPSPVVGEWEGEGINVEFQRTE

SEQ ID NO: 12492 - protein, 29 aa, Artificial Sequence
  Synthetic polypeptide
SCWQATPKPSPVVGEWEGEGINVEFQRTE

SEQ ID NO: 12493 - protein, 29 aa, Artificial Sequence
  Synthetic polypeptide
SCWQATPKPSPVVGEWEGEGINVEFQRTE

SEQ ID NO: 12494 - protein, 29 aa, Artificial Sequence
  Synthetic polypeptide
SCWQATPKPSPVVGEWEGEGINVEFQRTE

SEQ ID NO: 12495 - protein, 29 aa, Artificial Sequence
  Synthetic polypeptide
SCWQATPKPSPVVGEWEGEGINVEFQRTE

SEQ ID NO: 12496 - protein, 29 aa, Artificial Sequence
  Synthetic polypeptide
SCWQATPKPSPVVGEWEGEGINVEFQRTE

SEQ ID NO: 12497 - protein, 180 aa, Artificial Sequence
  Synthetic polypeptide
TSDSRFFSFGTQTGSPCTSACRWPIVGPCDHAGKRLPSPALWWVNGKGKELMWNFRELSENSQQAANVLSGACGLQRGDRVAVVLPRVPEWWLVILGCIRAGLIFMPGTIQMKSTDILYRLQMSKAKAIVAGDEVIQEVDTVASECPSLRIKLLVSEKSCDGWLNFKKLLKYKVRHRDVK

SEQ ID NO: 12498 - protein, 180 aa, Artificial Sequence; identical to SEQ ID NO: 12497
  Synthetic polypeptide

SEQ ID NO: 12499 - protein, 549 aa, Artificial Sequence
  Synthetic polypeptide
TSDSRFFSFGTQTGSPCTSACRWPIVGPCDHAGKRLPSPALWWVNGKGKELMWNFRELSENSQQAANVLSGACGLQRGDRVAVVLPRVPEWWLVILGCIRAGLIFMPGTIQMKSTDILYRLQMSKAKAIVAGDEVIQEVDTVASECPSLRIKLLVSEKSCDGWLNFKKLLNEASTTHHCVETGSQEASAIYFTSGTSGLPKMAEHSYSSLGLKAKMDAGWTGLQASDIMWTISDTGWILNILCSLMEPWALGACTFVHLLPKFDPLVILKTLSSYPIKSMMGAPIVYRMLLQQDLSSYKFPHLQNCVTVGESLLPETLENWRAQTGLDIRESYGQTETGLTCMVSKTMKIKPGYMGTAASCYDVQIIDDKGNVLPPGTEGDIGIRVKPIRPIGIFSGYVDNPDKTAANIRGDFWLLGDRGIKDEDGYFQFMGRANDIINSSGYRIGPSEVENALMEHPAVVETAVISSPDPVRGEVVKAFVVLASQFLSHDPEQLTKELQQHVKSVTAPYKYPRKIEFVLNLPKTVTGKIQRAKLRDKEWKMSGKARAQ

SEQ ID NO: 12500 - protein, 549 aa, Artificial Sequence; identical to SEQ ID NO: 12499
  Synthetic polypeptide

SEQ ID NO: 12501 - protein, 549 aa, Artificial Sequence; identical to SEQ ID NO: 12499
  Synthetic polypeptide

SEQ ID NO: 12502 - protein, 549 aa, Artificial Sequence; identical to SEQ ID NO: 12499
  Synthetic polypeptide

SEQ ID NO: 12503 - protein, 90 aa, Artificial Sequence
  Synthetic polypeptide
TSDSRFFSFGTQTGSPCTSACRWPIVGPCDHAGKRLPSPALWWVNGKGKELMWNFRELSENSQQAANVLSGACGLQRGDRVAVVLPRVPE

SEQ ID NO: 12504 - protein, 36 aa, Artificial Sequence
  Synthetic polypeptide
LSTIPFVMSWQATPKPSPVVGEWEGEGINVEFQRTE

SEQ ID NO: 12505 - protein, 36 aa, Artificial Sequence; identical to SEQ ID NO: 12504
  Synthetic polypeptide

SEQ ID NO: 12506 - protein, 36 aa, Artificial Sequence; identical to SEQ ID NO: 12504
  Synthetic polypeptide

SEQ ID NO: 12507 - protein, 36 aa, Artificial Sequence; identical to SEQ ID NO: 12504
  Synthetic polypeptide

SEQ ID NO: 12508 - protein, 36 aa, Artificial Sequence; identical to SEQ ID NO: 12504
  Synthetic polypeptide

SEQ ID NO: 12509 - protein, 36 aa, Artificial Sequence; identical to SEQ ID NO: 12504
  Synthetic polypeptide

SEQ ID NO: 12510 - protein, 36 aa, Artificial Sequence; identical to SEQ ID NO: 12504
  Synthetic polypeptide

SEQ ID NO: 12511 - protein, 36 aa, Artificial Sequence; identical to SEQ ID NO: 12504
  Synthetic polypeptide

SEQ ID NO: 12512 - protein, 19 aa, Artificial Sequence
  Synthetic polypeptide
HHPLRYELASDSQAQPCGG

SEQ ID NO: 12513 - protein, 19 aa, Artificial Sequence
  Synthetic polypeptide
HHPLRYELASDSQAQPCGG

SEQ ID NO: 12514 - protein, 19 aa, Artificial Sequence
  Synthetic polypeptide
HHPLRYELASDSQAQPCGG

SEQ ID NO: 12515 - protein, 19 aa, Artificial Sequence
  Synthetic polypeptide
HHPLRYELASDSQAQPCGG

SEQ ID NO: 12516 - protein, 19 aa, Artificial Sequence
  Synthetic polypeptide
HHPLRYELASDSQAQPCGG

SEQ ID NO: 12517 - protein, 19 aa, Artificial Sequence
  Synthetic polypeptide
HHPLRYELASDSQAQPCGG

SEQ ID NO: 12518 - protein, 19 aa, Artificial Sequence
  Synthetic polypeptide
HHPLRYELASDSQAQPCGG

SEQ ID NO: 12519 - protein, 19 aa, Artificial Sequence
  Synthetic polypeptide
HHPLRYELASDSQAQPCGG

SEQ ID NO: 12520 - protein, 46 aa, Artificial Sequence
  Synthetic polypeptide
GPHQKQMPAPCFLYTLHNCWQATPKPSPVVGEWEGEGINVEFQRTE

SEQ ID NO: 12521 - protein, 46 aa, Artificial Sequence; identical to SEQ ID NO: 12520
  Synthetic polypeptide

SEQ ID NO: 12522 - protein, 46 aa, Artificial Sequence; identical to SEQ ID NO: 12520
  Synthetic polypeptide

SEQ ID NO: 12523 - protein, 46 aa, Artificial Sequence; identical to SEQ ID NO: 12520
  Synthetic polypeptide

SEQ ID NO: 12524 - protein, 46 aa, Artificial Sequence; identical to SEQ ID NO: 12520
  Synthetic polypeptide

SEQ ID NO: 12525 - protein, 46 aa, Artificial Sequence; identical to SEQ ID NO: 12520
  Synthetic polypeptide

SEQ ID NO: 12526 - protein, 46 aa, Artificial Sequence; identical to SEQ ID NO: 12520
  Synthetic polypeptide

SEQ ID NO: 12527 - protein, 46 aa, Artificial Sequence; identical to SEQ ID NO: 12520
  Synthetic polypeptide

SEQ ID NO: 12528 - protein, 80 aa, Artificial Sequence
  Synthetic polypeptide
CTCSPFTFFHGCNLPEALTRSRCQHHASCTPCITAGKRLPSPALWWVNGKGKELMWNFRELSENSQQAANVLSGACGLQR

SEQ ID NO: 12529 - protein, 183 aa, Artificial Sequence
  Synthetic polypeptide
CTCSPFTFFHGCNLPEALTRSRCQHHASCTPCITAGKRLPSPALWWVNGKGKELMWNFRELSENSQQAANVLSGACGLQRGDRVAVVLPRVPEWWLVILGCIRAGLIFMPGTIQMKSTDILYRLQMSKAKAIVAGDEVIQEVDTVASECPSLRIKLLVSEKSCDGWLNFKKLLKYKVRHRDVK

SEQ ID NO: 12530 - protein, 183 aa, Artificial Sequence; identical to SEQ ID NO: 12529
  Synthetic polypeptide

SEQ ID NO: 12531 - protein, 552 aa, Artificial Sequence
  Synthetic polypeptide
CTCSPFTFFHGCNLPEALTRSRCQHHASCTPCITAGKRLPSPALWWVNGKGKELMWNFRELSENSQQAANVLSGACGLQRGDRVAVVLPRVPEWWLVILGCIRAGLIFMPGTIQMKSTDILYRLQMSKAKAIVAGDEVIQEVDTVASECPSLRIKLLVSEKSCDGWLNFKKLLNEASTTHHCVETGSQEASAIYFTSGTSGLPKMAEHSYSSLGLKAKMDAGWTGLQASDIMWTISDTGWILNILCSLMEPWALGACTFVHLLPKFDPLVILKTLSSYPIKSMMGAPIVYRMLLQQDLSSYKFPHLQNCVTVGESLLPETLENWRAQTGLDIRESYGQTETGLTCMVSKTMKIKPGYMGTAASCYDVQIIDDKGNVLPPGTEGDIGIRVKPIRPIGIFSGYVDNPDKTAANIRGDFWLLGDRGIKDEDGYFQFMGRANDIINSSGYRIGPSEVENALMEHPAVVETAVISSPDPVRGEVVKAFVVLASQFLSHDPEQLTKELQQHVKSVTAPYKYPRKIEFVLNLPKTVTGKIQRAKLRDKEWKMSGKARAQ

SEQ ID NO: 12532 - protein, 552 aa, Artificial Sequence; identical to SEQ ID NO: 12531
  Synthetic polypeptide

SEQ ID NO: 12533 - protein, 552 aa, Artificial Sequence; identical to SEQ ID NO: 12531
  Synthetic polypeptide

SEQ ID NO: 12534 - protein, 552 aa, Artificial Sequence; identical to SEQ ID NO: 12531
  Synthetic polypeptide

SEQ ID NO: 12535 - protein, 93 aa, Artificial Sequence
  Synthetic polypeptide
CTCSPFTFFHGCNLPEALTRSRCQHHASCTPCITAGKRLPSPALWWVNGKGKELMWNFRELSENSQQAANVLSGACGLQRGDRVAVVLPRVPE

SEQ ID NO: 12536 - protein, 30 aa, Artificial Sequence
  Synthetic polypeptide
SKPGTENKYHVFALISGEGICDPGLAVPIP

SEQ ID NO: 12537 - protein, 30 aa, Artificial Sequence; identical to SEQ ID NO: 12536
  Synthetic polypeptide

SEQ ID NO: 12538 - protein, 30 aa, Artificial Sequence; identical to SEQ ID NO: 12536
  Synthetic polypeptide

SEQ ID NO: 12539 - protein, 30 aa, Artificial Sequence; identical to SEQ ID NO: 12536
  Synthetic polypeptide

SEQ ID NO: 12540 - protein, 9 aa, Artificial Sequence
  Synthetic polypeptide
ISRVCTHKW

SEQ ID NO: 12541 - protein, 9 aa, Artificial Sequence
  Synthetic polypeptide
ISRVCTHKW

SEQ ID NO: 12542 - protein, 9 aa, Artificial Sequence
  Synthetic polypeptide
ISRVCTHKW

SEQ ID NO: 12543 - protein, 9 aa, Artificial Sequence
  Synthetic polypeptide
ISRVCTHKW

SEQ ID NO: 12544 - protein, 3 aa, Artificial Sequence
  Synthetic polypeptide
LKW

SEQ ID NO: 12545 - protein, 3 aa, Artificial Sequence
  Synthetic polypeptide
LKW

SEQ ID NO: 12546 - protein, 3 aa, Artificial Sequence
  Synthetic polypeptide
LKW

SEQ ID NO: 12547 - protein, 3 aa, Artificial Sequence
  Synthetic polypeptide
LKW

SEQ ID NO: 12548 - protein, 159 aa, Artificial Sequence
  Synthetic polypeptide
SSNPTTGYLSKGKEISISKRCLHSHVNCSTIHNTKIWDQPKYPMDERINNMWYIYTMEYYLALKKSEIMSSAATWRELEVIMLTEVVKAFVILASQFLSHDPEQLTKELQQHVKSVTAPYKYPRKIEFVLNLPKTVTGKIQRTKLRDKEWKMSGKARAQ

SEQ ID NO: 12549 - protein, 159 aa, Artificial Sequence; identical to SEQ ID NO: 12548
  Synthetic polypeptide

SEQ ID NO: 12550 - protein, 159 aa, Artificial Sequence; identical to SEQ ID NO: 12548
  Synthetic polypeptide

SEQ ID NO: 12551 - protein, 159 aa, Artificial Sequence; identical to SEQ ID NO: 12548
  Synthetic polypeptide

SEQ ID NO: 12552 - protein, 55 aa, Artificial Sequence; identical to SEQ ID NO: 12481
  Synthetic polypeptide

SEQ ID NO: 12553 - protein, 55 aa, Artificial Sequence; identical to SEQ ID NO: 12481
  Synthetic polypeptide

SEQ ID NO: 12554 - protein, 55 aa, Artificial Sequence; identical to SEQ ID NO: 12481
  Synthetic polypeptide

SEQ ID NO: 12555 - protein, 55 aa, Artificial Sequence; identical to SEQ ID NO: 12481
  Synthetic polypeptide

SEQ ID NO: 12556 - protein, 55 aa, Artificial Sequence; identical to SEQ ID NO: 12481
  Synthetic polypeptide

SEQ ID NO: 12557 - protein, 55 aa, Artificial Sequence; identical to SEQ ID NO: 12481
  Synthetic polypeptide

SEQ ID NO: 12558 - protein, 55 aa, Artificial Sequence; identical to SEQ ID NO: 12481
  Synthetic polypeptide

SEQ ID NO: 12559 - protein, 29 aa, Artificial Sequence
  Synthetic polypeptide
SCWQATPKPSPVVGEWEGEGINVEFQRTE

SEQ ID NO: 12560 - protein, 29 aa, Artificial Sequence
  Synthetic polypeptide
SCWQATPKPSPVVGEWEGEGINVEFQRTE

SEQ ID NO: 12561 - protein, 29 aa, Artificial Sequence
  Synthetic polypeptide
SCWQATPKPSPVVGEWEGEGINVEFQRTE

SEQ ID NO: 12562 - protein, 29 aa, Artificial Sequence
  Synthetic polypeptide
SCWQATPKPSPVVGEWEGEGINVEFQRTE

SEQ ID NO: 12563 - protein, 29 aa, Artificial Sequence
  Synthetic polypeptide
SCWQATPKPSPVVGEWEGEGINVEFQRTE

SEQ ID NO: 12564 - protein, 29 aa, Artificial Sequence
  Synthetic polypeptide
SCWQATPKPSPVVGEWEGEGINVEFQRTE

SEQ ID NO: 12565 - protein, 29 aa, Artificial Sequence
  Synthetic polypeptide
SCWQATPKPSPVVGEWEGEGINVEFQRTE

SEQ ID NO: 12566 - protein, 549 aa, Artificial Sequence
  Synthetic polypeptide
TSDSRFFSFGTQTGSPCTSACRWPIVGPCDHAGKRLPSPALWWVNGKGKELMWNFRELSENSQQAANILSGACGLQRGDRVAVMLPRVPEWWLVILGCIRAGLIFMPGTIQMKSTDILYRLQMSKAKAIVAGDEVIQEVDTVASECPSLRIKLLVSEKSCDGWLNFKKLLNEASTTHHCVETGSQEASAIYFTSGTSGLPKMAEHSYSSLGLKAKMDAGWTGLQASDIMWTISDTGWILNILGSLLESWTLGACTFVHLLPKFDPLVILKTLSSYPIKSMMGAPIVYRMLLQQDLSSYKFPHLQNCLAGGESLLPETLENWRAQTGLDIREFYGQTETGLTCMVSKTMKIKPGYMGTAASCYDVQVIDDKGNVLPPGTEGDIGIRVKPIRPIGIFSGYVENPDKTAANIRGDFWLLGDRGIKDEDGYFQFMGRADDIINSSGYRIGPSEVENALMKHPAVVETAVISSPDPVRGEVVKAFVILASQFLSHDPEQLTKELQQHVKSVTAPYKYPRKIEFVLNLPKTVTGKIQRTKLRDKEWKMSGKARAQ

SEQ ID NO: 12567 - protein, 549 aa, Artificial Sequence; identical to SEQ ID NO: 12566
  Synthetic polypeptide

SEQ ID NO: 12568 - protein, 549 aa, Artificial Sequence; identical to SEQ ID NO: 12566
  Synthetic polypeptide

SEQ ID NO: 12569 - protein, 180 aa, Artificial Sequence
  Synthetic polypeptide
TSDSRFFSFGTQTGSPCTSACRWPIVGPCDHAGKRLPSPALWWVNGKGKELMWNFRELSENSQQAANILSGACGLQRGDRVAVMLPRVPEWWLVILGCIRAGLIFMPGTIQMKSTDILYRLQMSKAKAIVAGDEVIQEVDTVASECPSLRIKLLVSEKSCDGWLNFKKLLKYKVRHREVK

SEQ ID NO: 12570 - protein, 180 aa, Artificial Sequence; identical to SEQ ID NO: 12569
  Synthetic polypeptide

SEQ ID NO: 12571 - protein, 90 aa, Artificial Sequence
  Synthetic polypeptide
TSDSRFFSFGTQTGSPCTSACRWPIVGPCDHAGKRLPSPALWWVNGKGKELMWNFRELSENSQQAANILSGACGLQRGDRVAVMLPRVPE

SEQ ID NO: 12572 - protein, 77 aa, Artificial Sequence
  Synthetic polypeptide
TSDSRFFSFGTQTGSPCTSACRWPIVGPCDHAGKRLPSPALWWVNGKGKELMWNFRELSENSQQAANILSGACGLQR

SEQ ID NO: 12573 - protein, 7 aa, Artificial Sequence
  Synthetic polypeptide
FLHFHLR

SEQ ID NO: 12574 - protein, 7 aa, Artificial Sequence
  Synthetic polypeptide
FLHFHLR

SEQ ID NO: 12575 - protein, 2661 aa, Artificial Sequence
  Synthetic polypeptide
GRSQDGRIGTAPVYSSQRERRRRRVISAFPSEVEVLSVVAQQILSIQQAIIRKLKTFIFEGTELSLNPTCAVFITMNPGYAGRAELPDNLKALFRTVAMMVPDYALIGEISLYSMGFLDSRSLAQKIVATYRLCSEQLSSQHHYDYGMRAVKSVLTAAGNLKLKYPEENESVLLLRALLDVNLAKFLAQDVPLFQGIISDLFPGVVLPKPDYEVFLKVLNDNIKKMKLQPVPWFIGKIIQIYEMMLVRHGYMIVGDPMGGKTSAYKVLAAALGDLHAANQMEEFAVEYKIINPKAITMGQLYGCFDQVSHEWMDGVLANAFREQASSLSDDRKWIIFDGPVDAIWIENMNTVLDDNKKLCLMSGEIIQMNSKMSLIFEPADLEQASPATVSRCGMIYMEPHQLGWKPLKDSYMDTLPSSLTKEHKELVNDMFMWLVQPCLEFGRLHCKFVVQTSPIHLAFSMMRLYSSLLDEIRAVEEEEMELGEGLSSQQIFLWLQGLFLFSLVWTVAGTINADSRKKFDVFFRNLIMGMDDNHPRPKSVKLTKNNIFPERGSIYDFYFIKQASGHWETWTQYITKEEEKVPAGAKVSELIIPTMETARQSFFLKTYLDHEIPMLFVGPTGTGKSAITNNFLLHLPKNTYLPNCINFSARTSANQTQDIIMSKLDRRRKGLFGPPIGKKAVVFVDDLNMPAKEVYGAQPPIELLRQWIDHGYWFDKKDTTRLDIVDMLLVTAMGPPGGGRNDITGRFTRHLNIISINAFEDDILTKIFSSIVDWHFGKGFDVMFLRYGKMLVQATKTIYRDAVENFLPTPSKSHYVFNLRDFSRVIQGVLLCPHTHLQDVEKCIRLWIHEVYRVFYDRLIDKEDRQVFFNMVKETTSNCFKQTIEKVLIHLSPTGKIVDDNIRSLFFGDYFKPESDQKIYDEITDLKQLTVVMEHYLEEFNNISKAPMSLVMFRFAIEHISRICRVLKQDKGHLLLVGIGGSGRQSAAKLSTFMNAYELYQIEITKNYAGNDWREDLKKIILQVGVATKSTVFLFADNQIKDESFVEDINMLLNTGDVPNIFPADEKADIVEKMQTAARTQGEKVEVTPLSMYNFFIERVINKISFSLAMSPIGDAFRNRLRMFPSLINCCTIDWFQSWPTDALELVANKFLEDVELDDNIRVEVVSMCKYFQESVKKLSLDYYNKLRRHNYVTPTSYLELILTFKTLLNSKRQEVAMMRNRYLTGLQKLDFAASQVAVMQRELTALQPQLILTSEETAKMMVKIEAETREADGKKLLVQADEKEANVAAAIAQGIKNECEGDLAEAMPALEAALAALDTLNPADISLVKSMQNPPGPVKLVMESICIMKGMKPERKPDPSGSGKMIEDYWGVSKKILGDLKFLESLKTYDKDNIPPLTMKRIRERFINHPEFQPAVIKNVSSACEGLCKWVRAMEVYDRVAKVVAPKRERLREAEGKLAAQMQKLNQKRAELKLVVDRLQALNDDFEEMNTKKKDLEENIEICSQKLVRAEKLISGLGGEKDRWTEAARQLGIRYTNLTGDVLLSSGTVAYLGAFTVDYRVQCQNQWLAECKDKVIPGFSDFSLSHTLGDPIKIRAWQIAGLPVDSFSIDNGIIVSNSRRWALMIDPHGQANKWIKNMEKANKLAVIKFSDSNYMRMLENALQLGTPVLIENIGEELDASIEPILLKATFKQQGVEYMRLGENIIEYSRDFKLYITTRLRNPHYLPEVAVKVCLLNFMITPLGLQDQLLGIVAAKEKPELEEKKNQLIVESAKNKKHLKEIEDKILEVLSMSKGNILEDETAIKVLSSSKVLSEEISEKQKVASMTETQIDETRMGYKPVAVHSATIFFCISDLANIEPMYQYSLTWFINLYMHSLTHSTKSEELNLRIKYIIDHFTLSIYNNVCRSLFEKDKLLFSLLLTIGIMKQKKEITEEVWYFLLTGGIALDNPYPNPAPQWLSEKAWAEIVRASALPKLHGLMEHLEQNLGEWKLIYDSAWPHEEQLPGSWKFSQGLEKMVILRCLRPDKMVPAVREFIAEHMGKLYIEAPTFDLQGSYNDSSCCAPLIFVLSPSADPMAGLLKFADDLGMGGTRTQTISLGQGQGPIAAKMINNAIKDGTWVVLQNCHLAASWMPTLEKICEEVIVPESTNARFRLWLTSYPSEKFPVSILQNGIKMTNEPPKGLRANLLRSYLNDPISDPVFFQSCAKAVMWQKMLFGLCFFHAVVQERRNFGPLGWNIPYEFNESDLRISMWQIQMFLNDYKEVPFDALTYLTGECNYGGRVTDDKDRRLLLSLLSMFYCKEIEEDYYSLAPGDTYYIPPHGSYQSYIDYLRNLPITAHPEVFGLHENADITKDNQETNQLFEGVLLTLPRQSGGSGKSPQEVVEELAQDILSKLPRDFDLEEVMKLYPVVYEESMNTVLRQELIRFNRLTKVVRRSLINLGRAIKGQVLMSSELEEVFNSMLVGKVPAMWAAKSYPSLKPLGGYVADLLARLTFFQEWIDKGPPVVFWISGFYFTQSFLTGVSQNYARKYTIPIDHIGFEFEVTPQETVMENNPEDGAYIKGLFLEGARWDRKTMQIGESLPKILYDPLPIIWLKPGESAMFLHQDIYVCPVYKTSARRGTLSTTGHSTNYVLSIELPTDMPQKHWINRGVASLCQLDN

SEQ ID NO: 12576 - protein, 432 aa, Artificial Sequence
  Synthetic polypeptide
GRSQDGRIGTAPVYSSQRERRRRRVISAFPSEVEVLSVVAQQILSIQQAIIRKLKTFIFEGTELSLNPTCAVFITMNPGYAGRAELPDNLKALFRTVAMMVPDYALIGEISLYSMGFLDSRSLAQKIVATYRLCSEQLSSQHHYDYGMRAVKSVLTAAGNLKLKYPEENESVLLLRALLDVNLAKFLAQDVPLFQGIISDLFPGVVLPKPDYEVFLKVLNDNIKKMKLQPVPWFIGKIIQIYEMMLVRHGYMIVGDPMGGKTSAYKVLAAALGDLHAANQMEEFAVEYKIINPKAITMGQLYGCFDQVSHEWMDGVLANAFREQASSLSDDRKWIIFDGPVDAIWIENMNTVLDDNKKLCLMSGEIIQMNSKMSLIFEPADLEQASPATVSRCGMIYMEPHQLGWKPLKDSYMDTLPSSLTKEHKELMKSGQ

SEQ ID NO: 12577 - protein, 20 aa, Artificial Sequence
  Synthetic polypeptide
GVRNQSGHHEILFPQSCPQS

SEQ ID NO: 12578 - protein, 20 aa, Artificial Sequence
  Synthetic polypeptide
GVRNQSGHHEILFPQSCPQS

SEQ ID NO: 12579 - protein, 20 aa, Artificial Sequence
  Synthetic polypeptide
GVRNQSGHHEILFPQSCPQS

SEQ ID NO: 12580 - protein, 20 aa, Artificial Sequence
  Synthetic polypeptide
GVRNQSGHHEILFPQSCPQS

SEQ ID NO: 12581 - protein, 20 aa, Artificial Sequence
  Synthetic polypeptide
GVRNQSGHHEILFPQSCPQS

SEQ ID NO: 12582 - protein, 453 aa, Artificial Sequence
  Synthetic polypeptide
DEEFETSLAIMRFYSLKVAPKVKATAAPAGAPPQPQDLEFTKLPNGLVIASLENYSPVSRIGLFIKAGSRYEDFSNLGTTHLLRLTSSLTTKGASSFKITRGIEAVGGKLSVTATRENMAYTVECLRGDVDILMEFLLNVTTAPEFRRWEVADLQPQLKIDKAVAFQNPQTHVIENLHAAAYRNALANPLYCPDYRIGKVTSEELHYFVQNHFTSARMALIGLGVSHPVLKQVAEQFLNMRGGLGLSGAKANYRGGEIREQNGDSLVHAAFVAESAVAGSAEANAFSVLQHVLGAGPHVKRGSNTTSHLHQAVAKATQQPFDVSAFNASYSDSGLFGIYTISQATAAGDVIKAAYNQVKTIAQGNLSNTDVQAAKNKLKAGYLMSVESSECFLEEVGSQALVAGSYMPPSTVLQQIDSVANADIINAAKKFVSGQKSMAASGNLGHTPFVDEL

SEQ ID NO: 12583 - protein, 132 aa, Artificial Sequence
  Synthetic polypeptide
DEEFETSLAIMRFYSLKVAPKVKATAAPAGAPPQPQDLEFTKLPNGLVIASLENYSPVSRIGLFIKAGSRYEDFSNLGTTHLLRLTSSLTTKGASSFKITRGIEAVGGKLSVHSIFNQEQILSQETTLFAHP

SEQ ID NO: 12584 - protein, 412 aa, Artificial Sequence
  Synthetic polypeptide
DEEFETSLAIMRFYSLKVAPKVKATAAPAGAPPQPQDLEFTKLPNGLVIASLENYSPVSRIGLFIKAGSRYEDFSNLGTTHLLRLTSSLTTKGASSFKITRGIEAVGGKLSVTATRENMAYTVECLRGDVDILMEFLLNVTTAPEFRRWEVADLQPQLKIDKAVAFQNPQTHVIENLHAAAYRNALANPLYCPDYRIGKVTSEELHYFVQNHFTSARMALIGLGVSHPVLKQVAEQFLNMRGGLGLSGAKANYRGGEIREQNGDSLVHAAFVAESAVAGSAEANAFSVLQHVLGAGPHVKRGSNTTSHLHQAVAKATQQPFDVSAFNASYSDSGLFGIYTISQATAAGDVIKAAYNQVKTIAQGNLSNTDVQAAKRQRSLFLARSQWQQVEIWDIHLLLMSCNTDAHITGES

SEQ ID NO: 12585 - protein, 336 aa, Artificial Sequence
  Synthetic polypeptide
DEEFETSLAIMRFYSLKVAPKVKATAAPAGAPPQPQDLEFTKLPNGLVIASLENYSPVSRIGLFIKAGSRYEDFSNLGTTHLLRLTSSLTTKGASSFKITRGIEAVGGKLSVTATRENMAYTVECLRGDVDILMEFLLNVTTAPEFRRWEVADLQPQLKIDKAVAFQNPQTHVIENLHAAAYRNALANPLYCPDYRIGKVTSEELHYFVQNHFTSARMALIGLGVSHPVLKQVAEQFLNMRGGLGLSGAKANYRGGEIREQNGDSLVHAAFVAESAVAGSAEANAFSVLQHVLGAGPHVKRGSNTTSHLHQAVAKATQQPFDEQAESWIPNVSGVF

SEQ ID NO: 12586 - protein, 116 aa, Artificial Sequence
  Synthetic polypeptide
DEEFETSLAIMRFYSLKVAPKVKATAAPAGAPPQPQDLEFTKLPNGLVIASLENYSPVSRIGLFIKAGSRYEDFSNLGTTHLLRLTSSLTTKGASSFKITRGIEAVGGKLREMGKV

SEQ ID NO: 12587 - protein, 31 aa, Artificial Sequence
  Synthetic polypeptide
GGAAAPGRPRADQNGNDLRTRLFSRHHHHKS

SEQ ID NO: 12588 - protein, 31 aa, Artificial Sequence; identical to SEQ ID NO: 12587
  Synthetic polypeptide

SEQ ID NO: 12589 - protein, 31 aa, Artificial Sequence; identical to SEQ ID NO: 12587
  Synthetic polypeptide

SEQ ID NO: 12590 - protein, 654 aa, Artificial Sequence
  Synthetic polypeptide
AALPLPGGRGRTRMETTFGPAFSAVTTITKADGTSTYKQHCRTPSSSSTLAYSPRDEEDSMPPISTPRRSDSAISVRSLHSESSMSLRSTFSLPEEEEEPEPLVFAEQPSVKLCCQLCCSVFKDPVITTCGHTFCRRCALKSEKCPVDNVKLTVVVNNIAVAEQIGELFIHCRHGCRVAGSGKPPIFEVDPRGCPFTIKLSARKDHEGSCDYRPVRCPNNPSCPPLLRMNLEAHLKECEHIKCPHSKYGCTFIGNQDTYETHLETCRFEGLKEFLQQTDDRFHEMHVALAQKDQEIAFLRSMLGKLSEKIDQLEKSLELKFDVLDENQSKLSEDLMEFRRDASMLNDELSHINARLNMGILGSYDPQQIFKCKGTFVGHQGPVWCLCVYSMGDLLFSGSSDKTIKVWDTCTTYKCQKTLEGHDGIVLALCIQGCKLYSGSADCTIIVWDIQNLQKVNTIRAHDNPVCTLVSSHNVLFSGSLKAIKVWDIVGTELKLKKELTGLNHWVRALVAAQSYLYSGSYQTIKIWDIRTLDCIHVLQTSGGSVYSIAVTNHHIVCGTYENLIHVWDIESKEQVRTLTGHVGTVYALAVISTPDQTKVFSASYDRSLRVWSMDNMICTQTLLRHQGSVTALAVSRGRLFSGAVDSTVKVWTC

SEQ ID NO: 12591 - protein, 110 aa, Artificial Sequence
  Synthetic polypeptide
RRCRSRAAAGGPEWKRPSDPPFQPSPPSQKLTGPAPTSSTAGHPPPPAPLPTPRGTRRTACPPSALPAAPTPPSLSAPCTQSPACLCAPHSHCPRRRRSRSHWCLRSSPR

SEQ ID NO: 12592 - protein, 110 aa, Artificial Sequence; identical to SEQ ID NO: 12591
  Synthetic polypeptide

SEQ ID NO: 12593 - protein, 31 aa, Artificial Sequence
  Synthetic polypeptide
AALPLPGGRGRTRMETTFGPAFSAVTTITKA

SEQ ID NO: 12594 - protein, 31 aa, Artificial Sequence
  Synthetic polypeptide
RRCRSRAAAGGPEWKRPSDPPFQPSPPSQKL

SEQ ID NO: 12595 - protein, 131 aa, Artificial Sequence
  Synthetic polypeptide
AALPLPGGRGRTRMETTFGPAFSAVTTITKADGTSTYKQHCRTPSSSSTLAYSPRDEEDSMPPISTPRRSDSAISVRSLHSESSMSLRSTFSLPEEEEEPEPLVFAEQPSVKLCCQLCCSVFKDPVITTCG

SEQ ID NO: 12596 - protein, 27 aa, Artificial Sequence
  Synthetic polypeptide
HSILSYDYMRVADSPTKLRHPQATIRD

SEQ ID NO: 12597 - protein, 1099 aa, Artificial Sequence
  Synthetic polypeptide
DILKPPSETDMMPEGPSFPVCSTFVQELFQAQYRSSLTCPHCQKQSNTFDPFLCISLPIPLPHTRPLYVTVVYQGKCSHCMRIGVAVPLSGTVARLREAVSMETKIPTDQIVLTEMYYDGFHRSFCDTDDLETVHESDCIFAFETPEIFRPEGILSQRGIHLNNNLNHLKFGLDYHRLSSPTQTAAKQGKMDSPTSRAGSDKIVLLVCNRACTGQQGKRFGLPFVLHLEKTIAWDLLQKEILEKMKYFLRPTVCIQVCPFSLRVVSVVGITYLLPQEEQPLCHPIVERALKSCGPGGTAHVKLVVEWDKETRDFLFVNTEDEYIPDAESVRLQRERHHQPQTCTLSQCFQLYTKEERLAPDDAWRCPHCKQLQQGSITLSLWTLPDVLIIHLKRFRQEGDRRMKLQNMVKFPLTGLDMTPHVVKRSQSSWSLPSHWSPWRRPYGLGRDPEDYIYDLYAVCNHHGTMQGGHYTAYCKNSVDGLWYCFDDSDVQQLSEDEVCTQTAYILFYQRRTAIPSWSANSSVAGSTSSSLCEHWVSRLPGSKPASVTSAASSRRTSLASLSESVEMTGERSEDDGGFSTRPFVRSVQRQSLSSRSSVTSPLAVNENCMRPSWSLSAKLQMRSNSPSRFSGDSPIHSSASTLEKIGEAADDKVSISCFGSLRNLSSSYQEPSDSHSRREHKAVGRAPLAVMEGVFKDESDTRRLNSSVVDTQSKHSAQGDRLPPLSGPFDNNNQIAYVDQSDSVDSSPVKEVKAPSHPGSLAKKPESTTKRSPSSKGTSEPEKSLRKGRPALASQESSLSSTSPSSPLPVKVSLKPSRSRSKADSSSRGSGRHSSPAPAQPKKESSPKSQDSVSSPSPQKQKSASALTYTASSTSAKKASGPATRSPFPPGKSRTSDHSLSREGSRQSLGSDRASATSTSKPNSPRVSQARAGEGRGAGKHVRSSSMASLRSPSTSIKSGLKRDSKSEDKGLSFFKSALRQKETRRSTDLGKTALLSKKAGGSSVKSVCKNTGDDEAERGHQPPASQQPNANTTGKEQLVTKDPASAKHSLLSARKSKSSQLDSGVPSSPGGRQSAEKSSKKLSSSMQTSARPSQKPQ

SEQ ID NO: 12598 - protein, 16 aa, Artificial Sequence
  Synthetic polypeptide
LSHQIETSSSHHQRLI

SEQ ID NO: 12599 - protein, 15 aa, Artificial Sequence
  Synthetic polypeptide
QDPTSKKSIPKSSIC

SEQ ID NO: 12600 - protein, 15 aa, Artificial Sequence
  Synthetic polypeptide
QDPTSKKSIPKSSIC

SEQ ID NO: 12601 - protein, 15 aa, Artificial Sequence
  Synthetic polypeptide
QDPTSKKSIPKSSIC

SEQ ID NO: 12602 - protein, 15 aa, Artificial Sequence
  Synthetic polypeptide
QDPTSKKSIPKSSIC

SEQ ID NO: 12603 - protein, 15 aa, Artificial Sequence
  Synthetic polypeptide
QDPTSKKSIPKSSIC

SEQ ID NO: 12604 - protein, 43 aa, Artificial Sequence
  Synthetic polypeptide
QHFERQRQKDPLRPGVGEQPGQHSKIPLLKKVFQNQAFAEGPG

SEQ ID NO: 12605 - protein, 43 aa, Artificial Sequence; identical to SEQ ID NO: 12604
  Synthetic polypeptide

SEQ ID NO: 12606 - protein, 43 aa, Artificial Sequence; identical to SEQ ID NO: 12604
  Synthetic polypeptide

SEQ ID NO: 12607 - protein, 43 aa, Artificial Sequence; identical to SEQ ID NO: 12604
  Synthetic polypeptide

SEQ ID NO: 12608 - protein, 43 aa, Artificial Sequence; identical to SEQ ID NO: 12604
  Synthetic polypeptide

SEQ ID NO: 12609 - protein, 538 aa, Artificial Sequence
  Synthetic polypeptide
KKYSKIKHLLKDLDELMEAVLERILAPELSHANATRNLNFSIWNHTPLVLIDERNPHHPMVLDLFGDNHNGLTSSSASEKICNAHGCKMAMRLCSLNRTQCTFRNFTSATQALTEWYILQATNIFAQVPQQELVEMSYPGEQMILACLFGAEPCNYRNFTSIFYPHYGNCYIFNWGMTEKALPSANPGTEFGLKLILDIGQEDYVPFLASTAGVRLMLHEQRSYPFIRDEGIYAMSGTETSIGVLVDKLQRMGEPYSPCTVNGSEVPVQNFYSDYNTTYSIQACLRSCFQDHMIRNCNCGHYLYPLPRGEKYCNNRDFPDWAHCYSDLQMSVAQRETCIGMCKESCNDTQYKMTISMADWPSEASEDWIFHVLSQERDQSTNITLSRKGIVKLNIYFQEFNYRTIEESAANNIVWLLSNLGGQFGFWMGGSVLCLIEFGEIIIDFVWITIIKLVALAKSLRQRRAQASYAGPPPTVAELVEAHTNFGFQPDTAPRSPNTGPYPSEQALPIPGTPPPNYDSLRLQPLDVIESDSEGDAI

SEQ ID NO: 12610 - protein, 538 aa, Artificial Sequence; identical to SEQ ID NO: 12609
  Synthetic polypeptide

SEQ ID NO: 12611 - protein, 194 aa, Artificial Sequence
  Synthetic polypeptide
KKYSKIKHLLKDLDELMEAVLERILAPELSHANATRNLNFSIWNHTPLVLIDERNPHHPMVLDLFGDNHNGLTSSSASEKICNAHGCKMAMRLCSLNRTQCTFRNFTSATQALTEWYILQATNIFAQVPQQELVEMSYPGEQMILACLFGAEPCNYRPEVDPGHRPGRLRPLPCVHGRGQADASRAEVIPLHQR

SEQ ID NO: 12612 - protein, 502 aa, Artificial Sequence
  Synthetic polypeptide
KKYSKIKHLLKDLDELMEAVLERILAPELSHANATRNLNFSIWNHTPLVLIDERNPHHPMVLDLFGDNHNGLTSSSASEKICNAHGCKMAMRLCSLNRTQCTFRNFTSATQALTEWYILQATNIFAQVPQQELVEMSYPGEQMILACLFGAEPCNYRNFTSIFYPHYGNCYIFNWGMTEKALPSANPGTEFGLKLILDIGQEDYVPFLASTAGVRLMLHEQRSYPFIRDEGIYAMSGTETSIGVLVACLRSCFQDHMIRNCNCGHYLYPLPRGEKYCNNRDFPDWAHCYSDLQMSVAQRETCIGMCKESCNDTQYKMTISMADWPSEASEDWIFHVLSQERDQSTNITLSRKGIVKLNIYFQEFNYRTIEESAANNIVWLLSNLGGQFGFWMGGSVLCLIEFGEIIIDFVWITIIKLVALAKSLRQRRAQASYAGPPPTVAELVEAHTNFGFQPDTAPRSPNTGPYPSEQALPIPGTPPPNYDSLRLQPLDVIESDSEGDAI

SEQ ID NO: 12613 - protein, 511 aa, Artificial Sequence
  Synthetic polypeptide
KKYSKIKHLLKDLDELMEAVLERILAPELSHANATRNLNFSIWNHTPLVLIDERNPHHPMVLDLFGDNHNGLTSSSASEKICNAHGCKMAMRLATNIFAQVPQQELVEMSYPGEQMILACLFGAEPCNYRNFTSIFYPHYGNCYIFNWGMTEKALPSANPGTEFGLKLILDIGQEDYVPFLASTAGVRLMLHEQRSYPFIRDEGIYAMSGTETSIGVLVDKLQRMGEPYSPCTVNGSEVPVQNFYSDYNTTYSIQACLRSCFQDHMIRNCNCGHYLYPLPRGEKYCNNRDFPDWAHCYSDLQMSVAQRETCIGMCKESCNDTQYKMTISMADWPSEASEDWIFHVLSQERDQSTNITLSRKGIVKLNIYFQEFNYRTIEESAANNIVWLLSNLGGQFGFWMGGSVLCLIEFGEIIIDFVWITIIKLVALAKSLRQRRAQASYAGPPPTVAELVEAHTNFGFQPDTAPRSPNTGPYPSEQALPIPGTPPPNYDSLRLQPLDVIESDSEGDAI

SEQ ID NO: 12614 - protein, 26 aa, Artificial Sequence
  Synthetic polypeptide
IPGGNRTCLNHLFLTSTVGIQCSRAD

SEQ ID NO: 12615 - protein, 26 aa, Artificial Sequence
  Synthetic polypeptide
IPGGNRTCLNHLFLTSTVGIQCSRAD

SEQ ID NO: 12616 - protein, 26 aa, Artificial Sequence
  Synthetic polypeptide
IPGGNRTCLNHLFLTSTVGIQCSRAD

SEQ ID NO: 12617 - protein, 69 aa, Artificial Sequence
  Synthetic polypeptide
VFSVRERTEKLPMGSIKNVVSEPIEGHEDYHMMAFQLGPTEASYYWVYWVPTQYVDAIKDTVLGKWQYF

SEQ ID NO: 12618 - protein, 69 aa, Artificial Sequence; identical to SEQ ID NO: 12617
  Synthetic polypeptide

SEQ ID NO: 12619 - protein, 69 aa, Artificial Sequence; identical to SEQ ID NO: 12617
  Synthetic polypeptide

SEQ ID NO: 12620 - protein, 54 aa, Artificial Sequence
  Synthetic polypeptide
SASFISPEHSLLSDLSVPLLDSWREPNMPKSPVSDQHCRYSVFESGLRNCPWAP

SEQ ID NO: 12621 - protein, 54 aa, Artificial Sequence; identical to SEQ ID NO: 12620
  Synthetic polypeptide

SEQ ID NO: 12622 - protein, 54 aa, Artificial Sequence; identical to SEQ ID NO: 12620
  Synthetic polypeptide

SEQ ID NO: 12623 - protein, 13 aa, Artificial Sequence
  Synthetic polypeptide
PARARSTESRSSW

SEQ ID NO: 12624 - protein, 13 aa, Artificial Sequence
  Synthetic polypeptide
PARARSTESRSSW

SEQ ID NO: 12625 - protein, 110 aa, Artificial Sequence
  Synthetic polypeptide
QPVPDRQNLEVPGRVTQLCRQYSDMPPLTLEGIQDRVLYVLKLYDKIDPEKLSVNSHFMKDLGLDSLDQVEIIMAMEDEFGFEIPDIDAEKLMCPQEIVDYIADKKDVYE

SEQ ID NO: 12626 - protein, 110 aa, Artificial Sequence; identical to SEQ ID NO: 12625
  Synthetic polypeptide

SEQ ID NO: 12627 - protein, 103 aa, Artificial Sequence
  Synthetic polypeptide
LRDVPGRVTQLCRQYSDMPPLTLEGIQDRVLYVLKLYDKIDPEKLSVNSHFMKDLGLDSLDQVEIIMAMEDEFGFEIPDIDAEKLMCPQEIVDYIADKKDVYE

SEQ ID NO: 12628 - protein, 103 aa, Artificial Sequence; identical to SEQ ID NO: 12627
  Synthetic polypeptide

SEQ ID NO: 12629 - protein, 34 aa, Artificial Sequence
  Synthetic polypeptide
GGQALPISGFCKADCGTFLVELHSCAASIATCLL

SEQ ID NO: 12630 - protein, 34 aa, Artificial Sequence; identical to SEQ ID NO: 12629
  Synthetic polypeptide

SEQ ID NO: 12631 - protein, 12 aa, Artificial Sequence
  Synthetic polypeptide
ADSARLTAGRSW

SEQ ID NO: 12632 - protein, 12 aa, Artificial Sequence
  Synthetic polypeptide
ADSARLTAGRSW

SEQ ID NO: 12633 - protein, 50 aa, Artificial Sequence
  Synthetic polypeptide
SPEPWWTLQPCGVPGSHADRRPQPGDAPPVLGLTAARGDARGCLGQGGES

SEQ ID NO: 12634 - protein, 50 aa, Artificial Sequence; identical to SEQ ID NO: 12633
  Synthetic polypeptide

SEQ ID NO: 12635 - protein, 192 aa, Artificial Sequence
  Synthetic polypeptide
WQAEEWPLKCPCPDPQNLGGHFNPAVSLAAMLIGGLNLVMLLPYWVSQLLGGMLGAALAKAVSPEERFWNASGAAFVTVQEQGQVAGALVAEIILTTLLALAVCMGAINEKTKGPLAPFSIGFAVTVDILAGGPVSGGCMNPARAFGPAVVANHWNFHWIYWLGPLLAGLLVGLLIRCFIGDGKTRLILKAR

SEQ ID NO: 12636 - protein, 192 aa, Artificial Sequence; identical to SEQ ID NO: 12635
  Synthetic polypeptide

SEQ ID NO: 12637 - protein, 23 aa, Artificial Sequence
  Synthetic polypeptide
SVHVLIPRTLVDTSTLRCPWQPC

SEQ ID NO: 12638 - protein, 23 aa, Artificial Sequence
  Synthetic polypeptide
SVHVLIPRTLVDTSTLRCPWQPC

SEQ ID NO: 12639 - protein, 51 aa, Artificial Sequence
  Synthetic polypeptide
GGGGAEHARAQKGRRGRLRRKRRAEPWALPMAQPRAVPALRPCLSCGRSRS

SEQ ID NO: 12640 - protein, 51 aa, Artificial Sequence; identical to SEQ ID NO: 12639
  Synthetic polypeptide

SEQ ID NO: 12641 - protein, 51 aa, Artificial Sequence; identical to SEQ ID NO: 12639
  Synthetic polypeptide

SEQ ID NO: 12642 - protein, 61 aa, Artificial Sequence
  Synthetic polypeptide
GESGARSPGRCLWHSQERYRHCGHVCHAAGADHEVHHPSGHGWHHRHLRPGGGSPHRQLPE

SEQ ID NO: 12643 - protein, 61 aa, Artificial Sequence; identical to SEQ ID NO: 12642
  Synthetic polypeptide

SEQ ID NO: 12644 - protein, 61 aa, Artificial Sequence; identical to SEQ ID NO: 12642
  Synthetic polypeptide

SEQ ID NO: 12645 - protein, 79 aa, Artificial Sequence
  Synthetic polypeptide
RGRGRARACAERPARQAEEKAARGALGAAYGTAKSGTGIAAMSVMRPEQIMKSIIPVVMAGIIAIYGLVVAVLIANSLN

SEQ ID NO: 12646 - protein, 79 aa, Artificial Sequence; identical to SEQ ID NO: 12645
  Synthetic polypeptide

SEQ ID NO: 12647 - protein, 153 aa, Artificial Sequence
  Synthetic polypeptide
RGRGRARACAERPARQAEEKAARGALGAAYGTAKSGTGIAAMSVMRPEQIMKSIIPVVMAGIIAIYGLVVAVLIANSLNDDISLYKSFLQLGAGLSVGLSGLAAGFAIGIVGDAGVRGTAQQPRLFVGMILILIFAEVLGLYGLIVALILSTK

SEQ ID NO: 12648 - protein, 29 aa, Artificial Sequence
  Synthetic polypeptide
EAEPWALPMAQPRAVPALRPCLSCGRSRS

SEQ ID NO: 12649 - protein, 29 aa, Artificial Sequence
  Synthetic polypeptide
EAEPWALPMAQPRAVPALRPCLSCGRSRS

SEQ ID NO: 12650 - protein, 29 aa, Artificial Sequence
  Synthetic polypeptide
EAEPWALPMAQPRAVPALRPCLSCGRSRS

SEQ ID NO: 12651 - protein, 62 aa, Artificial Sequence
  Synthetic polypeptide
SQDFRRLSPGRCLWHSQERYRHCGHVCHAAGADHEVHHPSGHGWHHRHLRPGGGSPHRQLPE

SEQ ID NO: 12652 - protein, 62 aa, Artificial Sequence; identical to SEQ ID NO: 12651
  Synthetic polypeptide

SEQ ID NO: 12653 - protein, 62 aa, Artificial Sequence; identical to SEQ ID NO: 12651
  Synthetic polypeptide

SEQ ID NO: 12654 - protein, 52 aa, Artificial Sequence
  Synthetic polypeptide
AGGGRRPEGCGEPPGVRGAGRAGLAGPWALPMAQPRAVPALRPCLSCGRSRS

SEQ ID NO: 12655 - protein, 52 aa, Artificial Sequence; identical to SEQ ID NO: 12654
  Synthetic polypeptide

SEQ ID NO: 12656 - protein, 52 aa, Artificial Sequence; identical to SEQ ID NO: 12654
  Synthetic polypeptide

SEQ ID NO: 12657 - protein, 80 aa, Artificial Sequence
  Synthetic polypeptide
RAGVGAPRAAGSRRGSGAQGVRAWPGPGRCLWHSQERYRHCGHVCHAAGADHEVHHPSGHGWHHRHLRPGGGSPHRQLPE

SEQ ID NO: 12658 - protein, 80 aa, Artificial Sequence; identical to SEQ ID NO: 12657
  Synthetic polypeptide

SEQ ID NO: 12659 - protein, 80 aa, Artificial Sequence; identical to SEQ ID NO: 12657
  Synthetic polypeptide

SEQ ID NO: 12660 - protein, 80 aa, Artificial Sequence
  Synthetic polypeptide
GRGSAPRGLRGAAGGPGRRACGPGRALGAAYGTAKSGTGIAAMSVMRPEQIMKSIIPVVMAGIIAIYGLVVAVLIANSLN

SEQ ID NO: 12661 - protein, 80 aa, Artificial Sequence; identical to SEQ ID NO: 12660
  Synthetic polypeptide

SEQ ID NO: 12662 - protein, 154 aa, Artificial Sequence
  Synthetic polypeptide
GRGSAPRGLRGAAGGPGRRACGPGRALGAAYGTAKSGTGIAAMSVMRPEQIMKSIIPVVMAGIIAIYGLVVAVLIANSLNDDISLYKSFLQLGAGLSVGLSGLAAGFAIGIVGDAGVRGTAQQPRLFVGMILILIFAEVLGLYGLIVALILSTK

SEQ ID NO: 12663 - protein, 204 aa, Artificial Sequence
  Synthetic polypeptide
PVPRVLALSPCCYCQGSGLATIIFSRLCPQPPPCLPVSTPFSSTCSQRDLSKTHIWLLPSTPQILRDALWPAGQSPTSAGVACEALHQRALPALCSPPARPHTCPVLQPHPAPCSLRRAHAFGHAVPSAWNFLVRLVNSSFCKTPLKTAPSRRLPCPFPALPHVPQPPEANRLPQGLSVPQLLACGASPSLAPALTTGPAEQQQ

SEQ ID NO: 12664 - protein, 104 aa, Artificial Sequence
  Synthetic polypeptide
TPRSARLRSKQHLREDCPAPSLPCPMSRSPRKPIDSLRDSRSLSYSPVERRRPSPQPSPRDQQSSSSERGSRRGQRGDSRSPSHKRRRETPSPRPMRHRSSRSP

SEQ ID NO: 12665 - protein, 87 aa, Artificial Sequence
  Synthetic polypeptide
GSSPTGLARPVFSSCPPPHMPCAPATPSALQSKESPCLWTCCSFCLEFPCPPGELLVLQDSAQNSTFEKTALPLPCLAPCPAAPGSQ

SEQ ID NO: 12666 - protein, 17 aa, Artificial Sequence
  Synthetic polypeptide
EAKGTEHRKGTPTVTCV

SEQ ID NO: 12667 - protein, 17 aa, Artificial Sequence
  Synthetic polypeptide
EAKGTEHRKGTPTVTCV

SEQ ID NO: 12668 - protein, 17 aa, Artificial Sequence
  Synthetic polypeptide
EAKGTEHRKGTPTVTCV

SEQ ID NO: 12669 - protein, 17 aa, Artificial Sequence
  Synthetic polypeptide
EAKGTEHRKGTPTVTCV

SEQ ID NO: 12670 - protein, 17 aa, Artificial Sequence
  Synthetic polypeptide
EAKGTEHRKGTPTVTCV

SEQ ID NO: 12671 - protein, 17 aa, Artificial Sequence
  Synthetic polypeptide
EAKGTEHRKGTPTVTCV

SEQ ID NO: 12672 - protein, 17 aa, Artificial Sequence
  Synthetic polypeptide
EAKGTEHRKGTPTVTCV

SEQ ID NO: 12673 - protein, 17 aa, Artificial Sequence
  Synthetic polypeptide
EAKGTEHRKGTPTVTCV

SEQ ID NO: 12674 - protein, 952 aa, Artificial Sequence
  Synthetic polypeptide
CQHFRRQRGQSTGKGPPQSPVFEGVYNNSRMLHFLTAVVGSTCDVKVKNGTTYEGIFKTLSSKFELAVDAVHRKASEPAGGPRREDIVDTMVFKPSDVMLVHFRNVDFNYATKDKFTDSAIAMNSKVNGEHKEKVLQRWEGGDSNSDDYDLESDMSNGWDPNEMFKFNEENYGVKTTYDSSLSSYTVPLEKDNSEEFRQRELRAAQLAREIESSPQYRLRIAMENDDGRTEEEKHSAVQRQGSGRESPSLASREGKYIPLPQRVREGPRGGVRCSSSRGGRPGLSSLPPRGPHHLDNSSPGPGSEARGINGGPSRMSPKAQRPLRGAKTLSSPSNRPSGETSVPPPPAVGRMYPPRSPKSAAPAPISASCPEPPIGSAVPTSSASIPVTSSVSDPGVGSISPASPKISLAPTDVKELSTKEPGRTLEPQELARIAGKVPGLQNEQKRFQLEELRKFGAQFKLQPSSSPENSLDPFPPRILKEEPKGKEKEVDGLLTSEPMGSPVSSKTESVSDKEDKPPLAPSGGTEGPEQPPPPCPSQTGSPPVGLIKGEDKDEGPVAEQVKKSTLNPNAKEFNPTKPLLSVNKSTSTPTSPGPRTHSTPSIPVLTAGQSGLYSPQYISYIPQIHMGPAVQAPQMYPYPVSNSVPGQQGKYRGAKGSLPPQRSDQHQPASAPPMMQAAAAAGPPLVAATPYSSYIPYNPQQFPGQPAMMQPMAHYPSQPVFAPMLQSNPRMLTSGSHPQAIVSSSTPQYPSAEQPTPQALYATVHQSYPHHATQLHAHQPQPATTPTGSQPQSQHAAPSPVQHQAGQAPHLGSGQPQQNLYHPGALTGTPPSLPPGPSAQSPQSSFPQPAAVYAIHHQQLPHGFTNMAHVTQAHVQTGITAAPPPHPGAPHPPQVMLLHPPQSHGGPPQGAVPQSGVPALSASTPSPYPYIGHPQVQSHPSQQLPFHPPGN

SEQ ID NO: 12675 - protein, 53 aa, Artificial Sequence
  Synthetic polypeptide
PGAVAHACNASTLGGKGDRAQERDPHSHLCLKASTTIPECCISLQLLWAPLVM

SEQ ID NO: 12676 - protein, 53 aa, Artificial Sequence; identical to SEQ ID NO: 12675
  Synthetic polypeptide

SEQ ID NO: 12677 - protein, 53 aa, Artificial Sequence; identical to SEQ ID NO: 12675
  Synthetic polypeptide

SEQ ID NO: 12678 - protein, 53 aa, Artificial Sequence; identical to SEQ ID NO: 12675
  Synthetic polypeptide

SEQ ID NO: 12679 - protein, 53 aa, Artificial Sequence; identical to SEQ ID NO: 12675
  Synthetic polypeptide

SEQ ID NO: 12680 - protein, 53 aa, Artificial Sequence; identical to SEQ ID NO: 12675
  Synthetic polypeptide

SEQ ID NO: 12681 - protein, 53 aa, Artificial Sequence; identical to SEQ ID NO: 12675
  Synthetic polypeptide

SEQ ID NO: 12682 - protein, 53 aa, Artificial Sequence; identical to SEQ ID NO: 12675
  Synthetic polypeptide

SEQ ID NO: 12683 - protein, 970 aa, Artificial Sequence
  Synthetic polypeptide
CQHFRRQRGQSTGKGPPQSPVFEGVYNNSRMLHFLTAVVGSTCDVKVKNGTTYEGIFKTLSSKFELAVDAVHRKASEPAGGPRREDIVDTMVFKPSDVMLVHFRNVDFNYATKDKFTDSAIAMNSKVNGEHKEKVLQRWEGGDSNSDDYDLESDMSNGWDPNEMFKFNEENYGVKTTYDSSLSSYTVPLEKDNSEEFRQRELRAAQLAREIESSPQYRLRIAMENDDGRTEEEKHSAVQRQGSGRESPSLASREGKYIPLPQRVREGPRGGVRCSSSRGGRPGLSSLPPRGPHHLDNSSPGPGSEARGINGGPSRMSPKAQRPLRGAKTLSSPSNRPSGETSVPPPPAVGRMYPPRSPKSAAPAPISASCPEPPIGSAVPTSSASIPVTSSVSDPGVGSISPASPKISLAPTDVKELSTKEPGRTLEPQELARIAGKVPGLQNEQKRFQLEELRKFGAQFKLQPSSSPENSLDPFPPRILKEEPKGKEKEVDGLLTSEPMGSPVSSKTESVSDKEDKPPLAPSGGTEGPEQPPPPCPSQTGSPPVGLIKGEDKDEGPVAEQVKKSTLNPNAKEFNPTKPLLSVNKSTSTPTSPGPRTHSTPSIPVLTAGQSGLYSPQYISYIPQIHMGPAVQAPQMYPYPVSNSVPGQQGKYRGAKGSLPPQRSDQHQPASAPPMMQAAAAAGPPLVAATPYSSYIPYNPQQFPGQPAMMQPMAHYPSQPVFAPMLQSNPRMLTSGSHPQAIVSSSTPQYPSAEQPTPQALYATVHQSYPHHATQLHAHQPQPATTPTGSQPQSQHAAPSPVQHQAGQAPHLGSGQPQQNLYHPGALTGTPPSLPPGPSAQSPQSSFPQPAAVYAIHHQQLPHGFTNMAHVTQAHVQTGITAAPPPHPGAPHPPQVMLLHPPQSHGGPPQGAVPQSGVPALSASTPSPYPYIGHPQGEQPGQAPGFPGGADDRIPPLPPPGELKIVLAAT

SEQ ID NO: 12684 - protein, 983 aa, Artificial Sequence
  Synthetic polypeptide
CQHFRRQRGQSTGKGPPQSPVFEGVYNNSRMLHFLTAVVGSTCDVKVKNGTTYEGIFKTLSSKFELAVDAVHRKASEPAGGPRREDIVDTMVFKPSDVMLVHFRNVDFNYATKDKFTDSAIAMNSKVNGEHKEKVLQRWEGGDSNSDDYDLESDMSNGWDPNEMFKFNEENYGVKTTYDSSLSSYTVPLEKDNSEEFRQRELRAAQLAREIESSPQYRLRIAMENDDGRTEEEKHSAVQRQGSGRESPSLASREGKYIPLPQRVREGPRGGVRCSSSRGGRPGLSSLPPRGPHHLDNSSPGPGSEARGINGGPSRMSPKAQRPLRGAKTLSSPSNRPSGETSVPPPPAVGRMYPPRSPKSAAPAPISASCPEPPIGSAVPTSSASIPVTSSVSDPGVGSISPASPKISLAPTDVKELSTKEPGRTLEPQELARIAGKVPGLQNEQKRFQLEELRKFGAQFKLQPSSSPENSLDPFPPRILKEEPKGKEKEVDGLLTSEPMGSPVSSKTESVSDKEDKPPLAPSGGTEGPEQPPPPCPSQTGSPPVGLIKGEDKDEGPVAEQVKKSTLNPNAKEFNPTKPLLSVNKSTSTPTSPGPRTHSTPSIPVLTAGQSGLYSPQYISYIPQIHMGPAVQAPQMYPYPVSNSVPGQQGKYRGAKGSLPPQRSDQHQPASAPPMMQAAAAAGPPLVAATPYSSYIPYNPQQFPGQPAMMQPMAHYPSQPVFAPMLQSNPRMLTSGSHPQAIVSSSTPQYPSAEQPTPQALYATVHQSYPHHATQLHAHQPQPATTPTGSQPQSQHAAPSPVQHQAGQAPHLGSGQPQQNLYHPGALTGTPPSLPPGPSAQSPQSSFPQPAAVYAIHHQQLPHGFTNMAHVTQAHVQTGITAAPPPHPGAPHPPQVMLLHPPQSHGGPPQGAVPQSGVPALSASTPSPYPYIGHPQGEQPGQAPGFPGGADDRIREFSLAGGIWHGRAEGLQVGQDARVLGGE

SEQ ID NO: 12685 - protein, 952 aa, Artificial Sequence
  Synthetic polypeptide
CQHFRRQRGQSTGKGPPQSPVFEGVYNNSRMLHFLTAVVGSTCDVKVKNGTTYEGIFKTLSSKFELAVDAVHRKASEPAGGPRREDIVDTMVFKPSDVMLVHFRNVDFNYATKDKFTDSAIAMNSKVNGEHKEKVLQRWEGGDSNSDDYDLESDMSNGWDPNEMFKFNEENYGVKTTYDSSLSSYTVPLEKDNSEEFRQRELRAAQLAREIESSPQYRLRIAMENDDGRTEEEKHSAVQRQGSGRESPSLASREGKYIPLPQRVREGPRGGVRCSSSRGGRPGLSSLPPRGPHHLDNSSPGPGSEARGINGGPSRMSPKAQRPLRGAKTLSSPSNRPSGETSVPPPPAVGRMYPPRSPKSAAPAPISASCPEPPIGSAVPTSSASIPVTSSVSDPGVGSISPASPKISLAPTDVKELSTKEPGRTLEPQELARIAGKVPGLQNEQKRFQLEELRKFGAQFKLQPSSSPENSLDPFPPRILKEEPKGKEKEVDGLLTSEPMGSPVSSKTESVSDKEDKPPLAPSGGTEGPEQPPPPCPSQTGSPPVGLIKGEDKDEGPVAEQVKKSTLNPNAKEFNPTKPLLSVNKSTSTPTSPGPRTHSTPSIPVLTAGQSGLYSPQYISYIPQIHMGPAVQAPQMYPYPVSNSVPGQQGKYRGAKGSLPPQRSDQHQPASAPPMMQAAAAAGPPLVAATPYSSYIPYNPQQFPGQPAMMQPMAHYPSQPVFAPMLQSNPRMLTSGSHPQAIVSSSTPQYPSAEQPTPQALYATVHQSYPHHATQLHAHQPQPATTPTGSQPQSQHAAPSPVQHQAGQAPHLGSGQPQQNLYHPGALTGTPPSLPPGPSAQSPQSSFPQPAAVYAIHHQQLPHGFTNMAHVTQAHVQTGITAAPPPHPGAPHPPQVMLLHPPQSHGGPPQGAVPQSGVPALSASTPSPYPYIGHPQAPLPPPGELKIVLAAT

SEQ ID NO: 12686 - protein, 1005 aa, Artificial Sequence
  Synthetic polypeptide
CQHFRRQRGQSTGKGPPQSPVFEGVYNNSRMLHFLTAVVGSTCDVKVKNGTTYEGIFKTLSSKFELAVDAVHRKASEPAGGPRREDIVDTMVFKPSDVMLVHFRNVDFNYATKDKFTDSAIAMNSKVNGEHKEKVLQRWEGGDSNSDDYDLESDMSNGWDPNEMFKFNEENYGVKTTYDSSLSSYTVPLEKDNSEEFRQRELRAAQLAREIESSPQYRLRIAMENDDGRTEEEKHSAVQRQGSGRESPSLASREGKYIPLPQRVREGPRGGVRCSSSRGGRPGLSSLPPRGPHHLDNSSPGPGSEARGINGGPSRMSPKAQRPLRGAKTLSSPSNRPSGETSVPPPPAVGRMYPPRSPKSAAPAPISASCPEPPIGSAVPTSSASIPVTSSVSDPGVGSISPASPKISLAPTDVKELSTKEPGRTLEPQELARIAGKVPGLQNEQKRFQLEELRKFGAQFKLQPSSSPENSLDPFPPRILKEEPKGKEKEVDGLLTSEPMGSPVSSKTESVSDKEDKPPLAPSGGTEGPEQPPPPCPSQTGSPPVGLIKGEDKDEGPVAEQVKKSTLNPNAKEFNPTKPLLSVNKSTSTPTSPGPRTHSTPSIPVLTAGQSGLYSPQYISYIPQIHMGPAVQAPQMYPYPVSNSVPGQQGKYRGAKGSLPPQRSDQHQPASAPPMMQAAAAAGPPLVAATPYSSYIPYNPQQFPGQPAMMQPMAHYPSQPVFAPMLQSNPRMLTSGSHPQAIVSSSTPQYPSAEQPTPQALYATVHQSYPHHATQLHAHQPQPATTPTGSQPQSQHAAPSPVQHQAGQAPHLGSGQPQQNLYHPGALTGTPPSLPPGPSAQSPQSSFPQPAAVYAIHHQQLPHGFTNMAHVTQAHVQTGITAAPPPHPGAPHPPQVMLLHPPQSHGGPPQGAVPQSGVPALSASTPSPYPYIGHPQGEQPGQAPGFPGGADDRILCRVGRSHSRRRQGLAPGSVLCFPPSSLSCDPAAPLPTASPALSDPDCLLT

SEQ ID NO: 12687 - protein, 976 aa, Artificial Sequence
  Synthetic polypeptide
CQHFRRQRGQSTGKGPPQSPVFEGVYNNSRMLHFLTAVVGSTCDVKVKNGTTYEGIFKTLSSKFELAVDAVHRKASEPAGGPRREDIVDTMVFKPSDVMLVHFRNVDFNYATKDKFTDSAIAMNSKVNGEHKEKVLQRWEGGDSNSDDYDLESDMSNGWDPNEMFKFNEENYGVKTTYDSSLSSYTVPLEKDNSEEFRQRELRAAQLAREIESSPQYRLRIAMENDDGRTEEEKHSAVQRQGSGRESPSLASREGKYIPLPQRVREGPRGGVRCSSSRGGRPGLSSLPPRGPHHLDNSSPGPGSEARGINGGPSRMSPKAQRPLRGAKTLSSPSNRPSGETSVPPPPAAPPFLPVGRMYPPRSPKSAAPAPISASCPEPPIGSAVPTSSASIPVTSSVSDPGVGSISPASPKISLAPTDVKELSTKEPGRTLEPQELARIAGKVPGLQNEQKRFQLEELRKFGAQFKLQPSSSPENSLDPFPPRILKEEPKGKEKEVDGLLTSEPMGSPVSSKTESVSDKEDKPPLAPSGGTEGPEQPPPPCPSQTGSPPVGLIKGEDKDEGPVAEQVKKSTLNPNAKEFNPTKPLLSVNKSTSTPTSPGPRTHSTPSIPVLTAGQSGLYSPQYISYIPQIHMGPAVQAPQMYPYPVSNSVPGQQGKYRGAKGSLPPQRSDQHQPASAPPMMQAAAAAGPPLVAATPYSSYIPYNPQQFPGQPAMMQPMAHYPSQPVFAPMLQSNPRMLTSGSHPQAIVSSSTPQYPSAEQPTPQALYATVHQSYPHHATQLHAHQPQPATTPTGSQPQSQHAAPSPVQHQAGQAPHLGSGQPQQNLYHPGALTGTPPSLPPGPSAQSPQSSFPQPAAVYAIHHQQLPHGFTNMAHVTQAHVQTGITAAPPPHPGAPHPPQVMLLHPPQSHGGPPQGAVPQSGVPALSASTPSPYPYIGHPQGEQPGQAPGFPGGADDRILQSHPSQQLPFHPPGN

SEQ ID NO: 12688 - protein, 970 aa, Artificial Sequence
  Synthetic polypeptide
CQHFRRQRGQSTGKGPPQSPVFEGVYNNSRMLHFLTAVVGSTCDVKVKNGTTYEGIFKTLSSKFELAVDAVHRKASEPAGGPRREDIVDTMVFKPSDVMLVHFRNVDFNYATKDKFTDSAIAMNSKVNGEHKEKVLQRWEGGDSNSDDYDLESDMSNGWDPNEMFKFNEENYGVKTTYDSSLSSYTVPLEKDNSEEFRQRELRAAQLAREIESSPQYRLRIAMENDDGRTEEEKHSAVQRQGSGRESPSLASREGKYIPLPQRVREGPRGGVRCSSSRGGRPGLSSLPPRGPHHLDNSSPGPGSEARGINGGPSRMSPKAQRPLRGAKTLSSPSNRPSGETSVPPPPAVGRMYPPRSPKSAAPAPISASCPEPPIGSAVPTSSASIPVTSSVSDPGVGSISPASPKISLAPTDVKELSTKEPGRTLEPQELARIAGKVPGLQNEQKRFQLEELRKFGAQFKLQPSSSPENSLDPFPPRILKEEPKGKEKEVDGLLTSEPMGSPVSSKTESVSDKEDKPPLAPSGGTEGPEQPPPPCPSQTGSPPVGLIKGEDKDEGPVAEQVKKSTLNPNAKEFNPTKPLLSVNKSTSTPTSPGPRTHSTPSIPVLTAGQSGLYSPQYISYIPQIHMGPAVQAPQMYPYPVSNSVPGQQGKYRGAKGSLPPQRSDQHQPASAPPMMQAAAAAGPPLVAATPYSSYIPYNPQQFPGQPAMMQPMAHYPSQPVFAPMLQSNPRMLTSGSHPQAIVSSSTPQYPSAEQPTPQALYATVHQSYPHHATQLHAHQPQPATTPTGSQPQSQHAAPSPVQHQAGQAPHLGSGQPQQNLYHPGALTGTPPSLPPGPSAQSPQSSFPQPAAVYAIHHQQLPHGFTNMAHVTQAHVQTGITAAPPPHPGAPHPPQVMLLHPPQSHGGPPQGAVPQSGVPALSASTPSPYPYIGHPQGEQPGQAPGFPGGADDRILQSHPSQQLPFHPPGN

SEQ ID NO: 12689 - protein, 304 aa, Artificial Sequence
  Synthetic polypeptide
CQHFRRQRGQSTGKGPPQSPVFEGVYNNSRMLHFLTAVVGSTCDVKVKNGTTYEGIFKTLSSKFELAVDAVHRKASEPAGGPRREDIVDTMVFKPSDVMLVHFRNVDFNYATKDKFTDSAIAMNSKVNGEHKEKVLQRWEGGDSNSDDYDLESDMSNGWDPNEMFKFNEENYGVKTTYDSSLSSYTVPLEKDNSEEFRQRELRAAQLAREIESSPQYRLRIAMENDDGRTEEEKHSAVQRQGSGRESPSLASREGKYIPLPQRVREGPRGGVRCSSSRGGRPGLSSLPPRGPHHLDNSSPGPGS

SEQ ID NO: 12690 - protein, 26 aa, Artificial Sequence
  Synthetic polypeptide
SQLLRRLSPMDGTPMKCSSSMRRTTV

SEQ ID NO: 12691 - protein, 26 aa, Artificial Sequence
  Synthetic polypeptide
SQLLRRLSPMDGTPMKCSSSMRRTTV

SEQ ID NO: 12692 - protein, 26 aa, Artificial Sequence
  Synthetic polypeptide
SQLLRRLSPMDGTPMKCSSSMRRTTV

SEQ ID NO: 12693 - protein, 26 aa, Artificial Sequence
  Synthetic polypeptide
SQLLRRLSPMDGTPMKCSSSMRRTTV

SEQ ID NO: 12694 - protein, 26 aa, Artificial Sequence
  Synthetic polypeptide
SQLLRRLSPMDGTPMKCSSSMRRTTV

SEQ ID NO: 12695 - protein, 26 aa, Artificial Sequence
  Synthetic polypeptide
SQLLRRLSPMDGTPMKCSSSMRRTTV

SEQ ID NO: 12696 - protein, 26 aa, Artificial Sequence
  Synthetic polypeptide
SQLLRRLSPMDGTPMKCSSSMRRTTV

SEQ ID NO: 12697 - protein, 26 aa, Artificial Sequence
  Synthetic polypeptide
SQLLRRLSPMDGTPMKCSSSMRRTTV

SEQ ID NO: 12698 - protein, 820 aa, Artificial Sequence
  Synthetic polypeptide
KPLMNRAERGGPTPVVPATQEAESNGWDPNEMFKFNEENYGVKTTYDSSLSSYTVPLEKDNSEEFRQRELRAAQLAREIESSPQYRLRIAMENDDGRTEEEKHSAVQRQGSGRESPSLASREGKYIPLPQRVREGPRGGVRCSSSRGGRPGLSSLPPRGPHHLDNSSPGPGSEARGINGGPSRMSPKAQRPLRGAKTLSSPSNRPSGETSVPPPPAVGRMYPPRSPKSAAPAPISASCPEPPIGSAVPTSSASIPVTSSVSDPGVGSISPASPKISLAPTDVKELSTKEPGRTLEPQELARIAGKVPGLQNEQKRFQLEELRKFGAQFKLQPSSSPENSLDPFPPRILKEEPKGKEKEVDGLLTSEPMGSPVSSKTESVSDKEDKPPLAPSGGTEGPEQPPPPCPSQTGSPPVGLIKGEDKDEGPVAEQVKKSTLNPNAKEFNPTKPLLSVNKSTSTPTSPGPRTHSTPSIPVLTAGQSGLYSPQYISYIPQIHMGPAVQAPQMYPYPVSNSVPGQQGKYRGAKGSLPPQRSDQHQPASAPPMMQAAAAAGPPLVAATPYSSYIPYNPQQFPGQPAMMQPMAHYPSQPVFAPMLQSNPRMLTSGSHPQAIVSSSTPQYPSAEQPTPQALYATVHQSYPHHATQLHAHQPQPATTPTGSQPQSQHAAPSPVQHQAGQAPHLGSGQPQQNLYHPGALTGTPPSLPPGPSAQSPQSSFPQPAAVYAIHHQQLPHGFTNMAHVTQAHVQTGITAAPPPHPGAPHPPQVMLLHPPQSHGGPPQGAVPQSGVPALSASTPSPYPYIGHPQVQSHPSQQLPFHPPGN

SEQ ID NO: 12699 - protein, 838 aa, Artificial Sequence
  Synthetic polypeptide
KPLMNRAERGGPTPVVPATQEAESNGWDPNEMFKFNEENYGVKTTYDSSLSSYTVPLEKDNSEEFRQRELRAAQLAREIESSPQYRLRIAMENDDGRTEEEKHSAVQRQGSGRESPSLASREGKYIPLPQRVREGPRGGVRCSSSRGGRPGLSSLPPRGPHHLDNSSPGPGSEARGINGGPSRMSPKAQRPLRGAKTLSSPSNRPSGETSVPPPPAVGRMYPPRSPKSAAPAPISASCPEPPIGSAVPTSSASIPVTSSVSDPGVGSISPASPKISLAPTDVKELSTKEPGRTLEPQELARIAGKVPGLQNEQKRFQLEELRKFGAQFKLQPSSSPENSLDPFPPRILKEEPKGKEKEVDGLLTSEPMGSPVSSKTESVSDKEDKPPLAPSGGTEGPEQPPPPCPSQTGSPPVGLIKGEDKDEGPVAEQVKKSTLNPNAKEFNPTKPLLSVNKSTSTPTSPGPRTHSTPSIPVLTAGQSGLYSPQYISYIPQIHMGPAVQAPQMYPYPVSNSVPGQQGKYRGAKGSLPPQRSDQHQPASAPPMMQAAAAAGPPLVAATPYSSYIPYNPQQFPGQPAMMQPMAHYPSQPVFAPMLQSNPRMLTSGSHPQAIVSSSTPQYPSAEQPTPQALYATVHQSYPHHATQLHAHQPQPATTPTGSQPQSQHAAPSPVQHQAGQAPHLGSGQPQQNLYHPGALTGTPPSLPPGPSAQSPQSSFPQPAAVYAIHHQQLPHGFTNMAHVTQAHVQTGITAAPPPHPGAPHPPQVMLLHPPQSHGGPPQGAVPQSGVPALSASTPSPYPYIGHPQGEQPGQAPGFPGGADDRIPPLPPPGELKIVLAAT

SEQ ID NO: 12700 - protein, 851 aa, Artificial Sequence
  Synthetic polypeptide
KPLMNRAERGGPTPVVPATQEAESNGWDPNEMFKFNEENYGVKTTYDSSLSSYTVPLEKDNSEEFRQRELRAAQLAREIESSPQYRLRIAMENDDGRTEEEKHSAVQRQGSGRESPSLASREGKYIPLPQRVREGPRGGVRCSSSRGGRPGLSSLPPRGPHHLDNSSPGPGSEARGINGGPSRMSPKAQRPLRGAKTLSSPSNRPSGETSVPPPPAVGRMYPPRSPKSAAPAPISASCPEPPIGSAVPTSSASIPVTSSVSDPGVGSISPASPKISLAPTDVKELSTKEPGRTLEPQELARIAGKVPGLQNEQKRFQLEELRKFGAQFKLQPSSSPENSLDPFPPRILKEEPKGKEKEVDGLLTSEPMGSPVSSKTESVSDKEDKPPLAPSGGTEGPEQPPPPCPSQTGSPPVGLIKGEDKDEGPVAEQVKKSTLNPNAKEFNPTKPLLSVNKSTSTPTSPGPRTHSTPSIPVLTAGQSGLYSPQYISYIPQIHMGPAVQAPQMYPYPVSNSVPGQQGKYRGAKGSLPPQRSDQHQPASAPPMMQAAAAAGPPLVAATPYSSYIPYNPQQFPGQPAMMQPMAHYPSQPVFAPMLQSNPRMLTSGSHPQAIVSSSTPQYPSAEQPTPQALYATVHQSYPHHATQLHAHQPQPATTPTGSQPQSQHAAPSPVQHQAGQAPHLGSGQPQQNLYHPGALTGTPPSLPPGPSAQSPQSSFPQPAAVYAIHHQQLPHGFTNMAHVTQAHVQTGITAAPPPHPGAPHPPQVMLLHPPQSHGGPPQGAVPQSGVPALSASTPSPYPYIGHPQGEQPGQAPGFPGGADDRIREFSLAGGIWHGRAEGLQVGQDARVLGGE

SEQ ID NO: 12701 - protein, 820 aa, Artificial Sequence
  Synthetic polypeptide
KPLMNRAERGGPTPVVPATQEAESNGWDPNEMFKFNEENYGVKTTYDSSLSSYTVPLEKDNSEEFRQRELRAAQLAREIESSPQYRLRIAMENDDGRTEEEKHSAVQRQGSGRESPSLASREGKYIPLPQRVREGPRGGVRCSSSRGGRPGLSSLPPRGPHHLDNSSPGPGSEARGINGGPSRMSPKAQRPLRGAKTLSSPSNRPSGETSVPPPPAVGRMYPPRSPKSAAPAPISASCPEPPIGSAVPTSSASIPVTSSVSDPGVGSISPASPKISLAPTDVKELSTKEPGRTLEPQELARIAGKVPGLQNEQKRFQLEELRKFGAQFKLQPSSSPENSLDPFPPRILKEEPKGKEKEVDGLLTSEPMGSPVSSKTESVSDKEDKPPLAPSGGTEGPEQPPPPCPSQTGSPPVGLIKGEDKDEGPVAEQVKKSTLNPNAKEFNPTKPLLSVNKSTSTPTSPGPRTHSTPSIPVLTAGQSGLYSPQYISYIPQIHMGPAVQAPQMYPYPVSNSVPGQQGKYRGAKGSLPPQRSDQHQPASAPPMMQAAAAAGPPLVAATPYSSYIPYNPQQFPGQPAMMQPMAHYPSQPVFAPMLQSNPRMLTSGSHPQAIVSSSTPQYPSAEQPTPQALYATVHQSYPHHATQLHAHQPQPATTPTGSQPQSQHAAPSPVQHQAGQAPHLGSGQPQQNLYHPGALTGTPPSLPPGPSAQSPQSSFPQPAAVYAIHHQQLPHGFTNMAHVTQAHVQTGITAAPPPHPGAPHPPQVMLLHPPQSHGGPPQGAVPQSGVPALSASTPSPYPYIGHPQAPLPPPGELKIVLAAT

SEQ ID NO: 12702 - protein, 873 aa, Artificial Sequence
  Synthetic polypeptide
KPLMNRAERGGPTPVVPATQEAESNGWDPNEMFKFNEENYGVKTTYDSSLSSYTVPLEKDNSEEFRQRELRAAQLAREIESSPQYRLRIAMENDDGRTEEEKHSAVQRQGSGRESPSLASREGKYIPLPQRVREGPRGGVRCSSSRGGRPGLSSLPPRGPHHLDNSSPGPGSEARGINGGPSRMSPKAQRPLRGAKTLSSPSNRPSGETSVPPPPAVGRMYPPRSPKSAAPAPISASCPEPPIGSAVPTSSASIPVTSSVSDPGVGSISPASPKISLAPTDVKELSTKEPGRTLEPQELARIAGKVPGLQNEQKRFQLEELRKFGAQFKLQPSSSPENSLDPFPPRILKEEPKGKEKEVDGLLTSEPMGSPVSSKTESVSDKEDKPPLAPSGGTEGPEQPPPPCPSQTGSPPVGLIKGEDKDEGPVAEQVKKSTLNPNAKEFNPTKPLLSVNKSTSTPTSPGPRTHSTPSIPVLTAGQSGLYSPQYISYIPQIHMGPAVQAPQMYPYPVSNSVPGQQGKYRGAKGSLPPQRSDQHQPASAPPMMQAAAAAGPPLVAATPYSSYIPYNPQQFPGQPAMMQPMAHYPSQPVFAPMLQSNPRMLTSGSHPQAIVSSSTPQYPSAEQPTPQALYATVHQSYPHHATQLHAHQPQPATTPTGSQPQSQHAAPSPVQHQAGQAPHLGSGQPQQNLYHPGALTGTPPSLPPGPSAQSPQSSFPQPAAVYAIHHQQLPHGFTNMAHVTQAHVQTGITAAPPPHPGAPHPPQVMLLHPPQSHGGPPQGAVPQSGVPALSASTPSPYPYIGHPQGEQPGQAPGFPGGADDRILCRVGRSHSRRRQGLAPGSVLCFPPSSLSCDPAAPLPTASPALSDPDCLLT

SEQ ID NO: 12703 - protein, 844 aa, Artificial Sequence
  Synthetic polypeptide
KPLMNRAERGGPTPVVPATQEAESNGWDPNEMFKFNEENYGVKTTYDSSLSSYTVPLEKDNSEEFRQRELRAAQLAREIESSPQYRLRIAMENDDGRTEEEKHSAVQRQGSGRESPSLASREGKYIPLPQRVREGPRGGVRCSSSRGGRPGLSSLPPRGPHHLDNSSPGPGSEARGINGGPSRMSPKAQRPLRGAKTLSSPSNRPSGETSVPPPPAAPPFLPVGRMYPPRSPKSAAPAPISASCPEPPIGSAVPTSSASIPVTSSVSDPGVGSISPASPKISLAPTDVKELSTKEPGRTLEPQELARIAGKVPGLQNEQKRFQLEELRKFGAQFKLQPSSSPENSLDPFPPRILKEEPKGKEKEVDGLLTSEPMGSPVSSKTESVSDKEDKPPLAPSGGTEGPEQPPPPCPSQTGSPPVGLIKGEDKDEGPVAEQVKKSTLNPNAKEFNPTKPLLSVNKSTSTPTSPGPRTHSTPSIPVLTAGQSGLYSPQYISYIPQIHMGPAVQAPQMYPYPVSNSVPGQQGKYRGAKGSLPPQRSDQHQPASAPPMMQAAAAAGPPLVAATPYSSYIPYNPQQFPGQPAMMQPMAHYPSQPVFAPMLQSNPRMLTSGSHPQAIVSSSTPQYPSAEQPTPQALYATVHQSYPHHATQLHAHQPQPATTPTGSQPQSQHAAPSPVQHQAGQAPHLGSGQPQQNLYHPGALTGTPPSLPPGPSAQSPQSSFPQPAAVYAIHHQQLPHGFTNMAHVTQAHVQTGITAAPPPHPGAPHPPQVMLLHPPQSHGGPPQGAVPQSGVPALSASTPSPYPYIGHPQGEQPGQAPGFPGGADDRILQSHPSQQLPFHPPGN

SEQ ID NO: 12704 - protein, 838 aa, Artificial Sequence
  Synthetic polypeptide
KPLMNRAERGGPTPVVPATQEAESNGWDPNEMFKFNEENYGVKTTYDSSLSSYTVPLEKDNSEEFRQRELRAAQLAREIESSPQYRLRIAMENDDGRTEEEKHSAVQRQGSGRESPSLASREGKYIPLPQRVREGPRGGVRCSSSRGGRPGLSSLPPRGPHHLDNSSPGPGSEARGINGGPSRMSPKAQRPLRGAKTLSSPSNRPSGETSVPPPPAVGRMYPPRSPKSAAPAPISASCPEPPIGSAVPTSSASIPVTSSVSDPGVGSISPASPKISLAPTDVKELSTKEPGRTLEPQELARIAGKVPGLQNEQKRFQLEELRKFGAQFKLQPSSSPENSLDPFPPRILKEEPKGKEKEVDGLLTSEPMGSPVSSKTESVSDKEDKPPLAPSGGTEGPEQPPPPCPSQTGSPPVGLIKGEDKDEGPVAEQVKKSTLNPNAKEFNPTKPLLSVNKSTSTPTSPGPRTHSTPSIPVLTAGQSGLYSPQYISYIPQIHMGPAVQAPQMYPYPVSNSVPGQQGKYRGAKGSLPPQRSDQHQPASAPPMMQAAAAAGPPLVAATPYSSYIPYNPQQFPGQPAMMQPMAHYPSQPVFAPMLQSNPRMLTSGSHPQAIVSSSTPQYPSAEQPTPQALYATVHQSYPHHATQLHAHQPQPATTPTGSQPQSQHAAPSPVQHQAGQAPHLGSGQPQQNLYHPGALTGTPPSLPPGPSAQSPQSSFPQPAAVYAIHHQQLPHGFTNMAHVTQAHVQTGITAAPPPHPGAPHPPQVMLLHPPQSHGGPPQGAVPQSGVPALSASTPSPYPYIGHPQGEQPGQAPGFPGGADDRILQSHPSQQLPFHPPGN

SEQ ID NO: 12705 - protein, 172 aa, Artificial Sequence
  Synthetic polypeptide
KPLMNRAERGGPTPVVPATQEAESNGWDPNEMFKFNEENYGVKTTYDSSLSSYTVPLEKDNSEEFRQRELRAAQLAREIESSPQYRLRIAMENDDGRTEEEKHSAVQRQGSGRESPSLASREGKYIPLPQRVREGPRGGVRCSSSRGGRPGLSSLPPRGPHHLDNSSPGPGS

SEQ ID NO: 12706 - protein, 466 aa, Artificial Sequence
  Synthetic polypeptide
SQHFGRLRREDCLSSGVQDQPGQHDSISSYEAQITALKQERQQQQQDCEEKERELGRLKQLLSRAYPLDSLEKQMEKAHEDSEKLREIVLPMEKEIEELKAKLLRAEELIQEIQRRPRHAPSLHGSTELLPLSRDPSPPLEPLEELSGDGGPAAEAFAHNCDDSASISSFSLGGGVGSSSSLPQSRQGLSPEQEETASLVSTGTLVPEGIYLPPPGYQLVPDTQWEQLQTEMQVLLAQVQNSEQLLRTLQGTVSQAQERVQLQMAELVTTHKCLHHEVKRLNEENQGLRAEQLPSSAPQGSQQEQGEEESLPSSVPELQQLLCCTRQEARARLQAQEHGAERLRIEIVTLREALEEETVARASLEGQLRVQREETASLCSLRTEMERVQQEQSKAQLPDLLSEQRAKVLRLQAELETSEQVQRDFVRLSQALQVRLERIRQAETLEQVRSIMDEAPLTDVRDIKDT

SEQ ID NO: 12707 - protein, 23 aa, Artificial Sequence
  Synthetic polypeptide
AQEFKTSLGNMTPSAAMKPRSPP

SEQ ID NO: 12708 - protein, 23 aa, Artificial Sequence
  Synthetic polypeptide
AQEFKTSLGNMTPSAAMKPRSPP

SEQ ID NO: 12709 - protein, 23 aa, Artificial Sequence
  Synthetic polypeptide
AQEFKTSLGNMTPSAAMKPRSPP

SEQ ID NO: 12710 - protein, 23 aa, Artificial Sequence
  Synthetic polypeptide
AQEFKTSLGNMTPSAAMKPRSPP

SEQ ID NO: 12711 - protein, 23 aa, Artificial Sequence
  Synthetic polypeptide
AQEFKTSLGNMTPSAAMKPRSPP

SEQ ID NO: 12712 - protein, 502 aa, Artificial Sequence
  Synthetic polypeptide
SQHFGRLRREDCLSSGVQDQPGQHDSISSYEAQITALKQERQQQQQDCEEKERELGRLKQLLSRAYPLDSLEKQMEKAHEDSEKLREIVLPMEKEIEELKAKLLRAEELIQEIQRRPRHAPSLHGSTELLPLSRDPSPPLEPLEELSGDGGPAAEAFAHNCDDSASISSFSLGGGVGSSSSLPQSRQGLSPEQEETASLVSTGTLVPEGIYLPPPGYQLVPDTQWEQLQTEGRQLQKDLESVSRERDELQEGLRRSNEDCAKQMQVLLAQVQNSEQLLRTLQGTVSQAQERVQLQMAELVTTHKCLHHEVKRLNEENQGLRAEQLPSSAPQGSQQEQGEEESLPSSVPELQQLLCCTRQEARARLQAQEHGAERLRIEIVTLREALEEETVARASLEGQLRVQREETEVLEASLCSLRTEMERVQQEQSKAQLPDLLSEQRAKVLRLQAELETSEQVQRDFVRLSQALQVRLERIRQAETLEQVRSIMDEAPLTDVRDIKDT

SEQ ID NO: 12713 - protein, 502 aa, Artificial Sequence; identical to SEQ ID NO: 12712
  Synthetic polypeptide

SEQ ID NO: 12714 - protein, 231 aa, Artificial Sequence
  Synthetic polypeptide
SQHFGRLRREDCLSSGVQDQPGQHDSISSYEAQITALKQERQQQQQDCEEKERELGRLKQLLSRAYPLDSLEKQMEKAHEDSEKLREIVLPMEKEIEELKAKLLRAEELIQEIQRRPRHAPSLHGSTELLPLSRDPSPPLEPLEELSGDGGPAAEAFAHNCDDSASISSFSLGGGVGSSSSLPQSRQGLSPEQEETASLVSTGTLVPEGIYLPPPGYQLVPDTQWEQLQTE

SEQ ID NO: 12715 - protein, 223 aa, Artificial Sequence
  Synthetic polypeptide
SQHFGRLRREDCLSSGVQDQPGQHDSISSYEAQITALKQERQQQQQDCEEKERELGRLKQLLSRAYPLDSLEKQMEKAHEDSEKLREIVLPMEKEIEELKAKLLRAEELIQEIQRRPRHAPSLHGSTELLPLSRDPSPPLEPLEELSGDGGPAAEAFAHNCDDSASISSFSLGGGVGSSSSLPQSRQGLSPEQEETASLVSTGTLVPEGIYLPPPGYQLVPDT

SEQ ID NO: 12716 - protein, 40 aa, Artificial Sequence
  Synthetic polypeptide
GTVAHTCHPSTLPRQPCTSGLGGTSGTSGECPAALGRSGW

SEQ ID NO: 12717 - protein, 40 aa, Artificial Sequence; identical to SEQ ID NO: 12716
  Synthetic polypeptide

SEQ ID NO: 12718 - protein, 40 aa, Artificial Sequence; identical to SEQ ID NO: 12716
  Synthetic polypeptide

SEQ ID NO: 12719 - protein, 40 aa, Artificial Sequence; identical to SEQ ID NO: 12716
  Synthetic polypeptide

SEQ ID NO: 12720 - protein, 134 aa, Artificial Sequence
  Synthetic polypeptide
VQWLTPVIPALCQDSPAPPGSAELPGLQGSVPPHWGGVAGNSAGHRGPRARCPRGGAGGCAHHHPGPPQLLRDSRPCRTGWQESAGAEARGQGREVFFPPARRAAGTRHPGCVCAVGAAGAAAEGPAAPGGGGG

SEQ ID NO: 12721 - protein, 134 aa, Artificial Sequence; identical to SEQ ID NO: 12720
  Synthetic polypeptide

SEQ ID NO: 12722 - protein, 134 aa, Artificial Sequence; identical to SEQ ID NO: 12720
  Synthetic polypeptide

SEQ ID NO: 12723 - protein, 682 aa, Artificial Sequence
  Synthetic polypeptide
YSGSHLSSQHFAKTALHLRARRNFRDFRGVSRRTGEEWLVTVQDTEAHVPDVHEEVLGVVPITTLGPHNYCVILDPVGPDGKNQLGQKRVVKGEKSFFLQPGEQLEQGIQDVYVLSEQQGLLLRALQPLEEGEDEEKVSHQAGDHWLIRGPLEYVPSAKVEVVEERQAIPLDENEGIYVQDVKTGKVRAVIGSTYMLTQDEVLWEKELPPGVEELLNKGQDPLADRGEKDTAKSLQPLAPRNKTRVVSYRVPHNAAVQVYDYREKRARVVFGPELVSLGPEEQFTVLSLSAGRPKRPHARRALCLLLGPDFFTDVITIETADHARLQLQLAYNWHFEVNDRKDPQETAKLFSVPDFVGDACKAIASRVRGAVASVTFDDFHKNSARIIRTAVFGFETSEAKGPDGMALPRPRDQAVFPQNGLVVSSVDVQSVEPVDQRTRDALQRSVQLAIEITTNSQEAAAKHEAQRLEQEARGRLERQKILDQSEAEKARKELLELEALSMAVESTGTAKAEAESRAEAARIEGEGSVLQAKLKAQALAIETEAELQRVQKVRELELVYARAQLELEVSKAQQLAEVEVKKFKQMTEAIGPSTIRDLAVAGPEMQVKLLQSLGLKSTLITDGSTPINLFNTAFGLLGMGPEGQPLGRRVASGPSPGEGISPQSAQAPQAPGDNHVVPVLR

SEQ ID NO: 12724 - protein, 682 aa, Artificial Sequence; identical to SEQ ID NO: 12723
  Synthetic polypeptide

SEQ ID NO: 12725 - protein, 40 aa, Artificial Sequence
  Synthetic polypeptide
VQWLTPVIPALCQDSPAPPGSAELPGLQGSVPPHWGGVAG

SEQ ID NO: 12726 - protein, 40 aa, Artificial Sequence
  Synthetic polypeptide
YSGSHLSSQHFAKTALHLRARRNFRDFRGVSRRTGEEWLV

SEQ ID NO: 12727 - protein, 134 aa, Artificial Sequence
  Synthetic polypeptide
YSGSHLSSQHFAKTALHLRARRNFRDFRGVSRRTGEEWLVTVQDTEAHVPDVHEEVLGVVPITTLGPHNYCVILDPVGPDGKNQLGQKRVVKGEKSFFLQPGEQLEQGIQDVYVLSEQQGLLLRALQPLEEGED

SEQ ID NO: 12728 - protein, 16 aa, Artificial Sequence
  Synthetic polypeptide
DHTTPLQPGPKDPSWL

SEQ ID NO: 12729 - protein, 16 aa, Artificial Sequence
  Synthetic polypeptide
DHTTPLQPGPKDPSWL

SEQ ID NO: 12730 - protein, 16 aa, Artificial Sequence
  Synthetic polypeptide
DHTTPLQPGPKDPSWL

SEQ ID NO: 12731 - protein, 16 aa, Artificial Sequence
  Synthetic polypeptide
DHTTPLQPGPKDPSWL

SEQ ID NO: 12732 - protein, 16 aa, Artificial Sequence
  Synthetic polypeptide
DHTTPLQPGPKDPSWL

SEQ ID NO: 12733 - protein, 81 aa, Artificial Sequence
  Synthetic polypeptide
AEITPLHSSLGLKIPPGCELVVGGEPQCWAEGHCLLVDDSFLHTVAHNGSPEDGPRVVFIVDLWHPNVAGAERQALDFVFA

SEQ ID NO: 12734 - protein, 36 aa, Artificial Sequence
  Synthetic polypeptide
HMPVIPAATQEAETRESLEPGKQSELRSHHSTPAWA

SEQ ID NO: 12735 - protein, 36 aa, Artificial Sequence; identical to SEQ ID NO: 12734
  Synthetic polypeptide

SEQ ID NO: 12736 - protein, 36 aa, Artificial Sequence; identical to SEQ ID NO: 12734
  Synthetic polypeptide

SEQ ID NO: 12737 - protein, 36 aa, Artificial Sequence; identical to SEQ ID NO: 12734
  Synthetic polypeptide

SEQ ID NO: 12738 - protein, 36 aa, Artificial Sequence; identical to SEQ ID NO: 12734
  Synthetic polypeptide

SEQ ID NO: 12739 - protein, 84 aa, Artificial Sequence
  Synthetic polypeptide
AEITPLHSSLGLKIPPGCELVVGGEPQCWAEGHCLLVDDSFLHTVAHNGSPEDGPRVVFIVDLWHPNVAGAERQALDFVFAPDP

SEQ ID NO: 12740 - protein, 84 aa, Artificial Sequence; identical to SEQ ID NO: 12739
  Synthetic polypeptide

SEQ ID NO: 12741 - protein, 84 aa, Artificial Sequence; identical to SEQ ID NO: 12739
  Synthetic polypeptide

SEQ ID NO: 12742 - protein, 84 aa, Artificial Sequence; identical to SEQ ID NO: 12739
  Synthetic polypeptide

SEQ ID NO: 12743 - protein, 201 aa, Artificial Sequence
  Synthetic polypeptide
ASVTSCDKWRCCPSHPSLDLMTRRGDSDATASSDNSETEGTPKLSDTPAPKRKRSPPLGGAPSPSSLSLPPSTGFPLQASGVPSPYLSSLASSRYPPFPSDYLALQLPEPSPLRPKREKRPRLPRKLKMAVGPPDCPVGGPLTFPGRGSGAGVGTTLTPLPPPKMPPPTILSTVPRQMFSDAGSGDDALDGDDDLVIDIPE

SEQ ID NO: 12744 - protein, 65 aa, Artificial Sequence
  Synthetic polypeptide
QGEVTQMPLHHQITARRRGHPSCLTHRPLRGREALRWGAPPLPPASPCLLQQGFPFRPPGSPPHT

SEQ ID NO: 12745 - protein, 65 aa, Artificial Sequence; identical to SEQ ID NO: 12744
  Synthetic polypeptide

SEQ ID NO: 12746 - protein, 65 aa, Artificial Sequence; identical to SEQ ID NO: 12744
  Synthetic polypeptide

SEQ ID NO: 12747 - protein, 65 aa, Artificial Sequence; identical to SEQ ID NO: 12744
  Synthetic polypeptide

SEQ ID NO: 12748 - protein, 65 aa, Artificial Sequence; identical to SEQ ID NO: 12744
  Synthetic polypeptide

SEQ ID NO: 12749 - protein, 65 aa, Artificial Sequence; identical to SEQ ID NO: 12744
  Synthetic polypeptide

SEQ ID NO: 12750 - protein, 65 aa, Artificial Sequence; identical to SEQ ID NO: 12744
  Synthetic polypeptide

SEQ ID NO: 12751 - protein, 162 aa, Artificial Sequence
  Synthetic polypeptide
ASVTSCDKWRCCPSHPSLDLMTRRGDSDATASSDNSETEGTPKLSDTPAPKRKRSPPLGGAPSPSSLSLPPSTGFPLQASGVPSPYLSSMAVGPPDCPVGGPLTFPGRGSGAGVGTTLTPLPPPKMPPPTILSTVPRQMFSDAGSGDDALDGDDDLVIDIPE

SEQ ID NO: 12752 - protein, 130 aa, Artificial Sequence
  Synthetic polypeptide
ASVTSCDKWRCCPSHPSLDLMTRRGDSDATASSDNSETEGTPKLSDTPAPKRKRSPPLGGAPSPSSLSLPPSTGFPLQASGVPSPYLSSLASSRYPPFPSDYLALQLPEPSPLRPKREKRPRLPRKLKVP

SEQ ID NO: 12753 - protein, 94 aa, Artificial Sequence
  Synthetic polypeptide
ASVTSCDKWRCCPSHPSLDLMTRRGDSDATASSDNSETEGTPKLSDTPAPKRKRSPPLGGAPSPSSLSLPPSTGFPLQASGVPSPYLSSERGQA

SEQ ID NO: 12754 - protein, 94 aa, Artificial Sequence; identical to SEQ ID NO: 12753
  Synthetic polypeptide

SEQ ID NO: 12755 - protein, 184 aa, Artificial Sequence
  Synthetic polypeptide
ASVTSCDKWRCCPSHPSLDLMTRRGDSDATASSDNSETEGTPKLSDTPAPKRKRSPPLGGAPSPSSLSLPPSTGFPLQASGVPSPYLSSLPEPSPLRPKREKRPRLPRKLKMAVGPPDCPVGGPLTFPGRGSGAGVGTTLTPLPPPKMPPPTILSTVPRQMFSDAGSGDDALDGDDDLVIDIPE

SEQ ID NO: 12756 - protein, 145 aa, Artificial Sequence
  Synthetic polypeptide
ASVTSCDKWRCCPSHPSLDLMTRRGDSDATASSDNSETEGTPKLSDTPAPKRKRSPPLGGAPSPSSLSLPPSTGFPLQASGVPSPYLSSLASSRYPPFPSDYLALQLPEPSPLRPKREKRPRLPRKLKTLVVREQTERWSELGRE

SEQ ID NO: 12757 - protein, 371 aa, Artificial Sequence
  Synthetic polypeptide
AEGTAGDWSQTAKALTPEQKKELSDIAHRIVAPGKGILAADESTGSIAKRLQSIGTENTEENRRFYRQLLLTADDRVNPCIGGVILFHETLYQKADDGRPFPQVIKSKGGVVGIKVDKGVVPLAGTNGETTTQGLDGLSERCAQYKKDGADFAKWRCVLKIGEHTPSALAIMENANVLARYASICQQNGIVPIVEPEILPDGDHDLKRCQYVTEKVLAAVYKALSDHHIYLEGTLLKPNMVTPGHACTQKFSHEEIAMATVTALRRTVPPAVTGITFLSGGQSEEEASINLNAINKCPLLKPWALTFSYGRALQASALKAWGGKKENLKAAQEEYVKRALANSLACQGKYTPSGQAGAAASESLFVSNHAY

SEQ ID NO: 12758 - protein, 371 aa, Artificial Sequence; identical to SEQ ID NO: 12757
  Synthetic polypeptide

SEQ ID NO: 12759 - protein, 371 aa, Artificial Sequence; identical to SEQ ID NO: 12757
  Synthetic polypeptide

SEQ ID NO: 12760 - protein, 371 aa, Artificial Sequence; identical to SEQ ID NO: 12757
  Synthetic polypeptide

SEQ ID NO: 12761 - protein, 371 aa, Artificial Sequence; identical to SEQ ID NO: 12757
  Synthetic polypeptide

SEQ ID NO: 12762 - protein, 371 aa, Artificial Sequence; identical to SEQ ID NO: 12757
  Synthetic polypeptide

SEQ ID NO: 12763 - protein, 371 aa, Artificial Sequence; identical to SEQ ID NO: 12757
  Synthetic polypeptide

SEQ ID NO: 12764 - protein, 371 aa, Artificial Sequence; identical to SEQ ID NO: 12757
  Synthetic polypeptide

SEQ ID NO: 12765 - protein, 14 aa, Artificial Sequence
  Synthetic polypeptide
MRAQQVIGVRQLRH

SEQ ID NO: 12766 - protein, 14 aa, Artificial Sequence
  Synthetic polypeptide
MRAQQVIGVRQLRH

SEQ ID NO: 12767 - protein, 14 aa, Artificial Sequence
  Synthetic polypeptide
MRAQQVIGVRQLRH

SEQ ID NO: 12768 - protein, 14 aa, Artificial Sequence
  Synthetic polypeptide
MRAQQVIGVRQLRH

SEQ ID NO: 12769 - protein, 14 aa, Artificial Sequence
  Synthetic polypeptide
MRAQQVIGVRQLRH

SEQ ID NO: 12770 - protein, 14 aa, Artificial Sequence
  Synthetic polypeptide
MRAQQVIGVRQLRH

SEQ ID NO: 12771 - protein, 14 aa, Artificial Sequence
  Synthetic polypeptide
MRAQQVIGVRQLRH

SEQ ID NO: 12772 - protein, 14 aa, Artificial Sequence
  Synthetic polypeptide
MRAQQVIGVRQLRH

SEQ ID NO: 12773 - protein, 14 aa, Artificial Sequence
  Synthetic polypeptide
MRAQQVIGVRQLRH

SEQ ID NO: 12774 - protein, 14 aa, Artificial Sequence
  Synthetic polypeptide
MRAQQVIGVRQLRH

SEQ ID NO: 12775 - protein, 14 aa, Artificial Sequence
  Synthetic polypeptide
MRAQQVIGVRQLRH

SEQ ID NO: 12776 - protein, 14 aa, Artificial Sequence
  Synthetic polypeptide
MRAQQVIGVRQLRH

SEQ ID NO: 12777 - protein, 14 aa, Artificial Sequence
  Synthetic polypeptide
MRAQQVIGVRQLRH

SEQ ID NO: 12778 - protein, 14 aa, Artificial Sequence
  Synthetic polypeptide
MRAQQVIGVRQLRH

SEQ ID NO: 12779 - protein, 14 aa, Artificial Sequence
  Synthetic polypeptide
MRAQQVIGVRQLRH

SEQ ID NO: 12780 - protein, 19 aa, Artificial Sequence
  Synthetic polypeptide
AEGTAGDWSQTAKALTPEQ

SEQ ID NO: 12781 - protein, 169 aa, Artificial Sequence
  Synthetic polypeptide
AEGTAGDWSQTAKALTPEQKKELSDIAHRIVAPGSIAKRLQSIGTENTEENRRFYRQLLLTADDRVNPCIGGVILFHETLYQKADDGRPFPQVIKSKGGVVGIKVDKGVVPLAGTNGETTTQGLDGLSERCAQYKKDGADFAKWRCVLKIGEHTPSALAIMENANVLAR

SEQ ID NO: 12782 - protein, 162 aa, Artificial Sequence
  Synthetic polypeptide
AEGTAGDWSQTAKALTPEQKKELSDIAHRIVAPGKGILAADESTGSIAKRLQSIGTENTEENRRFYRQLLLTADDRVNPCIGGVILFHETLYQKADDGRPFPQVIKSKGGVVGIKVDKGVVPLAGTNGETTTQGLDGLSERCAQYKKDGADFAKWRCVLKIG

SEQ ID NO: 12783 - protein, 368 aa, Artificial Sequence
  Synthetic polypeptide
AEGTAGDWSQTAKALTPEQKKELSDIAHRIVAPGKGILAADESTGSIAKRLQSIGTENTEENRRFYRQLLLTADDRVNPCIGGVILFHETLYQKADDGRPFPQVIKSKGGVVGIKVDKGVVPLAGTNGETTTQGLDGLSERCAQYKKDGADFAKWRCVLKIGEHTPSALAIMENANVLARYASICQQNGIVPIVEPEILPDGDHDLKRCQYVTEKVLAAVYKALSDHHIYLEGTLLKPNMVTPGHACTQKFSHEEIAMATVTALRRTVPPAVTGITFLSGGQSEEEASINLNAINKCPLLKPWALTFSYGRALQASALKAWGGKKENLKAAQEEYVKRALVRIGRRWAGCLGGWDSEKSPSHSTPLPA

SEQ ID NO: 12784 - protein, 375 aa, Artificial Sequence
  Synthetic polypeptide
AEGTAGDWSQTAKALTPEQKKELSDIAHRIVAPGKGILAADESTGSIAKRLQSIGTENTEENRRFYRQLLLTADDRVNPCIGGVILFHETLYQKADDGRPFPQVIKSKGGVVGIKVDKGVVPLAGTNGETTTQGLDGLSERCAQYKKDGADFAKWRCVLKIGEHTPSALAIMENANVLARYASICQQVGLQNGIVPIVEPEILPDGDHDLKRCQYVTEKVLAAVYKALSDHHIYLEGTLLKPNMVTPGHACTQKFSHEEIAMATVTALRRTVPPAVTGITFLSGGQSEEEASINLNAINKCPLLKPWALTFSYGRALQASALKAWGGKKENLKAAQEEYVKRALANSLACQGKYTPSGQAGAAASESLFVSNHAY

SEQ ID NO: 12785 - protein, 147 aa, Artificial Sequence
  Synthetic polypeptide
AEGTAGDWSQTAKALTPEQKKELSDIAHRIVAPGSIAKRLQSIGTENTEENRRFYRQLLLTADDRVNPCIGGVILFHETLYQKADDGRPFPQVIKSKGGVVGIKVDKGVVPLAGTNGETTTQGLDGLSERCAQYKKDGADFAKWRCV

SEQ ID NO: 12786 - protein, 231 aa, Artificial Sequence
  Synthetic polypeptide
AEGTAGDWSQTAKALTPEQKKELSDIAHRIVAPGKGILAADESTGSIAKRLQSIGTENTEENRRFYRQLLLTADDRVNPCIGGVILFHETLYQKADDGRPFPQVIKSKGGVVGIKVDKGVVPLAGTNGETTTQGLDGLSERCAQYKKDGADFAKWRCVLKIGEHTPSALAIMENANVLARYASICQQNGIVPIVEPEILPDGDHDLKRCQYVTEKVLAAVYKALSDHHIYL

SEQ ID NO: 12787 - protein, 170 aa, Artificial Sequence
  Synthetic polypeptide
GRARWLTSVIPALWEAETGGSPEESIPFAVVGSCEVVRDGGNRPVRGRRYSWGTVEVENPHHCDFLNLRRMLVQTHLQDLKEVTHDLLYEGYRARCLQSLARPGARDRASRSKLSRQSATEIPLPMLPLADTEKLIREKDEELRRMQEMLEKMQAQMQQSQAQGEQSDAL

SEQ ID NO: 12788 - protein, 170 aa, Artificial Sequence; identical to SEQ ID NO: 12787
  Synthetic polypeptide

SEQ ID NO: 12789 - protein, 170 aa, Artificial Sequence; identical to SEQ ID NO: 12787
  Synthetic polypeptide

SEQ ID NO: 12790 - protein, 27 aa, Artificial Sequence
  Synthetic polypeptide
SQHFGRLRREDPLRKASLLQSWDHARW

SEQ ID NO: 12791 - protein, 27 aa, Artificial Sequence
  Synthetic polypeptide
SQHFGRLRREDPLRKASLLQSWDHARW

SEQ ID NO: 12792 - protein, 27 aa, Artificial Sequence
  Synthetic polypeptide
SQHFGRLRREDPLRKASLLQSWDHARW

SEQ ID NO: 12793 - protein, 27 aa, Artificial Sequence
  Synthetic polypeptide
SQHFGRLRREDPLRKASLLQSWDHARW

SEQ ID NO: 12794 - protein, 142 aa, Artificial Sequence
  Synthetic polypeptide
GRARWLTSVIPALWEAETGGSPEESIPFAVVGSCEVVRDGGNRPVRGRRYSWGTVEVENPHHCDFLNLRRMLVQTHLQDLKEVTHDLLYEGYRARCLQSLARPGARDRASRSKLSRQSATEIPLPMLPLADTEKLIREKDEE

SEQ ID NO: 12795 - protein, 107 aa, Artificial Sequence
  Synthetic polypeptide
QGFSAVPHRDPGQCLEAARYKDDADSPTEDGDKPRVLYSLEFTFDADARVAITIYCQASEEFLNGRAVYSPKSPSLQSETVHYKRGVSQQFSLPSFKIDFSEWKDDE

SEQ ID NO: 12796 - protein, 62 aa, Artificial Sequence
  Synthetic polypeptide
RASQLCRTGTLGSVWRQPGTKTMPTAPPRTATSPGCSTAWSSPSTPMPAWPSPSTARHRRSS

SEQ ID NO: 12797 - protein, 62 aa, Artificial Sequence; identical to SEQ ID NO: 12796
  Synthetic polypeptide

SEQ ID NO: 12798 - protein, 62 aa, Artificial Sequence; identical to SEQ ID NO: 12796
  Synthetic polypeptide

SEQ ID NO: 12799 - protein, 62 aa, Artificial Sequence; identical to SEQ ID NO: 12796
  Synthetic polypeptide

SEQ ID NO: 12800 - protein, 62 aa, Artificial Sequence; identical to SEQ ID NO: 12796
  Synthetic polypeptide

SEQ ID NO: 12801 - protein, 62 aa, Artificial Sequence; identical to SEQ ID NO: 12796
  Synthetic polypeptide

SEQ ID NO: 12802 - protein, 62 aa, Artificial Sequence; identical to SEQ ID NO: 12796
  Synthetic polypeptide

SEQ ID NO: 12803 - protein, 62 aa, Artificial Sequence; identical to SEQ ID NO: 12796
  Synthetic polypeptide

SEQ ID NO: 12804 - protein, 62 aa, Artificial Sequence; identical to SEQ ID NO: 12796
  Synthetic polypeptide

SEQ ID NO: 12805 - protein, 62 aa, Artificial Sequence; identical to SEQ ID NO: 12796
  Synthetic polypeptide

SEQ ID NO: 12806 - protein, 97 aa, Artificial Sequence
  Synthetic polypeptide
GLLSCAAQGPWAVSGGSQVQRRCRQPHRGRRQAPGALQPGVHLRRRCPRGHHHLLPGIGGVPERQGSIQPQEPLATVRDRPLQERGEPAVLPALLQD

SEQ ID NO: 12807 - protein, 97 aa, Artificial Sequence; identical to SEQ ID NO: 12806
  Synthetic polypeptide

SEQ ID NO: 12808 - protein, 97 aa, Artificial Sequence; identical to SEQ ID NO: 12806
  Synthetic polypeptide

SEQ ID NO: 12809 - protein, 97 aa, Artificial Sequence; identical to SEQ ID NO: 12806
  Synthetic polypeptide

SEQ ID NO: 12810 - protein, 97 aa, Artificial Sequence; identical to SEQ ID NO: 12806
  Synthetic polypeptide

SEQ ID NO: 12811 - protein, 97 aa, Artificial Sequence; identical to SEQ ID NO: 12806
  Synthetic polypeptide

SEQ ID NO: 12812 - protein, 97 aa, Artificial Sequence; identical to SEQ ID NO: 12806
  Synthetic polypeptide

SEQ ID NO: 12813 - protein, 97 aa, Artificial Sequence; identical to SEQ ID NO: 12806
  Synthetic polypeptide

SEQ ID NO: 12814 - protein, 97 aa, Artificial Sequence; identical to SEQ ID NO: 12806
  Synthetic polypeptide

SEQ ID NO: 12815 - protein, 496 aa, Artificial Sequence
  Synthetic polypeptide
QGFSAVPHRDPGQCLEAARYKDDADSPTEDGDKPRVLYSLEFTFDADARVAITIYCQASEEFLNGRAVYSPKSPSLQSETVHYKRGVSQQFSLPSFKIDFSEWKDDELNFDLDRGVFPVVIQAVVDEGDVVEVTGHAHVLLAAFEKHMDGSFSVKPLKQKQIVDRVSYLLQEIYGIENKNNQETKPSDDENSDNSNECVVCLSDLRDTLILPCRHLCLCTSCADTLRYQANNCPICRLPFRALLQIRAVRKKPGALSPVSFSPVLAQSLEHDEHSCPFKKSKPHPASLASKKPKRETNSDSVPPGYEPISLLEALNGLRAVSPAIPSAPLYEEITYSGISDGLSQASCPLAAIDHILDSSRQKGRPQSKAPDSTLRSPSSPIHEEDEEKLSEDVDAPPPLGGAELALRESSSPESFITEEVDESSSPQQGTRAASIENVLQDSSPEHCGRGPPADIYLPGRPTSMETAHGLATTSPTWPPLGGPSPDPSAAELTPL

SEQ ID NO: 12816 - protein, 451 aa, Artificial Sequence
  Synthetic polypeptide
QGFSAVPHRDPGQCLEAARYKDDADSPTEDGDKPRVLYSLEFTFDADARVAITIYCQASEEFLNGRAVYSPKSPSLQSETVHYKRGVSQQFSLPSFKIDFSEWKDDELNFDLDRGVFPVVIQAVVDEGDAVVEVTGHAHVLLAAFEKHMDGSFSVKPLKQKQIVDRVSYLLQEIYGIENKNNQETKPSDDENSDNSNECVVCLSDLRDTLILPCRHLCLCTSCADTLRYQANNCPICRLPFRALLQIRAVRKKPGALSPVSFSPVLAQSLEHDEHSNSDSVPPGYEPISLLEALNGLRAVSPAIPSAPLYEEITYSGISDGLSQASCPLAAIDHILDSSRQKGRPQSKAPDSTLRSPSSPIHEEDEEKLSEDVDAPPPLGGAELALRESSSPESFITEEVDESSSPQQGTRAASIENVLQDSSPEHCGRGPPADIYLPALGPDSCSVGIDE

SEQ ID NO: 12817 - protein, 240 aa, Artificial Sequence
  Synthetic polypeptide
QGFSAVPHRDPGQCLEAARYKDDADSPTEDGDKPRVLYSLEFTFDADARVAITIYCQASEEFLNGRAVYSPKSPSLQSETVHYKRGVSQQFSLPSFKIDFSEWKDDELNFDLDRGVFPVVIQAVVDEGDVVEVTGHAHVLLAAFEKHMDGSFSVKPLKQKQIVDRVSYLLQEIYGIENKNNQETKPSDDENSDNSNECVVCLSDLRDTLILPCRHLCLCTSCADTLRYQANNCPICRLQL

SEQ ID NO: 12818 - protein, 514 aa, Artificial Sequence
  Synthetic polypeptide
QGFSAVPHRDPGQCLEAARYKDDADSPTEDGDKPRVLYSLEFTFDADARVAITIYCQASEEFLNGRAVYSPKSPSLQSETVHYKRGVSQQFSLPSFKIDFSEWKDDELNFDLDRGVFPVVIQAVVDEGDVVEVTGHAHVLLAAFEKHMDGSFSVKPLKQKQIVDRVSYLLQEIYGIENKNNQETKISWKVSQARFIMASGPRTTGAAPRGGSGAPGRASPQPREPSDDENSDNSNECVVCLSDLRDTLILPCRHLCLCTSCADTLRYQANNCPICRLPFRALLQIRAVRKKPGALSPVSFSPVLAQSLEHDEHSCPFKKSKPHPASLASKKPKRETNSDSVPPGYEPISLLEALNGLRAVSPAIPSAPLYEEITYSGISDGLSQASCPLAAIDHILDSSRQKGRPQSKAPDSTLRSPSSPIHEEDEEKLSEDVDAPPPLGGAELALRESSSPESFITEEVDESSSPQQGTRAASIENVLQDSSPEHCGRGPPADIYLPGRPTSMETAHGLATTS

SEQ ID NO: 12819 - protein, 472 aa, Artificial Sequence
  Synthetic polypeptide
QGFSAVPHRDPGQCLEAARYKDDADSPTEDGDKPRVLYSLEFTFDADARVAITIYCQASEEFLNGRAVYSPKSPSLQSETVHYKRGVSQQFSLPSFKIDFSEWKDDELNFDLDRGVFPVVIQAVVDEGDVVEVTGHAHVLLAAFEKHMDGSFSVKPLKQKQIVDRVSYLLQEIYGIENKNNQETKPSDDENSDNSNECVVCLSDLRDTLILPCRHLCLCTSCADTLRYQANNCPICRLPFRALLQIRAVRKKPGALSPVSFSPVLAQSLEHDEHSCPFKKSKPHPASLASKKPKRETNSDSVPPGYEPISLLEALNGLRAVSPAIPSAPLYEEITYSGISDGLSQASCPLAAIDHILDSSRQKGRPQSKAPDSTLRSPSSPIHEEDEEKLSEDVDAPPPLGGAELALRESSSPESFITEEVDESSSPQQGTRAASIENVLQDSSPEHCGRGPPADIYLPALGPDSCSVGIDE

SEQ ID NO: 12820 - protein, 474 aa, Artificial Sequence
  Synthetic polypeptide
QGFSAVPHRDPGQCLEAARYKDDADSPTEDGDKPRVLYSLEFTFDADARVAITIYCQASEEFLNGRAVYSPKSPSLQSETVHYKRGVSQQFSLPSFKIDFSEWKDDELNFDLDRGVFPVVIQAVVDEGDVVEVTGHAHVLLAAFEKHMDGSFSVKPLKQKQIVDRVSYLLQEIYGIENKNNQETKPSDDENSDNSNECVVCLSDLRDTLILPCRHLCLCTSCADTLRYQANNCPICRLPFRALLQIRAVRKKPGALSPVSFSPVLAQSLEHDEHSNSDSVPPGYEPISLLEALNGLRAVSPAIPSAPLYEEITYSGISDGLSQASCPLAAIDHILDSSRQKGRPQSKAPDSTLRSPSSPIHEEDEEKLSEDVDAPPPLGGAELALRESSSPESFITEEVDESSSPQQGTRAASIENVLQDSSPEHCGRGPPADIYLPGRPTSMETAHGLATTSPTWPPLGGPSPDPSAAELTPL

SEQ ID NO: 12821 - protein, 450 aa, Artificial Sequence
  Synthetic polypeptide
QGFSAVPHRDPGQCLEAARYKDDADSPTEDGDKPRVLYSLEFTFDADARVAITIYCQASEEFLNGRAVYSPKSPSLQSETVHYKRGVSQQFSLPSFKIDFSEWKDDELNFDLDRGVFPVVIQAVVDEGDVVEVTGHAHVLLAAFEKHMDGSFSVKPLKQKQIVDRVSYLLQEIYGIENKNNQETKPSDDENSDNSNECVVCLSDLRDTLILPCRHLCLCTSCADTLRYQANNCPICRLPFRALLQIRAVRKKPGALSPVSFSPVLAQSLEHDEHSNSDSVPPGYEPISLLEALNGLRAVSPAIPSAPLYEEITYSGISDGLSQASCPLAAIDHILDSSRQKGRPQSKAPDSTLRSPSSPIHEEDEEKLSEDVDAPPPLGGAELALRESSSPESFITEEVDESSSPQQGTRAASIENVLQDSSPEHCGRGPPADIYLPALGPDSCSVGIDE

SEQ ID NO: 12822 - protein, 288 aa, Artificial Sequence
  Synthetic polypeptide
QGFSAVPHRDPGQCLEAARYKDDADSPTEDGDKPRVLYSLEFTFDADARVAITIYCQASEEFLNGRAVYSPKSPSLQSETVHYKRGVSQQFSLPSFKIDFSEWKDDELNFDLDRGVFPVVIQAVVDEGDAVVEVTGHAHVLLAAFEKHMDGSFSVKPLKQKQIVDRVSYLLQEIYGIENKNNQETKPSDDENSDNSNECVVCLSDLRDTLILPCRHLCLCTSCADTLRYQANNCPICRLPFRALLQIRAVRKKPGALSPVSFSPVLAQSLEHDEHSCPFKKSKPHPAS

SEQ ID NO: 12823 - protein, 127 aa, Artificial Sequence
  Synthetic polypeptide
QGFSAVPHRDPGQCLEAARYKDDADSPTEDGDKPRVLYSLEFTFDADARVAITIYCQASEEFLNGRAVYSPKSPSLQSETVHYKRGVSQHYLLQEIYGIENKNNQETKPSDDENSDNSNECVVCLSD

SEQ ID NO: 12824 - protein, 98 aa, Artificial Sequence
  Synthetic polypeptide
GLLSCAAQGPWAVSGGSQVQRRCRQPHRGRRQAPGALQPGVHLRRRCPRGHHHLLPGIGGVPERQGSIQPQEPLATVRDRPLQERGEPALPPAGDLWH

SEQ ID NO: 12825 - protein, 114 aa, Artificial Sequence
  Synthetic polypeptide
QGFSAVPHRDPGQCLEAARWGAWHLRYKDDADSPTEDGDKPRVLYSLEFTFDADARVAITIYCQASEEFLNGRAVYSPKSPSLQSETVHYKRGVSQQFSLPSFKIDFSEWKDDE

SEQ ID NO: 12826 - protein, 69 aa, Artificial Sequence
  Synthetic polypeptide
RASQLCRTGTLGSVWRQPGGVLGISGTKTMPTAPPRTATSPGCSTAWSSPSTPMPAWPSPSTARHRRSS

SEQ ID NO: 12827 - protein, 69 aa, Artificial Sequence; identical to SEQ ID NO: 12826
  Synthetic polypeptide

SEQ ID NO: 12828 - protein, 69 aa, Artificial Sequence; identical to SEQ ID NO: 12826
  Synthetic polypeptide

SEQ ID NO: 12829 - protein, 69 aa, Artificial Sequence; identical to SEQ ID NO: 12826
  Synthetic polypeptide

SEQ ID NO: 12830 - protein, 69 aa, Artificial Sequence; identical to SEQ ID NO: 12826
  Synthetic polypeptide

SEQ ID NO: 12831 - protein, 69 aa, Artificial Sequence; identical to SEQ ID NO: 12826
  Synthetic polypeptide

SEQ ID NO: 12832 - protein, 69 aa, Artificial Sequence; identical to SEQ ID NO: 12826
  Synthetic polypeptide

SEQ ID NO: 12833 - protein, 69 aa, Artificial Sequence; identical to SEQ ID NO: 12826
  Synthetic polypeptide

SEQ ID NO: 12834 - protein, 69 aa, Artificial Sequence; identical to SEQ ID NO: 12826
  Synthetic polypeptide

SEQ ID NO: 12835 - protein, 69 aa, Artificial Sequence; identical to SEQ ID NO: 12826
  Synthetic polypeptide

SEQ ID NO: 12836 - protein, 104 aa, Artificial Sequence
  Synthetic polypeptide
GLLSCAAQGPWAVSGGSQVGCLASQVQRRCRQPHRGRRQAPGALQPGVHLRRRCPRGHHHLLPGIGGVPERQGSIQPQEPLATVRDRPLQERGEPAVLPALLQD

SEQ ID NO: 12837 - protein, 104 aa, Artificial Sequence; identical to SEQ ID NO: 12836
  Synthetic polypeptide

SEQ ID NO: 12838 - protein, 104 aa, Artificial Sequence; identical to SEQ ID NO: 12836
  Synthetic polypeptide

SEQ ID NO: 12839 - protein, 104 aa, Artificial Sequence; identical to SEQ ID NO: 12836
  Synthetic polypeptide

SEQ ID NO: 12840 - protein, 104 aa, Artificial Sequence; identical to SEQ ID NO: 12836
  Synthetic polypeptide

SEQ ID NO: 12841 - protein, 104 aa, Artificial Sequence; identical to SEQ ID NO: 12836
  Synthetic polypeptide

SEQ ID NO: 12842 - protein, 104 aa, Artificial Sequence; identical to SEQ ID NO: 12836
  Synthetic polypeptide

SEQ ID NO: 12843 - protein, 104 aa, Artificial Sequence; identical to SEQ ID NO: 12836
  Synthetic polypeptide

SEQ ID NO: 12844 - protein, 104 aa, Artificial Sequence; identical to SEQ ID NO: 12836
  Synthetic polypeptide

SEQ ID NO: 12845 - protein, 503 aa, Artificial Sequence
  Synthetic polypeptide
QGFSAVPHRDPGQCLEAARWGAWHLRYKDDADSPTEDGDKPRVLYSLEFTFDADARVAITIYCQASEEFLNGRAVYSPKSPSLQSETVHYKRGVSQQFSLPSFKIDFSEWKDDELNFDLDRGVFPVVIQAVVDEGDVVEVTGHAHVLLAAFEKHMDGSFSVKPLKQKQIVDRVSYLLQEIYGIENKNNQETKPSDDENSDNSNECVVCLSDLRDTLILPCRHLCLCTSCADTLRYQANNCPICRLPFRALLQIRAVRKKPGALSPVSFSPVLAQSLEHDEHSCPFKKSKPHPASLASKKPKRETNSDSVPPGYEPISLLEALNGLRAVSPAIPSAPLYEEITYSGISDGLSQASCPLAAIDHILDSSRQKGRPQSKAPDSTLRSPSSPIHEEDEEKLSEDVDAPPPLGGAELALRESSSPESFITEEVDESSSPQQGTRAASIENVLQDSSPEHCGRGPPADIYLPGRPTSMETAHGLATTSPTWPPLGGPSPDPSAAELTPL

SEQ ID NO: 12846 - protein, 458 aa, Artificial Sequence
  Synthetic polypeptide
QGFSAVPHRDPGQCLEAARWGAWHLRYKDDADSPTEDGDKPRVLYSLEFTFDADARVAITIYCQASEEFLNGRAVYSPKSPSLQSETVHYKRGVSQQFSLPSFKIDFSEWKDDELNFDLDRGVFPVVIQAVVDEGDAVVEVTGHAHVLLAAFEKHMDGSFSVKPLKQKQIVDRVSYLLQEIYGIENKNNQETKPSDDENSDNSNECVVCLSDLRDTLILPCRHLCLCTSCADTLRYQANNCPICRLPFRALLQIRAVRKKPGALSPVSFSPVLAQSLEHDEHSNSDSVPPGYEPISLLEALNGLRAVSPAIPSAPLYEEITYSGISDGLSQASCPLAAIDHILDSSRQKGRPQSKAPDSTLRSPSSPIHEEDEEKLSEDVDAPPPLGGAELALRESSSPESFITEEVDESSSPQQGTRAASIENVLQDSSPEHCGRGPPADIYLPALGPDSCSVGIDE

SEQ ID NO: 12847 - protein, 247 aa, Artificial Sequence
  Synthetic polypeptide
QGFSAVPHRDPGQCLEAARWGAWHLRYKDDADSPTEDGDKPRVLYSLEFTFDADARVAITIYCQASEEFLNGRAVYSPKSPSLQSETVHYKRGVSQQFSLPSFKIDFSEWKDDELNFDLDRGVFPVVIQAVVDEGDVVEVTGHAHVLLAAFEKHMDGSFSVKPLKQKQIVDRVSYLLQEIYGIENKNNQETKPSDDENSDNSNECVVCLSDLRDTLILPCRHLCLCTSCADTLRYQANNCPICRLQL

SEQ ID NO: 12848 - protein, 521 aa, Artificial Sequence
  Synthetic polypeptide
QGFSAVPHRDPGQCLEAARWGAWHLRYKDDADSPTEDGDKPRVLYSLEFTFDADARVAITIYCQASEEFLNGRAVYSPKSPSLQSETVHYKRGVSQQFSLPSFKIDFSEWKDDELNFDLDRGVFPVVIQAVVDEGDVVEVTGHAHVLLAAFEKHMDGSFSVKPLKQKQIVDRVSYLLQEIYGIENKNNQETKISWKVSQARFIMASGPRTTGAAPRGGSGAPGRASPQPREPSDDENSDNSNECVVCLSDLRDTLILPCRHLCLCTSCADTLRYQANNCPICRLPFRALLQIRAVRKKPGALSPVSFSPVLAQSLEHDEHSCPFKKSKPHPASLASKKPKRETNSDSVPPGYEPISLLEALNGLRAVSPAIPSAPLYEEITYSGISDGLSQASCPLAAIDHILDSSRQKGRPQSKAPDSTLRSPSSPIHEEDEEKLSEDVDAPPPLGGAELALRESSSPESFITEEVDESSSPQQGTRAASIENVLQDSSPEHCGRGPPADIYLPGRPTSMETAHGLATTS

SEQ ID NO: 12849 - protein, 479 aa, Artificial Sequence
  Synthetic polypeptide
QGFSAVPHRDPGQCLEAARWGAWHLRYKDDADSPTEDGDKPRVLYSLEFTFDADARVAITIYCQASEEFLNGRAVYSPKSPSLQSETVHYKRGVSQQFSLPSFKIDFSEWKDDELNFDLDRGVFPVVIQAVVDEGDVVEVTGHAHVLLAAFEKHMDGSFSVKPLKQKQIVDRVSYLLQEIYGIENKNNQETKPSDDENSDNSNECVVCLSDLRDTLILPCRHLCLCTSCADTLRYQANNCPICRLPFRALLQIRAVRKKPGALSPVSFSPVLAQSLEHDEHSCPFKKSKPHPASLASKKPKRETNSDSVPPGYEPISLLEALNGLRAVSPAIPSAPLYEEITYSGISDGLSQASCPLAAIDHILDSSRQKGRPQSKAPDSTLRSPSSPIHEEDEEKLSEDVDAPPPLGGAELALRESSSPESFITEEVDESSSPQQGTRAASIENVLQDSSPEHCGRGPPADIYLPALGPDSCSVGIDE

SEQ ID NO: 12850 - protein, 481 aa, Artificial Sequence
  Synthetic polypeptide
QGFSAVPHRDPGQCLEAARWGAWHLRYKDDADSPTEDGDKPRVLYSLEFTFDADARVAITIYCQASEEFLNGRAVYSPKSPSLQSETVHYKRGVSQQFSLPSFKIDFSEWKDDELNFDLDRGVFPVVIQAVVDEGDVVEVTGHAHVLLAAFEKHMDGSFSVKPLKQKQIVDRVSYLLQEIYGIENKNNQETKPSDDENSDNSNECVVCLSDLRDTLILPCRHLCLCTSCADTLRYQANNCPICRLPFRALLQIRAVRKKPGALSPVSFSPVLAQSLEHDEHSNSDSVPPGYEPISLLEALNGLRAVSPAIPSAPLYEEITYSGISDGLSQASCPLAAIDHILDSSRQKGRPQSKAPDSTLRSPSSPIHEEDEEKLSEDVDAPPPLGGAELALRESSSPESFITEEVDESSSPQQGTRAASIENVLQDSSPEHCGRGPPADIYLPGRPTSMETAHGLATTSPTWPPLGGPSPDPSAAELTPL

SEQ ID NO: 12851 - protein, 457 aa, Artificial Sequence
  Synthetic polypeptide
QGFSAVPHRDPGQCLEAARWGAWHLRYKDDADSPTEDGDKPRVLYSLEFTFDADARVAITIYCQASEEFLNGRAVYSPKSPSLQSETVHYKRGVSQQFSLPSFKIDFSEWKDDELNFDLDRGVFPVVIQAVVDEGDVVEVTGHAHVLLAAFEKHMDGSFSVKPLKQKQIVDRVSYLLQEIYGIENKNNQETKPSDDENSDNSNECVVCLSDLRDTLILPCRHLCLCTSCADTLRYQANNCPICRLPFRALLQIRAVRKKPGALSPVSFSPVLAQSLEHDEHSNSDSVPPGYEPISLLEALNGLRAVSPAIPSAPLYEEITYSGISDGLSQASCPLAAIDHILDSSRQKGRPQSKAPDSTLRSPSSPIHEEDEEKLSEDVDAPPPLGGAELALRESSSPESFITEEVDESSSPQQGTRAASIENVLQDSSPEHCGRGPPADIYLPALGPDSCSVGIDE

SEQ ID NO: 12852 - protein, 295 aa, Artificial Sequence
  Synthetic polypeptide
QGFSAVPHRDPGQCLEAARWGAWHLRYKDDADSPTEDGDKPRVLYSLEFTFDADARVAITIYCQASEEFLNGRAVYSPKSPSLQSETVHYKRGVSQQFSLPSFKIDFSEWKDDELNFDLDRGVFPVVIQAVVDEGDAVVEVTGHAHVLLAAFEKHMDGSFSVKPLKQKQIVDRVSYLLQEIYGIENKNNQETKPSDDENSDNSNECVVCLSDLRDTLILPCRHLCLCTSCADTLRYQANNCPICRLPFRALLQIRAVRKKPGALSPVSFSPVLAQSLEHDEHSCPFKKSKPHPAS

SEQ ID NO: 12853 - protein, 134 aa, Artificial Sequence
  Synthetic polypeptide
QGFSAVPHRDPGQCLEAARWGAWHLRYKDDADSPTEDGDKPRVLYSLEFTFDADARVAITIYCQASEEFLNGRAVYSPKSPSLQSETVHYKRGVSQHYLLQEIYGIENKNNQETKPSDDENSDNSNECVVCLSD

SEQ ID NO: 12854 - protein, 105 aa, Artificial Sequence
  Synthetic polypeptide
GLLSCAAQGPWAVSGGSQVGCLASQVQRRCRQPHRGRRQAPGALQPGVHLRRRCPRGHHHLLPGIGGVPERQGSIQPQEPLATVRDRPLQERGEPALPPAGDLWH

SEQ ID NO: 12855 - protein, 422 aa, Artificial Sequence
  Synthetic polypeptide
GRARWLMPVIPALWEAEAGGSRGQEIKTILANTLNFDLDRGVFPVVIQAVVDEGDVVEVTGHAHVLLAAFEKHMDGSFSVKPLKQKQIVDRVSYLLQEIYGIENKNNQETKPSDDENSDNSNECVVCLSDLRDTLILPCRHLCLCTSCADTLRYQANNCPICRLPFRALLQIRAVRKKPGALSPVSFSPVLAQSLEHDEHSCPFKKSKPHPASLASKKPKRETNSDSVPPGYEPISLLEALNGLRAVSPAIPSAPLYEEITYSGISDGLSQASCPLAAIDHILDSSRQKGRPQSKAPDSTLRSPSSPIHEEDEEKLSEDVDAPPPLGGAELALRESSSPESFITEEVDESSSPQQGTRAASIENVLQDSSPEHCGRGPPADIYLPGRPTSMETAHGLATTSPTWPPLGGPSPDPSAAELTPL

SEQ ID NO: 12856 - protein, 24 aa, Artificial Sequence
  Synthetic polypeptide
SQHFGRPRQADHEVRRSRPSWLTR

SEQ ID NO: 12857 - protein, 24 aa, Artificial Sequence
  Synthetic polypeptide
SQHFGRPRQADHEVRRSRPSWLTR

SEQ ID NO: 12858 - protein, 24 aa, Artificial Sequence
  Synthetic polypeptide
SQHFGRPRQADHEVRRSRPSWLTR

SEQ ID NO: 12859 - protein, 24 aa, Artificial Sequence
  Synthetic polypeptide
SQHFGRPRQADHEVRRSRPSWLTR

SEQ ID NO: 12860 - protein, 24 aa, Artificial Sequence
  Synthetic polypeptide
SQHFGRPRQADHEVRRSRPSWLTR

SEQ ID NO: 12861 - protein, 24 aa, Artificial Sequence
  Synthetic polypeptide
SQHFGRPRQADHEVRRSRPSWLTR

SEQ ID NO: 12862 - protein, 24 aa, Artificial Sequence
  Synthetic polypeptide
SQHFGRPRQADHEVRRSRPSWLTR

SEQ ID NO: 12863 - protein, 24 aa, Artificial Sequence
  Synthetic polypeptide
SQHFGRPRQADHEVRRSRPSWLTR

SEQ ID NO: 12864 - protein, 4 aa, Artificial Sequence
  Synthetic polypeptide
HAEL

SEQ ID NO: 12865 - protein, 4 aa, Artificial Sequence
  Synthetic polypeptide
HAEL

SEQ ID NO: 12866 - protein, 4 aa, Artificial Sequence
  Synthetic polypeptide
HAEL

SEQ ID NO: 12867 - protein, 4 aa, Artificial Sequence
  Synthetic polypeptide
HAEL

SEQ ID NO: 12868 - protein, 4 aa, Artificial Sequence
  Synthetic polypeptide
HAEL

SEQ ID NO: 12869 - protein, 4 aa, Artificial Sequence
  Synthetic polypeptide
HAEL

SEQ ID NO: 12870 - protein, 4 aa, Artificial Sequence
  Synthetic polypeptide
HAEL

SEQ ID NO: 12871 - protein, 4 aa, Artificial Sequence
  Synthetic polypeptide
HAEL

SEQ ID NO: 12872 - protein, 377 aa, Artificial Sequence
  Synthetic polypeptide
GRARWLMPVIPALWEAEAGGSRGQEIKTILANTLNFDLDRGVFPVVIQAVVDEGDAVVEVTGHAHVLLAAFEKHMDGSFSVKPLKQKQIVDRVSYLLQEIYGIENKNNQETKPSDDENSDNSNECVVCLSDLRDTLILPCRHLCLCTSCADTLRYQANNCPICRLPFRALLQIRAVRKKPGALSPVSFSPVLAQSLEHDEHSNSDSVPPGYEPISLLEALNGLRAVSPAIPSAPLYEEITYSGISDGLSQASCPLAAIDHILDSSRQKGRPQSKAPDSTLRSPSSPIHEEDEEKLSEDVDAPPPLGGAELALRESSSPESFITEEVDESSSPQQGTRAASIENVLQDSSPEHCGRGPPADIYLPALGPDSCSVGIDE

SEQ ID NO: 12873 - protein, 166 aa, Artificial Sequence
  Synthetic polypeptide
GRARWLMPVIPALWEAEAGGSRGQEIKTILANTLNFDLDRGVFPVVIQAVVDEGDVVEVTGHAHVLLAAFEKHMDGSFSVKPLKQKQIVDRVSYLLQEIYGIENKNNQETKPSDDENSDNSNECVVCLSDLRDTLILPCRHLCLCTSCADTLRYQANNCPICRLQL

SEQ ID NO: 12874 - protein, 440 aa, Artificial Sequence
  Synthetic polypeptide
GRARWLMPVIPALWEAEAGGSRGQEIKTILANTLNFDLDRGVFPVVIQAVVDEGDVVEVTGHAHVLLAAFEKHMDGSFSVKPLKQKQIVDRVSYLLQEIYGIENKNNQETKISWKVSQARFIMASGPRTTGAAPRGGSGAPGRASPQPREPSDDENSDNSNECVVCLSDLRDTLILPCRHLCLCTSCADTLRYQANNCPICRLPFRALLQIRAVRKKPGALSPVSFSPVLAQSLEHDEHSCPFKKSKPHPASLASKKPKRETNSDSVPPGYEPISLLEALNGLRAVSPAIPSAPLYEEITYSGISDGLSQASCPLAAIDHILDSSRQKGRPQSKAPDSTLRSPSSPIHEEDEEKLSEDVDAPPPLGGAELALRESSSPESFITEEVDESSSPQQGTRAASIENVLQDSSPEHCGRGPPADIYLPGRPTSMETAHGLATTS

SEQ ID NO: 12875 - protein, 398 aa, Artificial Sequence
  Synthetic polypeptide
GRARWLMPVIPALWEAEAGGSRGQEIKTILANTLNFDLDRGVFPVVIQAVVDEGDVVEVTGHAHVLLAAFEKHMDGSFSVKPLKQKQIVDRVSYLLQEIYGIENKNNQETKPSDDENSDNSNECVVCLSDLRDTLILPCRHLCLCTSCADTLRYQANNCPICRLPFRALLQIRAVRKKPGALSPVSFSPVLAQSLEHDEHSCPFKKSKPHPASLASKKPKRETNSDSVPPGYEPISLLEALNGLRAVSPAIPSAPLYEEITYSGISDGLSQASCPLAAIDHILDSSRQKGRPQSKAPDSTLRSPSSPIHEEDEEKLSEDVDAPPPLGGAELALRESSSPESFITEEVDESSSPQQGTRAASIENVLQDSSPEHCGRGPPADIYLPALGPDSCSVGIDE

SEQ ID NO: 12876 - protein, 400 aa, Artificial Sequence
  Synthetic polypeptide
GRARWLMPVIPALWEAEAGGSRGQEIKTILANTLNFDLDRGVFPVVIQAVVDEGDVVEVTGHAHVLLAAFEKHMDGSFSVKPLKQKQIVDRVSYLLQEIYGIENKNNQETKPSDDENSDNSNECVVCLSDLRDTLILPCRHLCLCTSCADTLRYQANNCPICRLPFRALLQIRAVRKKPGALSPVSFSPVLAQSLEHDEHSNSDSVPPGYEPISLLEALNGLRAVSPAIPSAPLYEEITYSGISDGLSQASCPLAAIDHILDSSRQKGRPQSKAPDSTLRSPSSPIHEEDEEKLSEDVDAPPPLGGAELALRESSSPESFITEEVDESSSPQQGTRAASIENVLQDSSPEHCGRGPPADIYLPGRPTSMETAHGLATTSPTWPPLGGPSPDPSAAELTPL

SEQ ID NO: 12877 - protein, 376 aa, Artificial Sequence
  Synthetic polypeptide
GRARWLMPVIPALWEAEAGGSRGQEIKTILANTLNFDLDRGVFPVVIQAVVDEGDVVEVTGHAHVLLAAFEKHMDGSFSVKPLKQKQIVDRVSYLLQEIYGIENKNNQETKPSDDENSDNSNECVVCLSDLRDTLILPCRHLCLCTSCADTLRYQANNCPICRLPFRALLQIRAVRKKPGALSPVSFSPVLAQSLEHDEHSNSDSVPPGYEPISLLEALNGLRAVSPAIPSAPLYEEITYSGISDGLSQASCPLAAIDHILDSSRQKGRPQSKAPDSTLRSPSSPIHEEDEEKLSEDVDAPPPLGGAELALRESSSPESFITEEVDESSSPQQGTRAASIENVLQDSSPEHCGRGPPADIYLPALGPDSCSVGIDE

SEQ ID NO: 12878 - protein, 214 aa, Artificial Sequence
  Synthetic polypeptide
GRARWLMPVIPALWEAEAGGSRGQEIKTILANTLNFDLDRGVFPVVIQAVVDEGDAVVEVTGHAHVLLAAFEKHMDGSFSVKPLKQKQIVDRVSYLLQEIYGIENKNNQETKPSDDENSDNSNECVVCLSDLRDTLILPCRHLCLCTSCADTLRYQANNCPICRLPFRALLQIRAVRKKPGALSPVSFSPVLAQSLEHDEHSCPFKKSKPHPAS

SEQ ID NO: 12879 - protein, 48 aa, Artificial Sequence
  Synthetic polypeptide
QLYAISSPTLYPVLQGQKCCTEQEMEMDTWIIYCQAVKIKIAKRVPST

SEQ ID NO: 12880 - protein, 48 aa, Artificial Sequence; identical to SEQ ID NO: 12879
  Synthetic polypeptide

SEQ ID NO: 12881 - protein, 55 aa, Artificial Sequence
  Synthetic polypeptide
LKAKKGCGNIPNERRLLSNSFMQFLVLHCILCCRDKNAVRNKRWRWTHGSFTARL

SEQ ID NO: 12882 - protein, 55 aa, Artificial Sequence; identical to SEQ ID NO: 12881
  Synthetic polypeptide

SEQ ID NO: 12883 - protein, 362 aa, Artificial Sequence
  Synthetic polypeptide
SYTVSCAAGTKMLYGTRDGDGHMDHLLPGCEDKNCQKSTIYLVRSGMKQWVPVLQDFSNKGTLWGFVPFVDEQQPTEIPIPITLHIGDYNMDGYPDALVILKNTSGSNQQAFLLENVPCNNASCEEARRMFKVYWELTDLNQIKDAMVATFFDIYEDGILDIVVLSKGYTKNDFAIHTLKNNFEADAYFVKVIVLSGLCSNDCPRKITPFGVNQPGPYIMYTTVDANGYLKNGSAGQLSQSAHLALQLPYNVLGLGRSANFLDHLYVGIPRPSGEKSIRKQEWTAIIPNSQLIVIPYPHNVPRSWSAKLYLTPSNIVLLTAIALIGVCVFILAIIGILHWQEKKADDREKRQEAHRFHFDAM

SEQ ID NO: 12884 - protein, 327 aa, Artificial Sequence
  Synthetic polypeptide
SYTVSCAAGTKMLYGTRDGDGHMDHLLPGCEDKNCQKSTIYLVRSGMKQWVPVLQDFSNKGTLWGFVPFVDEQQPTEIPIPITLHIGDYNMDGYPDALVILKNTSGSNQQAFLLENVPCNNASCEEARRMFKVYWELTDLNQIKDAMVATFFDIYEDGILDIVVLSKGYTKNDFAIHTLKNNFEADAYFVKVIVLSGLCSNDCPRKITPFGVNQPGPYIMYTTVDANGYLKNGSAGQLSQSAHLALQLPYNVLGLGRSANFLDHLYVGIPRPSGEKSIRKQEWTAIIPNSQLIVIPYPHNVPRSSHRCLCFHLGNNWHFTLAGKESR

SEQ ID NO: 12885 - protein, 84 aa, Artificial Sequence
  Synthetic polypeptide
GASLPGRPSSEMWGAPLPRGPVWDVRSASARLRPRLGTEECLCQTATPSGRNEPSDCYSITYRYLEVSTIPEGACPDWHNCIQQ

SEQ ID NO: 12886 - protein, 308 aa, Artificial Sequence
  Synthetic polypeptide
GVPLPGCDPVWELRSVSARPPPRLGEMSRQTATALPTGTSKCPPSQRVPALTGTTASNNDLASLFECPVCFDYVLPPILQCQSGHLVCSNCRPKLTCCPTCRGPLGSIRNLAMEKVANSVLFPCKYASSGCEITLPHTEKADHEELCEFRPYSCPCPGASCKWQGSLDAVMPHLMHQHKSITTLQGEDIVFLATDINLPGAVDWVMMQSCFGFHFMLVLEKQEKYDGHQQFFAIVQLIGTRKQAENFAYRLELNGHRRRLTWEATPRSIHEGIATAIMNSDCLVFDTSIAQLFAENGNLGINVTISMC

SEQ ID NO: 12887 - protein, 13 aa, Artificial Sequence
  Synthetic polypeptide
GVSLPDRHPVWEK

SEQ ID NO: 12888 - protein, 44 aa, Artificial Sequence
  Synthetic polypeptide
PALFLFSYGIFLFSLPAPSFLLPRISSQTNLRHPGHHQLAAHHL

SEQ ID NO: 12889 - protein, 358 aa, Artificial Sequence
  Synthetic polypeptide
APVVPGCNLPFSFSLMGFSCSLSLLPHFCFLGSPPKRTSDIQDITSLLHTIYEVVDSSVNHSPTSSKMLRVKLTVAPDGSQSKRSVLVNQADLQSARPRAETKPTEDLRSWEKKQRAPLRFQGDSRLEQSGCYHHCVDENIERRNHYLDLAGIENYTSQFGPGSPSVAQKSELPPRTSNPTRSRSHEPEAIHIPHRKPQGVDPASFHFLDTPIAKVSELQQRLRGTQDGSKHFVRSPKAQGKSVGVGHVARGARNKPPLGPAIPAVSPSAHLAASPALLPSLAPLGHKKHKHRAKESQQGCRGLQAPLASGGPVLGREHLRELPALVVYESQAGQPVQRHEHHHHHEHHHHYHHFYQT

SEQ ID NO: 12890 - protein, 39 aa, Artificial Sequence
  Synthetic polypeptide
DLLPNEPQTSRTSPACCTPSMRWWTPLSTTPQHPARCCG

SEQ ID NO: 12891 - protein, 6 aa, Artificial Sequence
  Synthetic polypeptide
TETEAS

SEQ ID NO: 12892 - protein, 6 aa, Artificial Sequence
  Synthetic polypeptide
TETEAS

SEQ ID NO: 12893 - protein, 525 aa, Artificial Sequence
  Synthetic polypeptide
LWGPCVSDGGVSIGLIQEGLSGVESIPFPHQHIRQKLRLLEELEDTWLPYLTPKDDEFYQQWQLKYPKLILREASSVSEELHKEVQEAFLTLHKHGCLFRDLVRIQGKDLLTPVSRILIGNPGCTYKYLNTRLFTVPWPVKGSNIKHTEAEIAAACETFLKLNDYLQIETIQALEELAAKEKANEDAVPLCMSADFPRVGMGSSYNGQDEVDIKSRAAYNVTLLNFMDPQKMPYLKEEPYFGMGKMAVSWHHDENLVDRSAVAVYSYSCEGPEEESEDDSHLEGRDPDIWHVGFKISWDIETPGLAIPLHQGDCYFMLDDLNATHQHCVLAGSQPRFSSTHRVAECSTGTLDYILQRCQLALQNVCDDVDNDDVSLKSFEPAVLKQGEEIHNEVEFEWLRQFWFQGNRYRKCTDWWCQPMAQLEALWKKMEGVTNAVLHEVKREGLPVEQRNEILTAILASLTARQNLRREWHARCQSRIARTLPADQKPECRPYWEKDDASMPLPFDLTDIVSELRGQLLEAKP

SEQ ID NO: 12894 - protein, 13 aa, Artificial Sequence
  Synthetic polypeptide
SPFPSPINILDRN

SEQ ID NO: 12895 - protein, 13 aa, Artificial Sequence
  Synthetic polypeptide
SPFPSPINILDRN

SEQ ID NO: 12896 - protein, 90 aa, Artificial Sequence
  Synthetic polypeptide
LWGPCVSDGGVSIGLIQEGLSGVESIPFPHQHIRQKLRLLEELEDTWLPYLTPKDDEFYQQALKRKVRMTLISKAGILIFGMLVLRSHGT

SEQ ID NO: 12897 - protein, 47 aa, Artificial Sequence
  Synthetic polypeptide
EVPFASCHDSEASQLCGTALKRKVRMTLISKAGILIFGMLVLRSHGT

SEQ ID NO: 12898 - protein, 47 aa, Artificial Sequence; identical to SEQ ID NO: 12897
  Synthetic polypeptide

SEQ ID NO: 12899 - protein, 93 aa, Artificial Sequence
  Synthetic polypeptide
DMVQLCPWANINLNCISQNSHMLWEGPKRNWLNHEAGLSRAILMIVNKSHEIWWVHQGFPLLLPPHFLLPLPCKKCLLPPAMIQRPLSYVVLP

SEQ ID NO: 12900 - protein, 93 aa, Artificial Sequence; identical to SEQ ID NO: 12899
  Synthetic polypeptide

SEQ ID NO: 12901 - protein, 264 aa, Artificial Sequence
  Synthetic polypeptide
FRGLSAMWYCPEEESEDDSHLEGRDPDIWHVGFKISWDIETPGLAIPLHQGDCYFMLDDLNATHQHCVLAGSQPRFSSTHRVAECSTGTLDYILQRCQLALQNVCDDVDNDDVSLKSFEPAVLKQGEEIHNEVEFEWLRQFWFQGNRYRKCTDWWCQPMAQLEALWKKMEGVTNAVLHEVKREGLPVEQRNEILTAILASLTARQNLRREWHARCQSRIARTLPADQKPECRPYWEKDDASMPLPFDLTDIVSELRGQLLEAKP

SEQ ID NO: 12902 - protein, 39 aa, Artificial Sequence
  Synthetic polypeptide
FRGLSAMWYCPEEESEDDSHLEGRDPDIWHVGFKISWDI

SEQ ID NO: 12903 - protein, 48 aa, Artificial Sequence
  Synthetic polypeptide
GKLDQWNQAWSQETWFRWLLHLRGLLQVRGMQMHLLQEELLLLLPCGV

SEQ ID NO: 12904 - protein, 48 aa, Artificial Sequence; identical to SEQ ID NO: 12903
  Synthetic polypeptide

SEQ ID NO: 12905 - protein, 48 aa, Artificial Sequence; identical to SEQ ID NO: 12903
  Synthetic polypeptide

SEQ ID NO: 12906 - protein, 71 aa, Artificial Sequence
  Synthetic polypeptide
TSGIRLGVKRHGSGGSCTCADSCKCEGCKCTSCKKSCCSCCPAECEKCAKDCVCKGGEAAEAEAEKCSCCQ

SEQ ID NO: 12907 - protein, 71 aa, Artificial Sequence; identical to SEQ ID NO: 12906
  Synthetic polypeptide

SEQ ID NO: 12908 - protein, 71 aa, Artificial Sequence; identical to SEQ ID NO: 12906
  Synthetic polypeptide

SEQ ID NO: 12909 - protein, 74 aa, Artificial Sequence
  Synthetic polypeptide
EARPVESGLESRDMVQVAPAPARTPASARDANAPPARRAAAPAALRSVRSVPRTVCAKAERQLRQKQRSAAAAS

SEQ ID NO: 12910 - protein, 74 aa, Artificial Sequence; identical to SEQ ID NO: 12909
  Synthetic polypeptide

SEQ ID NO: 12911 - protein, 74 aa, Artificial Sequence; identical to SEQ ID NO: 12909
  Synthetic polypeptide

SEQ ID NO: 12912 - protein, 39 aa, Artificial Sequence
  Synthetic polypeptide
GKLDQWNQAWSQETWFRWLLHLRGLLQVRGMQMHLLQEE

SEQ ID NO: 12913 - protein, 95 aa, Artificial Sequence
  Synthetic polypeptide
TSGIRLGVKRHGSGGSCTCADSCKCEGCKCTSCKKSECGDPSPLPPPPLLCGVGVSPRRMWRDSQAPIPWFLTLAGIEPPGQTLKYRCPCPTPRN

SEQ ID NO: 12914 - protein, 74 aa, Artificial Sequence
  Synthetic polypeptide
EARPVESGLESRDMVQVAPAPARTPASARDANAPPARRVSAGTLPLCRRPLCSAESVSHHAGCGETARPRSRGF

SEQ ID NO: 12915 - protein, 18 aa, Artificial Sequence
  Synthetic polypeptide
GRARWLTPVIPALWEAKA

SEQ ID NO: 12916 - protein, 18 aa, Artificial Sequence
  Synthetic polypeptide
GRARWLTPVIPALWEAKA

SEQ ID NO: 12917 - protein, 18 aa, Artificial Sequence
  Synthetic polypeptide
GRARWLTPVIPALWEAKA

SEQ ID NO: 12918 - protein, 18 aa, Artificial Sequence
  Synthetic polypeptide
GRARWLTPVIPALWEAKA

SEQ ID NO: 12919 - protein, 18 aa, Artificial Sequence
  Synthetic polypeptide
GRARWLTPVIPALWEAKA

SEQ ID NO: 12920 - protein, 18 aa, Artificial Sequence
  Synthetic polypeptide
GRARWLTPVIPALWEAKA

SEQ ID NO: 12921 - protein, 255 aa, Artificial Sequence
  Synthetic polypeptide
SQHFGRPRPEAAQQAFQGLGPGFSGYTPYGWLQLSWFQQIYARQYYMQYLAATAASGAFVPPPSAQEIPVVSAPAPAPIHNQFPAENQPANQNAAPQVVVNPGANQNLRMNAQGGPIVEEDDEINRDWLDWTYSAATFSVFLSILYFYSSLSRFLMVMGATVVMYLHHVGWFPFRPRPVQNFPNDGPPPDVVNQDPNNNLQEGTDPETEDPNHLPPDRDVLDGEQTSPSFMSTAWLVFKTFFASLLPEGPPAIAN

SEQ ID NO: 12922 - protein, 255 aa, Artificial Sequence; identical to SEQ ID NO: 12921
  Synthetic polypeptide

SEQ ID NO: 12923 - protein, 255 aa, Artificial Sequence; identical to SEQ ID NO: 12921
  Synthetic polypeptide

SEQ ID NO: 12924 - protein, 58 aa, Artificial Sequence
  Synthetic polypeptide
PGAVAHTCNPSTLGGQGLKLPSRHSKAWVLVSPVTHPMGGFSFPGSSRYMHDSTTCNI

SEQ ID NO: 12925 - protein, 58 aa, Artificial Sequence; identical to SEQ ID NO: 12924
  Synthetic polypeptide

SEQ ID NO: 12926 - protein, 58 aa, Artificial Sequence; identical to SEQ ID NO: 12924
  Synthetic polypeptide

SEQ ID NO: 12927 - protein, 58 aa, Artificial Sequence; identical to SEQ ID NO: 12924
  Synthetic polypeptide

SEQ ID NO: 12928 - protein, 58 aa, Artificial Sequence; identical to SEQ ID NO: 12924
  Synthetic polypeptide

SEQ ID NO: 12929 - protein, 81 aa, Artificial Sequence
  Synthetic polypeptide
SQHFGRPRPEAAQQAFQGLGPGFSGYTPYGWLQLSWFQQIYARQYYMQYLAATAASGAFVPPPSAQEIPVVSAPAPAPIHN

SEQ ID NO: 12930 - protein, 66 aa, Artificial Sequence
  Synthetic polypeptide
SQHFGRPRPEAAQQAFQGLGPGFSGYTPYGWLQLSWFQQIYARQYYMQYLAATAASGAFVPPPSAQ

SEQ ID NO: 12931 - protein, 48 aa, Artificial Sequence
  Synthetic polypeptide
SQHFGRPRPEAAQQAFQGLGPGFSGYTPYGWLQLSWFQQIYARQYYMQ

SEQ ID NO: 12932 - protein, 57 aa, Artificial Sequence
  Synthetic polypeptide
PGAVAHTCNPSTLGGQGLKLPSRHSKAWVLVSPVTHPMGGFSFPGSSRYMHDSTTCN

SEQ ID NO: 12933 - protein, 44 aa, Artificial Sequence
  Synthetic polypeptide
GRARWLTPIIPALWEAKPAAQNCDLHVCPGARGAEGAPGEGCIS

SEQ ID NO: 12934 - protein, 44 aa, Artificial Sequence; identical to SEQ ID NO: 12933
  Synthetic polypeptide

SEQ ID NO: 12935 - protein, 44 aa, Artificial Sequence; identical to SEQ ID NO: 12933
  Synthetic polypeptide

SEQ ID NO: 12936 - protein, 44 aa, Artificial Sequence; identical to SEQ ID NO: 12933
  Synthetic polypeptide

SEQ ID NO: 12937 - protein, 44 aa, Artificial Sequence; identical to SEQ ID NO: 12933
  Synthetic polypeptide

SEQ ID NO: 12938 - protein, 44 aa, Artificial Sequence; identical to SEQ ID NO: 12933
  Synthetic polypeptide

SEQ ID NO: 12939 - protein, 44 aa, Artificial Sequence; identical to SEQ ID NO: 12933
  Synthetic polypeptide

SEQ ID NO: 12940 - protein, 44 aa, Artificial Sequence; identical to SEQ ID NO: 12933
  Synthetic polypeptide

SEQ ID NO: 12941 - protein, 44 aa, Artificial Sequence; identical to SEQ ID NO: 12933
  Synthetic polypeptide

SEQ ID NO: 12942 - protein, 949 aa, Artificial Sequence
  Synthetic polypeptide
AGHGGSHLSSQHFGKQSLQHKTVIFMFAQEPEEQKGPQERAAFLDSLMLQMPSELPLSSRRMRLTHCGLQEKHLEQLCKALGGSCHLGHLHLDFSGNALGDEGAARLAQLLPGLGALQSLNLSENGLSLDAVLGLVRCFSTLQWLFRLDISFESQHILLRGDKTSRDMWATGSLPDFPAAAKFLGFRQRCIPRSLCLSECPLEPPSLTRLCATLKDCPGPLELQLSCEFLSDQSLETLLDCLPQLPQLSLLQLSQTGLSPKSPFLLANTLSLCPRVKKVDLRSLHHATLHFRSNEEEEGVCCGRFTGCSLSQEHVESLCWLLSKCKDLSQVDLSANLLGDSGLRCLLECLPQVPISGLLDLSHNSISQESALYLLETLPSCPRVREASVNLGSEQSFRIHFSREDQAGKTLRLSECSFRPEHVSRLATGLSKSLQLTELTLTQCCLGQKQLAILLSLVGRPAGLFSLRVQEPWADRARVLSLLEVCAQASGSVTEISISETQQQLCVQLEFPRQEENPEAVALRLAHCDLGAHHSLLVGQLMETCARLQQLSLSQVNLCEDDDASSLLLQSLLLSLSELKTFRLTSSCVSTEGLAHLASGLGHCHHLEELDLSNNQFDEEGTKALMRALEGKWMLKRLDLSHLLLNSSTLALLTHRLSQMTCLQSLRLNRNSIGDVGCCHLSEALRAATSLEELDLSHNQIGDAGVQHLATILPGLPELRKIDLSGNSISSAGGVQLAESLVLCRRLEELMLGCNALGDPTALGLAQELPQHLRVLHLPFSHLGPGGALSLAQALDGSPHLEEISLAENNLAGGVLRFCMELPLLRQIDLVSCKIDNQTAKLLTSSFTSCPALEVILLSWNLLGDEAAAELAQVLPQMGRLKRVDLEKNQITALGAWLLAEGLAQGSSIQVIRLWNNPIPCDMAQHLKSQEPRLDFAFFDNQPQAPWGT

SEQ ID NO: 12943 - protein, 22 aa, Artificial Sequence
  Synthetic polypeptide
PGTVAHTYHPSTLGSKACSTKL

SEQ ID NO: 12944 - protein, 22 aa, Artificial Sequence
  Synthetic polypeptide
PGTVAHTYHPSTLGSKACSTKL

SEQ ID NO: 12945 - protein, 22 aa, Artificial Sequence
  Synthetic polypeptide
PGTVAHTYHPSTLGSKACSTKL

SEQ ID NO: 12946 - protein, 22 aa, Artificial Sequence
  Synthetic polypeptide
PGTVAHTYHPSTLGSKACSTKL

SEQ ID NO: 12947 - protein, 22 aa, Artificial Sequence
  Synthetic polypeptide
PGTVAHTYHPSTLGSKACSTKL

SEQ ID NO: 12948 - protein, 22 aa, Artificial Sequence
  Synthetic polypeptide
PGTVAHTYHPSTLGSKACSTKL

SEQ ID NO: 12949 - protein, 22 aa, Artificial Sequence
  Synthetic polypeptide
PGTVAHTYHPSTLGSKACSTKL

SEQ ID NO: 12950 - protein, 22 aa, Artificial Sequence
  Synthetic polypeptide
PGTVAHTYHPSTLGSKACSTKL

SEQ ID NO: 12951 - protein, 22 aa, Artificial Sequence
  Synthetic polypeptide
PGTVAHTYHPSTLGSKACSTKL

SEQ ID NO: 12952 - protein, 920 aa, Artificial Sequence
  Synthetic polypeptide
AGHGGSHLSSQHFGKQSLQHKTVIFMFAQEPEEQKGPQERAAFLDSLMLQMPSELPLSSRRMRLTHCGLQEKHLEQLCKALGGSCHLGHLHLDFSGNALGDEGAARLAQLLPGLGALQSLNLSENGLSLDAVLGLVRCFSTLQWLFRLDISFESQHILLRGDKTSRDMWATGSLPDFPAAAKFLGFRQRCIPRSLCLSECPLEPPSLTRLCATLKDCPGPLELQLSCEFLSDQSLETLLDCLPQLPQLSLLQLSQTGLSPKSPFLLANTLSLCPRVKKVDLRSLHHATLHFRSNEEEEGVCCGLSANLLGDSGLRCLLECLPQVPISGLLDLSHNSISQESALYLLETLPSCPRVREASVNLGSEQSFRIHFSREDQAGKTLRLSECSFRPEHVSRLATGLSKSLQLTELTLTQCCLGQKQLAILLSLVGRPAGLFSLRVQEPWADRARVLSLLEVCAQASGSVTEISISETQQQLCVQLEFPRQEENPEAVALRLAHCDLGAHHSLLVGQLMETCARLQQLSLSQVNLCEDDDASSLLLQSLLLSLSELKTFRLTSSCVSTEGLAHLASGLGHCHHLEELDLSNNQFDEEGTKALMRALEGKWMLKRLDLSHLLLNSSTLALLTHRLSQMTCLQSLRLNRNSIGDVGCCHLSEALRAATSLEELDLSHNQIGDAGVQHLATILPGLPELRKIDLSGNSISSAGGVQLAESLVLCRRLEELMLGCNALGDPTALGLAQELPQHLRVLHLPFSHLGPGGALSLAQALDGSPHLEEISLAENNLAGGVLRFCMELPLLRQIDLVSCKIDNQTAKLLTSSFTSCPALEVILLSWNLLGDEAAAELAQVLPQMGRLKRVDLEKNQITALGAWLLAEGLAQGSSIQVIRLWNNPIPCDMAQHLKSQEPRLDFAFFDNQPQAPWGT

SEQ ID NO: 12953 - protein, 920 aa, Artificial Sequence; identical to SEQ ID NO: 12952
  Synthetic polypeptide

SEQ ID NO: 12954 - protein, 634 aa, Artificial Sequence
  Synthetic polypeptide
AGHGGSHLSSQHFGKQSLQHKTVIFMFAQEPEEQKGPQERAAFLDSLMLQMPSELPLSSRRMRLTHCGLQEKHLEQLCKALGGSCHLGHLHLDFSGNALGDEGAARLAQLLPGLGALQSLNLSENGLSLDAVLGLVRCFSTLQWLFRLDISFESQHILLRGDKTSRDMWATGSLPDFPAAAKFLGFRQRCIPRSLCLSECPLEPPSLTRLCATLKDCPGPLELQLSCEFLSDQSLETLLDCLPQLPQLSLLQLSQTGLSPKSPFLLANTLSLCPRVKKVDLRSLHHATLHFRSNEEEEGVCCGRFTGCSLSQEHVESLCWLLSKCKDLSQVDLSANLLGDSGLRCLLECLPQVPISGLLDLSHNSISQESALYLLETLPSCPRVREASVNLGSEQSFRIHFSREDQAGKTLRLSECSFRPEHVSRLATGLSKSLQLTELTLTQCCLGQKQLAILLSLVGRPAGLFSLRVQEPWADRARVLSLLEVCAQASGSVTEISISETQQQLCVQLEFPRQEENPEAVALRLAHCDLGAHHSLLVGQLMETCARLQQLSLSQVNLCEDDDASSLLLQSLLLSLSELKTFRIQSSQDPGRLLPDLLPFDPHQADLQLCEHRGPRPPGIWSGPLPPLGGAGLV

SEQ ID NO: 12955 - protein, 634 aa, Artificial Sequence; identical to SEQ ID NO: 12954
  Synthetic polypeptide

SEQ ID NO: 12956 - protein, 510 aa, Artificial Sequence
  Synthetic polypeptide
AGHGGSHLSSQHFGKQSLQHKTVIFMFAQEPEEQKGPQERAAFLDSLMLQMPSELPLSSRRMRLTHCGLQEKHLEQLCKALGGSCHLGHLHLDFSGNALGDEGAARLAQLLPGLGALQSLNLSENGLSLDAVLGLVRCFSTLQWLFRLDISFESQHILLRGDKTSRDMWATGSLPDFPAAAKFLGFRQRCIPRSLCLSECPLEPPSLTRLCATLKDCPGPLELQLSCEFLSDQSLETLLDCLPQLPQLSLLQLSQTGLSPKSPFLLANTLSLCPRVKKVDLRSLHHATLHFRSNEEEEGVCCGFTGCSLSQEHVESLCWLLSKCKDLSQVDLSANLLGDSGLRCLLECLPQVPISGLLDLSHNSISQESALYLLETLPSCPRVREASVNLGSEQSFRIHFSREDQAGKTLRLSECSFRPEHVSRLATGLSKSLQLTELTLTQCCLGQKQLAILLSLVGRPAGLFSLRDSTRHTEKLSFPTLEACALGFKKKRKKERKKVSEDTELRTKIN

SEQ ID NO: 12957 - protein, 412 aa, Artificial Sequence
  Synthetic polypeptide
AGHGGSHLSSQHFGKQSLQHKTVIFMFAQEPEEQKGPQERAAFLDSLMLQMPSELPLSSRRMRLTHCGLQEKHLEQLCKALGGSCHLGHLHLDFSGNALGDEGAARLAQLLPGLGALQSLNLSENGLSLDAVLGLVRCFSTLQWLFRLDISFESQHILLRGDKTSRDMWATGSLPDFPAAAKFLGFRQRCIPRSLCLSECPLEPPSLTRLCATLKDCPGPLELQLSCEFLSDQSLETLLDCLPQLPQLSLLQLSQTGLSPKSPFLLANTLSLCPRVKKVDLRSLHHATLHFRSNEEEEGVCCGRFTGCSLSQEHVESLCWLLSKCKDLSQVDLSANLLGDSGLRCLLECLPQVPISGLLDLSHNSISQESALYLLETLPSCPRVREASVKCLGSWHVWAPCFPRPFSLQPGL

SEQ ID NO: 12958 - protein, 461 aa, Artificial Sequence
  Synthetic polypeptide
AGHGGSHLSSQHFGKQSLQHKTVIFMFAQEPEEQKGPQERAAFLDSLMLQMPSELPLSSRRMRLTHCGLQEKHLEQLCKALGGSCHLGHLHLDFSGNALGDEGAARLAQLLPGLGALQSLNLSENGLSLDAVLGLVRCFSTLQWLFRLDISFESQHILLRGDKTSSLSECPLEPPSLTRLCATLKDCPGPLELQLSCEFLSDQSLETLLDCLPQLPQLSLLQLSQTGLSPKSPFLLANTLSLCPRVKKVDLRSLHHATLHFRSNEEEEGVCCGFTGCSLSQEHVESLCWLLSKCKDLSQVDLSANLLGDSGLRCLLECLPQVPISGLLDLSHNSISQESALYLLETLPSCPRVREASVNLGSEQSFRIHFSREDQAGKTLRLSECSFRPEHVSRLATGLSKSLQLTELTLTQCCLGQKQLAILLSLVGRPAGLFSLRDSTRHTEKLSFPTLEACALGFKKK

SEQ ID NO: 12959 - protein, 415 aa, Artificial Sequence
  Synthetic polypeptide
AGHGGSHLSSQHFGKQSLQHKTVIFMFAQEPEEQKGPQERAAFLDSLMLQMPSELPLSSRRMRLTHCGLQEKHLEQLCKALGGSCHLGHLHLDFSGNALGDEGAARLAQLLPGLGALQSLNLSENGLSLDAVLGLVRCFSTLQWLFRLDISFESQHILLRGDKTSSLSECPLEPPSLTRLCATLKDCPGPLELQLSCEFLSDQSLETLLDCLPQLPQLSLLQLSQTGLSPKSPFLLANTLSLCPRVKKVDLRSLHHATLHFRSNEEEEGVCCGRFTGCSLSQEHVESLCWLLSKCKDLSQVDLGSEQSFRIHFSREDQAGKTLRLSECSFRPEHVSRLATGLSKSLQLTELTLTQCCLGQKQLAILLSLVGRPAGLFSLRDSTRHTEKLSFPTLEACALGFKKKRKKERKKVSED

SEQ ID NO: 12960 - protein, 11 aa, Artificial Sequence
  Synthetic polypeptide
ALEDTTGFECV

SEQ ID NO: 12961 - protein, 11 aa, Artificial Sequence
  Synthetic polypeptide
ALEDTTGFECV

SEQ ID NO: 12962 - protein, 11 aa, Artificial Sequence
  Synthetic polypeptide
ALEDTTGFECV

SEQ ID NO: 12963 - protein, 11 aa, Artificial Sequence
  Synthetic polypeptide
ALEDTTGFECV

SEQ ID NO: 12964 - protein, 11 aa, Artificial Sequence
  Synthetic polypeptide
ALEDTTGFECV

SEQ ID NO: 12965 - protein, 11 aa, Artificial Sequence
  Synthetic polypeptide
ALEDTTGFECV

SEQ ID NO: 12966 - protein, 11 aa, Artificial Sequence
  Synthetic polypeptide
ALEDTTGFECV

SEQ ID NO: 12967 - protein, 11 aa, Artificial Sequence
  Synthetic polypeptide
ALEDTTGFECV

SEQ ID NO: 12968 - protein, 11 aa, Artificial Sequence
  Synthetic polypeptide
ALEDTTGFECV

SEQ ID NO: 12969 - protein, 11 aa, Artificial Sequence
  Synthetic polypeptide
ALEDTTGFECV

SEQ ID NO: 12970 - protein, 209 aa, Artificial Sequence
  Synthetic polypeptide
RTQLGLNVFEFGHTNRTTEFTNLNEHSSRSHALLIVTVRGVDCSTGLRTTGKLNLVDLAGSERVGKSGAEGSRLREAQHINKSLSALGDVIAALRSRQGHVPFRNSKLTYLLQDSLSGDSKTLMVVQVSPVEKNTSETLYSLKFAERVRSVELGPGLRRAELGSWSSQEHLEWEPACQTPQPSARAHSAPSSGTSSRPGSIRRKLQPSA

SEQ ID NO: 12971 - protein, 209 aa, Artificial Sequence; identical to SEQ ID NO: 12970
  Synthetic polypeptide

SEQ ID NO: 12972 - protein, 209 aa, Artificial Sequence; identical to SEQ ID NO: 12970
  Synthetic polypeptide

SEQ ID NO: 12973 - protein, 209 aa, Artificial Sequence; identical to SEQ ID NO: 12970
  Synthetic polypeptide

SEQ ID NO: 12974 - protein, 209 aa, Artificial Sequence; identical to SEQ ID NO: 12970
  Synthetic polypeptide

SEQ ID NO: 12975 - protein, 209 aa, Artificial Sequence; identical to SEQ ID NO: 12970
  Synthetic polypeptide

SEQ ID NO: 12976 - protein, 209 aa, Artificial Sequence; identical to SEQ ID NO: 12970
  Synthetic polypeptide

SEQ ID NO: 12977 - protein, 209 aa, Artificial Sequence; identical to SEQ ID NO: 12970
  Synthetic polypeptide

SEQ ID NO: 12978 - protein, 216 aa, Artificial Sequence
  Synthetic polypeptide
RTQLGLNVFEFGHTNRTTEFTNLNEHSSRSHALLIVTVRGVDCSTGLRTTGKLNLVDLAGSERVGKSGAEGSRLREAQHINKSLSALGDVIAALRSRQGHVPFRNSKLTYLLQDSLSGDSKTLMVVQVSPVEKNTSETLYSLKFAERVRSVELGPGLRRAELGSWSSQEHLEWEPACQTPQPSARAHSAPSSGTSSRPGSIRRKLQPSGKSRPLPV

SEQ ID NO: 12979 - protein, 200 aa, Artificial Sequence
  Synthetic polypeptide
RTQLGLNVFEFGHTNRTTEFTNLNEHSSRSHALLIVTVRGVDCSTGLRTTGKLNLVDLAGSERVGKSGAEGSRLREAQHINKSLSALGDVIAALRSRQGHVPFRNSKLTYLLQDSLSGDSKTLMVVQVSPVEKNTSETLYSLKFAERVRSVELGPGLRRAELGSWSSQEHLEWEPACQTPQPSARAHSAPSSGTSSRPGS

SEQ ID NO: 12980 - protein, 21 aa, Artificial Sequence
  Synthetic polypeptide
LCDLGTVNYHSAGRTPEGEAH

SEQ ID NO: 12981 - protein, 21 aa, Artificial Sequence
  Synthetic polypeptide
LCDLGTVNYHSAGRTPEGEAH

SEQ ID NO: 12982 - protein, 21 aa, Artificial Sequence
  Synthetic polypeptide
LCDLGTVNYHSAGRTPEGEAH

SEQ ID NO: 12983 - protein, 21 aa, Artificial Sequence
  Synthetic polypeptide
LCDLGTVNYHSAGRTPEGEAH

SEQ ID NO: 12984 - protein, 21 aa, Artificial Sequence
  Synthetic polypeptide
LCDLGTVNYHSAGRTPEGEAH

SEQ ID NO: 12985 - protein, 21 aa, Artificial Sequence
  Synthetic polypeptide
LCDLGTVNYHSAGRTPEGEAH

SEQ ID NO: 12986 - protein, 21 aa, Artificial Sequence
  Synthetic polypeptide
LCDLGTVNYHSAGRTPEGEAH

SEQ ID NO: 12987 - protein, 21 aa, Artificial Sequence
  Synthetic polypeptide
LCDLGTVNYHSAGRTPEGEAH

SEQ ID NO: 12988 - protein, 21 aa, Artificial Sequence
  Synthetic polypeptide
LCDLGTVNYHSAGRTPEGEAH

SEQ ID NO: 12989 - protein, 21 aa, Artificial Sequence
  Synthetic polypeptide
LCDLGTVNYHSAGRTPEGEAH

SEQ ID NO: 12990 - protein, 760 aa, Artificial Sequence
  Synthetic polypeptide
WPTTWAWSWVQTLTLALLISCVTLGQLITTLQVEHLKEKLISQAQEVSRLRSELGGTDLEKHRDLLMVENERLRQEMRRCEAELQELRTKPAGPCPGCEHSQESAQLRDKLSQLQLEMAESKGMLSELNLEVQQKTDRLAEVELRLKDCLAEKAQEEERLSRRLRDSHETIASLRAQSPPVKYVIKTVEVESSKTKQALSESQARNQHLQEQVAMQRQVLKEMEQQLQSSHQLTARLRAQIAMYESELERAHGQMLEEMQSLEEDKNRAIEEAFARAQVEMKAVHENLAGVRTNLLTLQPALRTLTNDYNGLKRQVRGFPLLLQEALRSVKAEIGQAIEEVNSNNQELLRKYRRELQLRKKCHNELVRLKGNIRVIARVRPVTKEDGEGPEATNAVTFDADDDSIIHLLHKGKPVSFELDKVFSPQASQQDVFQEVQALVTSCIDGFNVCIFAYGQTGAGKTYTMEGTAENPGINQRALQLLFSEVQEKASDWEYTITVSAAEIYNEVLRDLLGKEPQEKLEIRLCPDGSGQLYVPGLTEFQVQSVDDINKVFEFGHTNRTTEFTNLNEHSSRSHALLIVTVRGVDCSTGLRTTGKLNLVDLAGSERVGKSGAEGSRLREAQHINKSLSALGDVIAALRSRQGHVPFRNSKLTYLLQDSLSGDSKTLMVVQVSPVEKNTSETLYSLKFAERVRSVELGPGLRRAELGSWSSQEHLEWEPACQTPQPSARAHSAPSSGTSSRPGSIRRKLQPSGKSRPLPV

SEQ ID NO: 12991 - protein, 5 aa, Artificial Sequence
  Synthetic polypeptide
LPLCR

SEQ ID NO: 12992 - protein, 5 aa, Artificial Sequence
  Synthetic polypeptide
LPLCR

SEQ ID NO: 12993 - protein, 5 aa, Artificial Sequence
  Synthetic polypeptide
LPLCR

SEQ ID NO: 12994 - protein, 5 aa, Artificial Sequence
  Synthetic polypeptide
LPLCR

SEQ ID NO: 12995 - protein, 5 aa, Artificial Sequence
  Synthetic polypeptide
LPLCR

SEQ ID NO: 12996 - protein, 5 aa, Artificial Sequence
  Synthetic polypeptide
LPLCR

SEQ ID NO: 12997 - protein, 5 aa, Artificial Sequence
  Synthetic polypeptide
LPLCR

SEQ ID NO: 12998 - protein, 5 aa, Artificial Sequence
  Synthetic polypeptide
LPLCR

SEQ ID NO: 12999 - protein, 5 aa, Artificial Sequence
  Synthetic polypeptide
LPLCR

SEQ ID NO: 13000 - protein, 5 aa, Artificial Sequence
  Synthetic polypeptide
LPLCR

SEQ ID NO: 13001 - protein, 753 aa, Artificial Sequence
  Synthetic polypeptide
WPTTWAWSWVQTLTLALLISCVTLGQLITTLQVEHLKEKLISQAQEVSRLRSELGGTDLEKHRDLLMVENERLRQEMRRCEAELQELRTKPAGPCPGCEHSQESAQLRDKLSQLQLEMAESKGMLSELNLEVQQKTDRLAEVELRLKDCLAEKAQEEERLSRRLRDSHETIASLRAQSPPVKYVIKTVEVESSKTKQALSESQARNQHLQEQVAMQRQVLKEMEQQLQSSHQLTARLRAQIAMYESELERAHGQMLEEMQSLEEDKNRAIEEAFARAQVEMKAVHENLAGVRTNLLTLQPALRTLTNDYNGLKRQVRGFPLLLQEALRSVKAEIGQAIEEVNSNNQELLRKYRRELQLRKKCHNELVRLKGNIRVIARVRPVTKEDGEGPEATNAVTFDADDDSIIHLLHKGKPVSFELDKVFSPQASQQDVFQEVQALVTSCIDGFNVCIFAYGQTGAGKTYTMEGTAENPGINQRALQLLFSEVQEKASDWEYTITVSAAEIYNEVLRDLLGKEPQEKLEIRLCPDGSGQLYVPGLTEFQVQSVDDINKVFEFGHTNRTTEFTNLNEHSSRSHALLIVTVRGVDCSTGLRTTGKLNLVDLAGSERVGKSGAEGSRLREAQHINKSLSALGDVIAALRSRQGHVPFRNSKLTYLLQDSLSGDSKTLMVVQVSPVEKNTSETLYSLKFAERVRSVELGPGLRRAELGSWSSQEHLEWEPACQTPQPSARAHSAPSSGTSSRPGSIRRKLQPSA

SEQ ID NO: 13002 - protein, 753 aa, Artificial Sequence; identical to SEQ ID NO: 13001
  Synthetic polypeptide

SEQ ID NO: 13003 - protein, 753 aa, Artificial Sequence; identical to SEQ ID NO: 13001
  Synthetic polypeptide

SEQ ID NO: 13004 - protein, 753 aa, Artificial Sequence; identical to SEQ ID NO: 13001
  Synthetic polypeptide

SEQ ID NO: 13005 - protein, 152 aa, Artificial Sequence
  Synthetic polypeptide
WPTTWAWSWVQTLTLALLISCVTLGQLITTLQVEHLKEKLISQAQEVSRLRSELGGTDLEKHRDLLMVENERLRQEMRRCEAELQELRTKPAGPCPGCEHSQESAQLRDKLSQLQLEMAESKGMLSELNLEVQQKTDRLAEVELRLKDCLAE

SEQ ID NO: 13006 - protein, 133 aa, Artificial Sequence
  Synthetic polypeptide
WPTTWAWSWVQTLTLALLISCVTLGQLITTLQVEHLKEKLISQAQEVSRLRSELHRDLLMVENERLRQEMRRCEAELQELRTKPAGPCPGCEHSQESAQLRDKLSQLQLEMAESKGMLSELNLEVQQKTDRLA

SEQ ID NO: 13007 - protein, 89 aa, Artificial Sequence
  Synthetic polypeptide
WPTTWAWSWVQTLTLALLISCVTLGQLITTLQVEHLKEKLISQAQEVSRLRSELGGTDLEKHRDLLMVENERLRQEMRRCEAELQELRT

SEQ ID NO: 13008 - protein, 73 aa, Artificial Sequence
  Synthetic polypeptide
WPTTWAWSWVQTLTLALLISCVTLGQLITTLQVEHLKEKLISQAQEVSRLRSELGGTDLEKHRDLLMVENERL

SEQ ID NO: 13009 - protein, 59 aa, Artificial Sequence
  Synthetic polypeptide
WPTTWAWSWVQTLTLALLISCVTLGQLITTLQVEHLKEKLISQAQEVSRLRSELGGTDL

SEQ ID NO: 13010 - protein, 62 aa, Artificial Sequence
  Synthetic polypeptide
PAFPKLSQRRGAYGDMQLSIMWCPRWNRGTEIAPGGPMWKWDLQIPFWESLKPLRGTPIAKR

SEQ ID NO: 13011 - protein, 62 aa, Artificial Sequence; identical to SEQ ID NO: 13010
  Synthetic polypeptide

SEQ ID NO: 13012 - protein, 408 aa, Artificial Sequence
  Synthetic polypeptide
MESWNRNSSWWTHVEMGPPDPILGVTEAFKRDTNSKKMNLGVGAYRDDNGKPYVLPSVRKAEAQIAAKNLDKEYLPIGGLAEFCKASAELALGENSEVLKSGRFVTVQTISGTGALRIGASFLQRFFKFSRDVFLPKPTWGNHTPIFRDAGMQLQGYRYYDPKTCGFDFTGAVEDISKIPEQSVLLLHACAHNPTGVDPRPEQWKEIATVVKKRNLFAFFDMAYQGFASGDGDKDAWAVRHFIEQGINVCLCQSYAKNMGLYGERVGAFTMVCKDADEAKRVESQLKILIRPMYSNPPLNGARIAAAILNTPDLRKQWLQEVKVMADRIIGMRTQLVSNLKKEGSTHNWQHITDQIGMFCFTGLKPEQVERLIKEFSIYMTKDGRISVAGVTSSNVGYLAHAIHQVTK

SEQ ID NO: 13013 - protein, 365 aa, Artificial Sequence
  Synthetic polypeptide
MESWNRNSSWWTHVEMGPPDPILGVTEAFKRDTNSKKMNLGVGAYRDDNGKPYVLPSVRKFVTVQTISGTGALRIGASFLQRFFKFSRDVFLPKPTWGNHTPIFRDAGMQLQGYRYYDPKTCGFDFTGAVEDISKIPEQSVLLLHACAHNPTGVDPRPEQWKEIATVVKKRNLFAFFDMAYQGFASGDGDKDAWAVRHFIEQGINVCLCQSYAKNMGLYGERVGAFTMVCKDADEAKRVESQLKILIRPMYSNPPLNGARIAAAILNTPDLRKQWLQEVKVMADRIIGMRTQLVSNLKKEGSTHNWQHITDQIGMFCFTGLKPEQVERLIKEFSIYMTKDGRISVAGVTSSNVGYLAHAIHQVTK

SEQ ID NO: 13014 - protein, 68 aa, Artificial Sequence
  Synthetic polypeptide
RPRPCPPTPAQVLVILSQLEGNAGFSITHRLAHRKAAQAFLSDWTASKGTHSPPLTPEVAGLHGPRPL

SEQ ID NO: 13015 - protein, 13 aa, Artificial Sequence
  Synthetic polypeptide
APAPAPPPLHRSW

SEQ ID NO: 13016 - protein, 41 aa, Artificial Sequence
  Synthetic polypeptide
PPPLPPHPCTGPGDLVPARGQRRLLYHPPPGTSQGSPGLPQ

SEQ ID NO: 13017 - protein, 62 aa, Artificial Sequence
  Synthetic polypeptide
RPRPCPPTPAQVPPPLPRCTHTQLVPPHPCTGPGDLVPARGQRRLLYHPPPGTSQGSPGLPQ

SEQ ID NO: 13018 - protein, 88 aa, Artificial Sequence
  Synthetic polypeptide
APAPAPPPLHRCPLPYPAAPTPNSCPPTPAQVLVILSQLEGNAGFSITHRLAHRKAAQAFLSDWTASKGTHSPPLTPEVAGLHGPRPL

SEQ ID NO: 13019 - protein, 33 aa, Artificial Sequence
  Synthetic polypeptide
PPPLPPHPCTGAPSPTPLHPHPTRAPPPLHRSW

SEQ ID NO: 13020 - protein, 286 aa, Artificial Sequence
  Synthetic polypeptide
EREPDWEPEPGREPELEPKLEPALRRTERSAAAKPIARYNRTSYFYPTFSESSEHSHLLVSPVLVASAVIGVVIILSCITIIVGSIRRDRQARLQRHRHRHHRHHHHHHHHRRRRHREYEHGYVSDEHTYSRSSRRMRYACSSSEDWPPPLDISSDGDVDATVLRELYPDSPPGYEECVGPGATQLYVPTDAPPPYSLTDSCPTLDGTSDSGSGHSPGRHQQEQRTPAQGGLHTVSMDTLPPYEAVCGAGPPSGLLPLPGPDPGPRGSQGSPTPTRAPASGPERIV

SEQ ID NO: 13021 - protein, 154 aa, Artificial Sequence
  Synthetic polypeptide
AGTGLGAGAGAGTGAGAEAGAGTAAHGAERCSQADSTIQPHQLLLPHILRELGAQPSARVPRAGGECRHRCGHHPLLHHHHCGQHPQGQAGPASAAPPPPPPPPPPPSSPPPASTPRVRARLRVGRAHIQPLKPQDALCLQLLRGLAPTLGHQL

SEQ ID NO: 13022 - protein, 68 aa, Artificial Sequence
  Synthetic polypeptide
TGYYQLTGNNSIHAHRICVGTDTRNHNIDSWWRGVCTCDSSMLSCRRGPYLPEASVQSQRSLPEKACA

SEQ ID NO: 13023 - protein, 68 aa, Artificial Sequence; identical to SEQ ID NO: 13022
  Synthetic polypeptide

SEQ ID NO: 13024 - protein, 86 aa, Artificial Sequence
  Synthetic polypeptide
RLPTGSTAVTSEQDIINSLVTTVFMLIVSVLALIPETTTLTVGGGVFALVTAVCCLADGALIYRKLLFNPSGPYQKKPVHEKKEVL

SEQ ID NO: 13025 - protein, 86 aa, Artificial Sequence; identical to SEQ ID NO: 13024
  Synthetic polypeptide

SEQ ID NO: 13026 - protein, 19 aa, Artificial Sequence
  Synthetic polypeptide
DFLPGALQSLLNRILSTHW

SEQ ID NO: 13027 - protein, 19 aa, Artificial Sequence
  Synthetic polypeptide
DFLPGALQSLLNRILSTHW

SEQ ID NO: 13028 - protein, 19 aa, Artificial Sequence
  Synthetic polypeptide
DFLPGALQSLLNRILSTHW

SEQ ID NO: 13029 - protein, 19 aa, Artificial Sequence
  Synthetic polypeptide
DFLPGALQSLLNRILSTHW

SEQ ID NO: 13030 - protein, 36 aa, Artificial Sequence
  Synthetic polypeptide
TGYYQLTGNNSIHAHRICVGTDTRNHNIDSWWRVIL

SEQ ID NO: 13031 - protein, 36 aa, Artificial Sequence; identical to SEQ ID NO: 13030
  Synthetic polypeptide

SEQ ID NO: 13032 - protein, 47 aa, Artificial Sequence
  Synthetic polypeptide
RLPTGSTAVTSEQDIINSLVTTVFMLIVSVLALIPETTTLTVGGGLF

SEQ ID NO: 13033 - protein, 47 aa, Artificial Sequence; identical to SEQ ID NO: 13032
  Synthetic polypeptide

SEQ ID NO: 13034 - protein, 72 aa, Artificial Sequence
  Synthetic polypeptide
GGGGGGGGRGRLSTRASGTGPTRNARHASRTPAATAARKSLLWPQEPICLSSFFRPAGRENSDKHLAESMST

SEQ ID NO: 13035 - protein, 72 aa, Artificial Sequence; identical to SEQ ID NO: 13034
  Synthetic polypeptide

SEQ ID NO: 13036 - protein, 11 aa, Artificial Sequence
  Synthetic polypeptide
AAAAAAAAGGD

SEQ ID NO: 13037 - protein, 11 aa, Artificial Sequence
  Synthetic polypeptide
AAAAAAAAGGD

SEQ ID NO: 13038 - protein, 11 aa, Artificial Sequence
  Synthetic polypeptide
AAAAAAAAGGD

SEQ ID NO: 13039 - protein, 11 aa, Artificial Sequence
  Synthetic polypeptide
AAAAAAAAGGD

SEQ ID NO: 13040 - protein, 166 aa, Artificial Sequence
  Synthetic polypeptide
RRRRRRRPGAIKYTGFRDRPHEERQARFQNACRDGRSEIAFVATGTNLSLQFFPASWQGEQRQTPSREYVDLEREAGKVYLKAPMILNGVCVIWKGWIDLQRLDGMGCLEFDEERAQQEDALAQQAFEEARRRTREFEDRDRSHREEMEVRVSQLLAVTGKKTTRP

SEQ ID NO: 13041 - protein, 42 aa, Artificial Sequence
  Synthetic polypeptide
GGGGGGGGRGRLSTRASGTGPTRNARHASRTPAATAARKSYI

SEQ ID NO: 13042 - protein, 77 aa, Artificial Sequence
  Synthetic polypeptide
RRRRRRRPGAIKYTGFRDRPHEERQARFQNACRDGRSEIVYLKAPMILNGVCVIWKGWIDLQRLDGMGCLEFDEERA

SEQ ID NO: 13043 - protein, 171 aa, Artificial Sequence
  Synthetic polypeptide
RRRRRRRPGAIKYTGFRDRPHEERQARFQNACRDGRSEIAFVATGTNLSLQFFPASWQGEQRQTPSREYVDLEREAGKVYLKAPMILNGVCVIWKGWIDLQRLDGMGCLEFDEERAQQEDALAQQAFEEARRRTREFEDRDRSHREEMEARRQQDPSPGSNLGGGDDLKLR

SEQ ID NO: 13044 - protein, 52 aa, Artificial Sequence
  Synthetic polypeptide
GGGGGGGGRGRLSTRASGTGPTRNARHASRTPAATAARKSQEDNKTLVLVPI

SEQ ID NO: 13045 - protein, 61 aa, Artificial Sequence
  Synthetic polypeptide
RRRRRRRPGAIKYTGFRDRPHEERQARFQNACRDGRSEIARRQQDPSPGSNLGGGDDLKLR

SEQ ID NO: 13046 - protein, 85 aa, Artificial Sequence
  Synthetic polypeptide
QKAAQSSAQQRTTNRSDWKLPLRPCEPVTPAHNSTSGLSVFNGAGGKHTSGPKNRRVHRLHTPACPARGQRHPVWAAGPASGLAG

SEQ ID NO: 13047 - protein, 85 aa, Artificial Sequence; identical to SEQ ID NO: 13046
  Synthetic polypeptide

SEQ ID NO: 13048 - protein, 85 aa, Artificial Sequence; identical to SEQ ID NO: 13046
  Synthetic polypeptide

SEQ ID NO: 13049 - protein, 85 aa, Artificial Sequence; identical to SEQ ID NO: 13046
  Synthetic polypeptide

SEQ ID NO: 13050 - protein, 228 aa, Artificial Sequence
  Synthetic polypeptide
PRPTTQLLASVCSTVQVGSTPQDQRIVGYIACTHLHAPQEDSAIRCGQLDLLQDWLADFRKSTSSSSAANPEELVAFDVVCGDFNFDNCSSDDKLEQQHSLFTHYRDPCRLGPGEEKPWAIGTLLDTNGLYDEDVCTPDNLQKVLESEEGRREYLAFPTSKSSGQKGRKELLKGNGRRIDYMLHAEEGLCPDWKAEVEEFSFITQLSGLTDHLPVAMRLMVSSGEEEA

SEQ ID NO: 13051 - protein, 174 aa, Artificial Sequence
  Synthetic polypeptide
ACDPGPQLNFWPQCVQRCRWEAHLRTKESSGTSPAHTCMPRKRTAPSGVGSWTCFRTGWLISENLPPRPAQPTPRSWWHLTSSVEISTLITAPLTTSWSSNTPCSPTTGTPAAWGLVRRSRGPSVLCWTRTACTMRMCAPPTTCRRSWRVRRAAGSTWRFPPARARARRGGRSC

SEQ ID NO: 13052 - protein, 174 aa, Artificial Sequence; identical to SEQ ID NO: 13051
  Synthetic polypeptide

SEQ ID NO: 13053 - protein, 172 aa, Artificial Sequence
  Synthetic polypeptide
PRPTTQLLASVCSTVQVGSTPQDQRIVGYIACTHLHAPQEDSAIRCGQLDLLQDWLADFRKSTSSSSAANPEELVAFDVVCGDFNFDNCSSDDKLEQQHSLFTHYRDPCRLGPGEEKPWAIGTLLDTNGLYDEDVCTPDNLQKVLESEEGRREYLAFPTSKSSGQKGRKELL

SEQ ID NO: 13054 - protein, 211 aa, Artificial Sequence
  Synthetic polypeptide
PRPTTQLLASVCSTVQVGSTPQDQRIVGYIACTHLHAPQEDSAIRCGQLDLLQDWLADFRKSTSSSSAANPEELVAFDVVCGDFNFDNCSSDDKLEQQHSLFTHYRDPCRLGPGEEKPWAIGTLLDTNGLYDEDVCTPDNLQNKSSGQKGRKELLKGNGRRIDYMLHAEEGLCPDWKAEVEEFSFITQLSGLTDHLPVAMRLMVSSGEEEA

SEQ ID NO: 13055 - protein, 157 aa, Artificial Sequence
  Synthetic polypeptide
ACDPGPQLNFWPQCVQRCRWEAHLRTKESSGTSPAHTCMPRKRTAPSGVGSWTCFRTGWLISENLPPRPAQPTPRSWWHLTSSVEISTLITAPLTTSWSSNTPCSPTTGTPAAWGLVRRSRGPSVLCWTRTACTMRMCAPPTTCRTRARARRGGRSC

SEQ ID NO: 13056 - protein, 220 aa, Artificial Sequence
  Synthetic polypeptide
PRPTTQLLASVCSTVQVGSTPQDQRIVGYIACTHLHAPQEDSAIRCGQLDLLQDWLADFRKSTSSSSAANPEELVAFDVVCGDFNFDNCSSDDKLEQQHSLFTHYRDPCRLGPGTLLDTNGLYDEDVCTPDNLQKVLESEEGRREYLAFPTSKSSGQKGRKELLKGNGRRIDYMLHAEEGLCPDWKAEVEEFSFITQLSGLTDHLPVAMRLMVSSGEEEA

SEQ ID NO: 13057 - protein, 166 aa, Artificial Sequence
  Synthetic polypeptide
ACDPGPQLNFWPQCVQRCRWEAHLRTKESSGTSPAHTCMPRKRTAPSGVGSWTCFRTGWLISENLPPRPAQPTPRSWWHLTSSVEISTLITAPLTTSWSSNTPCSPTTGTPAAWGLVLCWTRTACTMRMCAPPTTCRRSWRVRRAAGSTWRFPPARARARRGGRSC

SEQ ID NO: 13058 - protein, 77 aa, Artificial Sequence
  Synthetic polypeptide
APRHKRHASRSGGHEGHRLGAHTHVHAPPQHRDQAAAVHQRTAGEPHQPAAGAHRGLEEGGQPAGQGPRERVQTSPA

SEQ ID NO: 13059 - protein, 700 aa, Artificial Sequence
  Synthetic polypeptide
VEWAGCGESEPLVTRGMQAGVGATRDIGSALTRMCMRHRSIETKLRQFTNALLESLINPLQERIEDWKKAANQLDKDHAKEYKRARHEIKKKSSDTLKLQKKARKELLGKGDLQPQLDSALQDVNDMYLLLEETEKQAVRRALIEERGRFCTFITFLQPVVNGELTMLGEITHLQGIIDDLVVLTAEPHKLPPASEQVIKDLKGSDYSWSYQTPPSSPSSSSSRKSSMCSAPSSSSSAKGGGAPWPGGAQTYSPSSTCRYRSLAQPATTTARLSSVSSHDSGFVSQDATYSKPPSPMPSDITSQKSSSSASSEASETCQSVSECSSPTSDWSKVGSHEQPSGATLQRRKDRVELLRDTEPGPASGGTLGPSGEEAPRPRMSPATIAAKHGEEVSPAASDLAMVLTRGLSLEHQKSSRDSLQYSSGYSTQTTTPSCSEDTIPSQGSDYDCYSVNGDADSEGPPEFDKSSTIPRNSNIAQNYRRLIQTKRPASTAGLPTAGLPTATGLPSGAPPGVATIRRTPSTKPTVRRALSSAGPIPIRPPIVPVKTPTVPDSPGYMGPTRAGSEECVFYTDETASPLAPDLAKASPKRLSLPNTAWGSPSPEAAGYPGAGAEDEQQQLAANRHSLVEKLGELVAGAHALGEGQFPFPTALSATPTEETPTPPPAATSDPPAEDMLVAIRRGVRLRRTVTNDRSAPRIL

SEQ ID NO: 13060 - protein, 96 aa, Artificial Sequence
  Synthetic polypeptide
WSGLVVERVSPSSQEACKQEWGPRGTSARRSHACACATAASRPSCGSSPTHCWRASSTRCRSASRTGRRRPTSWTRTTRKSTNEPGMRSKRSRRTR

SEQ ID NO: 13061 - protein, 608 aa, Artificial Sequence
  Synthetic polypeptide
GPAQVGKTSLILSLVGEEFPEEVPPRAEEITIPADVTPEKVPTHIVDYSEAEQTDEELREEIHKANVVCVVYDVSEEATIEKIRTKWIPLVNGGTTQGPRVPIILVGNKSDLRSGSSMEAVLPIMSQFPEIETCVECSAKNLRNISELFYYAQKAVLHPTAPLYDPEAKQLRPACAQALTRIFRLSDQDLDQALSDEELNAFQKSCFGHPLAPQALEDVKTVVCRNVAGGVREDRLTLDGFLFLNTLFIQRGRHETTWTILRRFGYSDALELTADYLSPLIHVPPGCSTELNHLGYQFVQRVFEKHDQDRDGALSPVELQSLFSVFPAAPWGPELPRTVRTEAGRLPLHGYLCQWTLVTYLDVRSCLGHLGYLGYPTLCEQDQAHAITVTREKRLDQEKGQTQRSVLLCKVVGARGVGKSAFLQAFLGRGLGHQDTREQPPGYAIDTVQVNGQEKYLILCEVGTDGLLATSLDATCDVACLMFDGSDPKSFAHCASVYKHHYMDGQTPCLFVSSKADLPEGVAVSGPSPAEFCRKHRLPAPVPFSCAGPAEPSTTIFTQLATMAAFPHLVHAELHPSSFWLRGLLGVVGAAVAAVLSFSLYRVLVKSQ

SEQ ID NO: 13062 - protein, 42 aa, Artificial Sequence
  Synthetic polypeptide
MVRLCGRGRKCGDSAGPRTGSAGRARGQSERLEDQPRWGRRR

SEQ ID NO: 13063 - protein, 42 aa, Artificial Sequence; identical to SEQ ID NO: 13062
  Synthetic polypeptide

SEQ ID NO: 13064 - protein, 42 aa, Artificial Sequence; identical to SEQ ID NO: 13062
  Synthetic polypeptide

SEQ ID NO: 13065 - protein, 42 aa, Artificial Sequence; identical to SEQ ID NO: 13062
  Synthetic polypeptide

SEQ ID NO: 13066 - protein, 42 aa, Artificial Sequence; identical to SEQ ID NO: 13062
  Synthetic polypeptide

SEQ ID NO: 13067 - protein, 42 aa, Artificial Sequence; identical to SEQ ID NO: 13062
  Synthetic polypeptide

SEQ ID NO: 13068 - protein, 42 aa, Artificial Sequence; identical to SEQ ID NO: 13062
  Synthetic polypeptide

SEQ ID NO: 13069 - protein, 104 aa, Artificial Sequence
  Synthetic polypeptide
WCGCAGGAGSVGTARGREPEVRGGRGGRAKGLRTSPGGEDVADPVPGGRGVPRGGPSPRGGDHHPRGRHPGEGAHPHRGLLRSRADGRGAAGGDPQGKRGVCGV

SEQ ID NO: 13070 - protein, 104 aa, Artificial Sequence; identical to SEQ ID NO: 13069
  Synthetic polypeptide

SEQ ID NO: 13071 - protein, 104 aa, Artificial Sequence; identical to SEQ ID NO: 13069
  Synthetic polypeptide

SEQ ID NO: 13072 - protein, 104 aa, Artificial Sequence; identical to SEQ ID NO: 13069
  Synthetic polypeptide

SEQ ID NO: 13073 - protein, 125 aa, Artificial Sequence
  Synthetic polypeptide
GPAQVGKTSLILSLVGEEFPEEVPPRAEEITIPADVTPEKVPTHIVDYSEAEQTDEELREEIHKANVVCVVYDVSEEATIEKIRTKWIPLVNGGTTQGPSGQQVRPAVGELHGGRAPHHEPVSRD

SEQ ID NO: 13074 - protein, 125 aa, Artificial Sequence; identical to SEQ ID NO: 13073
  Synthetic polypeptide

SEQ ID NO: 13075 - protein, 204 aa, Artificial Sequence
  Synthetic polypeptide
GPAQVGKTSLILSLVGEEFPEEVPPRAEEITIPADVTPEKVPTHIVDYSEAEQTDEELREEIHKANVVCVVYDVSEEATIEKIRTKWIPLVNGGTTQGPRVPIILVGNKSDLRSGSSMEAVLPIMSQFPEIETCVECSAKNLRNISELFYYAQKAVLHPTAPLYDPEAKQKSCFGHPLAPQALEDVKTVVCRNVAGGVREDRLT

SEQ ID NO: 13076 - protein, 62 aa, Artificial Sequence
  Synthetic polypeptide
GPAQVGKTSLILSLVGEEFPEEPSRRTRSCGRRSTRQTWCVWCMTSLRRPPLRRFELSGSHW

SEQ ID NO: 13077 - protein, 95 aa, Artificial Sequence
  Synthetic polypeptide
WCGCAGGAGSVGTARGREPEVRGGRGGRAKGLRTSPGGEDVADPVPGGRGVPRGAEQTDEELREEIHKANVVCVVYDVSEEATIEKIRTKWIPLV

SEQ ID NO: 13078 - protein, 45 aa, Artificial Sequence
  Synthetic polypeptide
GPAQVGKTSLILSLVGEEFPEEKPSRRTRSCGRRSTRFELSGSHW

SEQ ID NO: 13079 - protein, 78 aa, Artificial Sequence
  Synthetic polypeptide
WCGCAGGAGSVGTARGREPEVRGGRGGRAKGLRTSPGGEDVADPVPGGRGVPRGEAEQTDEELREEIHKIRTKWIPLV

SEQ ID NO: 13080 - protein, 201 aa, Artificial Sequence
  Synthetic polypeptide
GPAQVGKTSLILSLVGEEFPEEVPPRAEEITIPADVTPEKVPTHIVDYSEAEQTDEELREEIHKIRTKWIPLVNGGTTQGPRVPIILVGNKSDLRSGSSMEAVLPIMSQFPEIETCVECSAKNLRNISELFYYAQKAVLHPTAPLYDPEAKQLRPACAQALTRIFRLSDQDLDQALSDEELNAFQKSCFGHPLAPQALEDV

SEQ ID NO: 13081 - protein, 99 aa, Artificial Sequence
  Synthetic polypeptide
WCGCAGGAGSVGTARGREPEVRGGRGGRAKGLRTSPGGEDVADPVPGGRGVPRGGPSPRGGDHHPRGRHPGEGAHPHRGLLRSRADGRGAAGGDPQDSN

SEQ ID NO: 13082 - protein, 44 aa, Artificial Sequence
  Synthetic polypeptide
LCAQTKMTASRSPLRLQMAMWSTCFATSVRTTTDCAQKEMEYTP

SEQ ID NO: 13083 - protein, 44 aa, Artificial Sequence; identical to SEQ ID NO: 13082
  Synthetic polypeptide

SEQ ID NO: 13084 - protein, 44 aa, Artificial Sequence; identical to SEQ ID NO: 13082
  Synthetic polypeptide

SEQ ID NO: 13085 - protein, 44 aa, Artificial Sequence; identical to SEQ ID NO: 13082
  Synthetic polypeptide

SEQ ID NO: 13086 - protein, 26 aa, Artificial Sequence
  Synthetic polypeptide
PQTLNNVGRKRLATLWWPGNSVRRPR

SEQ ID NO: 13087 - protein, 26 aa, Artificial Sequence
  Synthetic polypeptide
PQTLNNVGRKRLATLWWPGNSVRRPR

SEQ ID NO: 13088 - protein, 26 aa, Artificial Sequence
  Synthetic polypeptide
PQTLNNVGRKRLATLWWPGNSVRRPR

SEQ ID NO: 13089 - protein, 26 aa, Artificial Sequence
  Synthetic polypeptide
PQTLNNVGRKRLATLWWPGNSVRRPR

SEQ ID NO: 13090 - protein, 355 aa, Artificial Sequence
  Synthetic polypeptide
VRNRDPPGLMNNPRLSTTWGEKDLQHYGGQVTLCADQDDRFPKPPEIANGYVEHLFRYQCKNYYRLRTEGDGVYTLNDKKQWINKAVGDKLPECEAVCGKPKNPANPVQRILGGHLDAKGSFPWQAKMVSHHNLTTGATLINEQWLLTTAKNLFLNHSENATAKDIAPTLTLYVGKKQLVEIEKVVLHPNYHQVDIGLIKLKQKVLVNERVMPICLPSKNYAEVGRVGYVSGWGQSDNFKLTDHLKYVMLPVADQYDCITHYEGSTCPKWKAPKSPVGVQPILNEHTFCVGMSKYQEDTCYGDAGSAFAVHDLEEDTWYAAGILSFDKSCAVAEYGVYVKVTSIQHWVQKTIAEN

SEQ ID NO: 13091 - protein, 355 aa, Artificial Sequence; identical to SEQ ID NO: 13090
  Synthetic polypeptide

SEQ ID NO: 13092 - protein, 355 aa, Artificial Sequence; identical to SEQ ID NO: 13090
  Synthetic polypeptide

SEQ ID NO: 13093 - protein, 124 aa, Artificial Sequence
  Synthetic polypeptide
VRNRDPPGLMNNPRLSTTWGEKDLQHYGGQVTLCADQDDRFPKPPEIANGYVEHLFRYQCKNYYRLRTEGDGVYTLNDKKQWINKAVGDKLPECEAVCGKPKNPANPVQRILGGHLVRGWDPKL

SEQ ID NO: 13094 - protein, 410 aa, Artificial Sequence
  Synthetic polypeptide
FSSKITQPGVTNHVKLFLCCSLKLNTLRVSPRGPSASVSQCQFYFVSLTTGRKLGVPWSLNGMHDLGAVISLLLWGRQLFALYSGNDVTDISDDRFPKPPEIANGYVEHLFRYQCKNYYRLRTEGDGVYTLNDKKQWINKAVGDKLPECEAVCGKPKNPANPVQRILGGHLDAKGSFPWQAKMVSHHNLTTGATLINEQWLLTTAKNLFLNHSENATAKDIAPTLTLYVGKKQLVEIEKVVLHPNYHQVDIGLIKLKQKVLVNERVMPICLPSKNYAEVGRVGYVSGWGQSDNFKLTDHLKYVMLPVADQYDCITHYEGSTCPKWKAPKSPVGVQPILNEHTFCVGMSKYQEDTCYGDAGSAFAVHDLEEDTWYAAGILSFDKSCAVAEYGVYVKVTSIQHWVQKTIAEN

SEQ ID NO: 13095 - protein, 410 aa, Artificial Sequence; identical to SEQ ID NO: 13094
  Synthetic polypeptide

SEQ ID NO: 13096 - protein, 410 aa, Artificial Sequence; identical to SEQ ID NO: 13094
  Synthetic polypeptide

SEQ ID NO: 13097 - protein, 103 aa, Artificial Sequence
  Synthetic polypeptide
GSAPEGHQLPFPNANFTLCLSQQGENLVFLGALMGCMTWELSFPSCSGDDSFLHCTQAMMSRIFQMTASRSPLRLQMAMWSTCFATSVRTTTDCAQKEMEYTP

SEQ ID NO: 13098 - protein, 103 aa, Artificial Sequence; identical to SEQ ID NO: 13097
  Synthetic polypeptide

SEQ ID NO: 13099 - protein, 103 aa, Artificial Sequence; identical to SEQ ID NO: 13097
  Synthetic polypeptide

SEQ ID NO: 13100 - protein, 103 aa, Artificial Sequence; identical to SEQ ID NO: 13097
  Synthetic polypeptide

SEQ ID NO: 13101 - protein, 179 aa, Artificial Sequence
  Synthetic polypeptide
FSSKITQPGVTNHVKLFLCCSLKLNTLRVSPRGPSASVSQCQFYFVSLTTGRKLGVPWSLNGMHDLGAVISLLLWGRQLFALYSGNDVTDISDDRFPKPPEIANGYVEHLFRYQCKNYYRLRTEGDGVYTLNDKKQWINKAVGDKLPECEAVCGKPKNPANPVQRILGGHLVRGWDPKL

SEQ ID NO: 13102 - protein, 93 aa, Artificial Sequence
  Synthetic polypeptide
WDAVSLSPSKSLPISLPLVILERMYGVTWELSFPSCSGDDSFLHCTQAMMSRIFQMTASRSPLRLQMAMWSTCFATSVRTTTDCAQKEMEYTP

SEQ ID NO: 13103 - protein, 93 aa, Artificial Sequence; identical to SEQ ID NO: 13102
  Synthetic polypeptide

SEQ ID NO: 13104 - protein, 93 aa, Artificial Sequence; identical to SEQ ID NO: 13102
  Synthetic polypeptide

SEQ ID NO: 13105 - protein, 93 aa, Artificial Sequence; identical to SEQ ID NO: 13102
  Synthetic polypeptide

SEQ ID NO: 13106 - protein, 406 aa, Artificial Sequence
  Synthetic polypeptide
GSAPEGHQLPFPNANFTLCLSQQGENLVFLGALMGCSELKSFQELTHQSALSHPRADVWCDLGAVISLLLWGRQLFALYSGNDVTDISDDRFPKPPEIANGYVEHLFRYQCKNYYRLRTEGDGVYTLNDKKQWINKAVGDKLPECEAVCGKPKNPANPVQRILGGHLDAKGSFPWQAKMVSHHNLTTGATLINEQWLLTTAKNLFLNHSENATAKDIAPTLTLYVGKKQLVEIEKVVLHPNYHQVDIGLIKLKQKVLVNERVMPICLPSKNYAEVGRVGYVSGWGQSDNFKLTDHLKYVMLPVADQYDCITHYEGSTCPKWKAPKSPVGVQPILNEHTFCVGMSKYQEDTCYGDAGSAFAVHDLEEDTWYAAGILSFDKSCAVAEYGVYVKVTSIQHWVQKTIAEN

SEQ ID NO: 13107 - protein, 406 aa, Artificial Sequence; identical to SEQ ID NO: 13106
  Synthetic polypeptide

SEQ ID NO: 13108 - protein, 406 aa, Artificial Sequence; identical to SEQ ID NO: 13106
  Synthetic polypeptide

SEQ ID NO: 13109 - protein, 175 aa, Artificial Sequence
  Synthetic polypeptide
GSAPEGHQLPFPNANFTLCLSQQGENLVFLGALMGCSELKSFQELTHQSALSHPRADVWCDLGAVISLLLWGRQLFALYSGNDVTDISDDRFPKPPEIANGYVEHLFRYQCKNYYRLRTEGDGVYTLNDKKQWINKAVGDKLPECEAVCGKPKNPANPVQRILGGHLVRGWDPKL

SEQ ID NO: 13110 - protein, 104 aa, Artificial Sequence
  Synthetic polypeptide
WDAVSLSPSKSLPISLPLVILERMYGGIVVDHYWTLPMTWELSFPSCSGDDSFLHCTQAMMSRIFQMTASRSPLRLQMAMWSTCFATSVRTTTDCAQKEMEYTP

SEQ ID NO: 13111 - protein, 104 aa, Artificial Sequence; identical to SEQ ID NO: 13110
  Synthetic polypeptide

SEQ ID NO: 13112 - protein, 104 aa, Artificial Sequence; identical to SEQ ID NO: 13110
  Synthetic polypeptide

SEQ ID NO: 13113 - protein, 104 aa, Artificial Sequence; identical to SEQ ID NO: 13110
  Synthetic polypeptide

SEQ ID NO: 13114 - protein, 417 aa, Artificial Sequence
  Synthetic polypeptide
GSAPEGHQLPFPNANFTLCLSQQGENLVFLGALMGCSELKSFQELTHQSALSHPRADVWWYCGGPLLDTADDLGAVISLLLWGRQLFALYSGNDVTDISDDRFPKPPEIANGYVEHLFRYQCKNYYRLRTEGDGVYTLNDKKQWINKAVGDKLPECEAVCGKPKNPANPVQRILGGHLDAKGSFPWQAKMVSHHNLTTGATLINEQWLLTTAKNLFLNHSENATAKDIAPTLTLYVGKKQLVEIEKVVLHPNYHQVDIGLIKLKQKVLVNERVMPICLPSKNYAEVGRVGYVSGWGQSDNFKLTDHLKYVMLPVADQYDCITHYEGSTCPKWKAPKSPVGVQPILNEHTFCVGMSKYQEDTCYGDAGSAFAVHDLEEDTWYAAGILSFDKSCAVAEYGVYVKVTSIQHWVQKTIAEN

SEQ ID NO: 13115 - protein, 417 aa, Artificial Sequence; identical to SEQ ID NO: 13114
  Synthetic polypeptide

SEQ ID NO: 13116 - protein, 417 aa, Artificial Sequence; identical to SEQ ID NO: 13114
  Synthetic polypeptide

SEQ ID NO: 13117 - protein, 186 aa, Artificial Sequence
  Synthetic polypeptide
GSAPEGHQLPFPNANFTLCLSQQGENLVFLGALMGCSELKSFQELTHQSALSHPRADVWWYCGGPLLDTADDLGAVISLLLWGRQLFALYSGNDVTDISDDRFPKPPEIANGYVEHLFRYQCKNYYRLRTEGDGVYTLNDKKQWINKAVGDKLPECEAVCGKPKNPANPVQRILGGHLVRGWDPKL

SEQ ID NO: 13118 - protein, 459 aa, Artificial Sequence
  Synthetic polypeptide
WDAVSLSPSKSLPISLPLVILERMYGGIVVDHYWTLPSNWSRTCTLIPLAIPFTLAFHQPEKTETKHCKTREAPHGSVDSHIYIDSTGVQRGVPDEFKAQNQTTAGFESTFFCDLGAVISLLLWGRQLFALYSGNDVTDISDDRFPKPPEIANGYVEHLFRYQCKNYYRLRTEGDGVYTLNDKKQWINKAVGDKLPECEAVCGKPKNPANPVQRILGGHLDAKGSFPWQAKMVSHHNLTTGATLINEQWLLTTAKNLFLNHSENATAKDIAPTLTLYVGKKQLVEIEKVVLHPNYHQVDIGLIKLKQKVLVNERVMPICLPSKNYAEVGRVGYVSGWGQSDNFKLTDHLKYVMLPVADQYDCITHYEGSTCPKWKAPKSPVGVQPILNEHTFCVGMSKYQEDTCYGDAGSAFAVHDLEEDTWYAAGILSFDKSCAVAEYGVYVKVTSIQHWVQKTIAEN

SEQ ID NO: 13119 - protein, 459 aa, Artificial Sequence; identical to SEQ ID NO: 13118
  Synthetic polypeptide

SEQ ID NO: 13120 - protein, 459 aa, Artificial Sequence; identical to SEQ ID NO: 13118
  Synthetic polypeptide

SEQ ID NO: 13121 - protein, 95 aa, Artificial Sequence
  Synthetic polypeptide
IPLESNEECQMNLRPKIRQLQDLNPRSSVTWELSFPSCSGDDSFLHCTQAMMSRIFQMTASRSPLRLQMAMWSTCFATSVRTTTDCAQKEMEYTP

SEQ ID NO: 13122 - protein, 95 aa, Artificial Sequence; identical to SEQ ID NO: 13121
  Synthetic polypeptide

SEQ ID NO: 13123 - protein, 95 aa, Artificial Sequence; identical to SEQ ID NO: 13121
  Synthetic polypeptide

SEQ ID NO: 13124 - protein, 95 aa, Artificial Sequence; identical to SEQ ID NO: 13121
  Synthetic polypeptide

SEQ ID NO: 13125 - protein, 228 aa, Artificial Sequence
  Synthetic polypeptide
WDAVSLSPSKSLPISLPLVILERMYGGIVVDHYWTLPSNWSRTCTLIPLAIPFTLAFHQPEKTETKHCKTREAPHGSVDSHIYIDSTGVQRGVPDEFKAQNQTTAGFESTFFCDLGAVISLLLWGRQLFALYSGNDVTDISDDRFPKPPEIANGYVEHLFRYQCKNYYRLRTEGDGVYTLNDKKQWINKAVGDKLPECEAVCGKPKNPANPVQRILGGHLVRGWDPKL

SEQ ID NO: 13126 - protein, 350 aa, Artificial Sequence
  Synthetic polypeptide
YYSSDLGAVISLLLWGRQLFALYSGNDVTDISDDRFPKPPEIANGYVEHLFRYQCKNYYRLRTEGDGVYTLNDKKQWINKAVGDKLPECEAVCGKPKNPANPVQRILGGHLDAKGSFPWQAKMVSHHNLTTGATLINEQWLLTTAKNLFLNHSENATAKDIAPTLTLYVGKKQLVEIEKVVLHPNYHQVDIGLIKLKQKVLVNERVMPICLPSKNYAEVGRVGYVSGWGQSDNFKLTDHLKYVMLPVADQYDCITHYEGSTCPKWKAPKSPVGVQPILNEHTFCVGMSKYQEDTCYGDAGSAFAVHDLEEDTWYAAGILSFDKSCAVAEYGVYVKVTSIQHWVQKTIAEN

SEQ ID NO: 13127 - protein, 350 aa, Artificial Sequence; identical to SEQ ID NO: 13126
  Synthetic polypeptide

SEQ ID NO: 13128 - protein, 350 aa, Artificial Sequence; identical to SEQ ID NO: 13126
  Synthetic polypeptide

SEQ ID NO: 13129 - protein, 125 aa, Artificial Sequence
  Synthetic polypeptide
FVNYTRDALKGTAEQLRPTSQMAWENKIALDMIPAKEGGDCVIIGTRCYTFIPNNTTPVTWELSFPSCSGDDSFLHCTQAMMSRIFQMTASRSPLRLQMAMWSTCFATSVRTTTDCAQKEMEYTP

SEQ ID NO: 13130 - protein, 125 aa, Artificial Sequence; identical to SEQ ID NO: 13129
  Synthetic polypeptide

SEQ ID NO: 13131 - protein, 125 aa, Artificial Sequence; identical to SEQ ID NO: 13129
  Synthetic polypeptide

SEQ ID NO: 13132 - protein, 125 aa, Artificial Sequence; identical to SEQ ID NO: 13129
  Synthetic polypeptide

SEQ ID NO: 13133 - protein, 119 aa, Artificial Sequence
  Synthetic polypeptide
YYSSDLGAVISLLLWGRQLFALYSGNDVTDISDDRFPKPPEIANGYVEHLFRYQCKNYYRLRTEGDGVYTLNDKKQWINKAVGDKLPECEAVCGKPKNPANPVQRILGGHLVRGWDPKL

SEQ ID NO: 13134 - protein, 255 aa, Artificial Sequence
  Synthetic polypeptide
HQSRHTSLETNTVVQTYNAGRPVWSCCWCLDEANYIYAGLANGSILVYDVRNTSSHVQELVAQKARCPLVSLSYMPRAASAAFPYGGVLAGTLEDASFWEQKMDFSHWPHVLPLEPGGCIDFQTENSSRHCLVTYRPDKNHTTIRSVLMEMSYRLDDTGNPICSCQPVHTFFGGPTCKLLTKNAIFQSPENDGNILVCTGDEAANSALLWDAASGSLLQDLQTDQPVLDICPFEVNRNSYLATLTEKMVHIYKWE

SEQ ID NO: 13135 - protein, 255 aa, Artificial Sequence; identical to SEQ ID NO: 13134
  Synthetic polypeptide

SEQ ID NO: 13136 - protein, 71 aa, Artificial Sequence
  Synthetic polypeptide
WNDRMEEALVPDIRVAIPAWRQIPWSRLIMLDVLSGAVAGVLMRLTTSMLDWPMVQFWYMTCETRAVMCRS

SEQ ID NO: 13137 - protein, 71 aa, Artificial Sequence; identical to SEQ ID NO: 13136
  Synthetic polypeptide

SEQ ID NO: 13138 - protein, 28 aa, Artificial Sequence
  Synthetic polypeptide
GMTGWRKLWCLTSESPYQPGDKYRGPDL

SEQ ID NO: 13139 - protein, 28 aa, Artificial Sequence
  Synthetic polypeptide
GMTGWRKLWCLTSESPYQPGDKYRGPDL

SEQ ID NO: 13140 - protein, 286 aa, Artificial Sequence
  Synthetic polypeptide
WLHKGSMENEPVALEETQKTDPAMEPRFKVVDWDKDLVDWRKPLLWQVGHLGEKYDEWVHQPVTRPIRLFHSDLIEGLSKTVWYSVPIIWVPLVLYLSWSYYRTFAQGNVRLFTSFTTEYTVAVPKSMFPGLFMLGTFLWSLIEYLIHRFLFHMKPPSDSYYLIMLHFVMHGQHHKAPFDGSRLVFPPVPASLVIGVFYLCMQLILPEAVGGTVFAGGLLGYVLYDMTHYYLHFGSPHKGSYLYSLKAHHVKHHFAHQKSGFGISTKLWDYCFHTLTPEKPHLKTQ

SEQ ID NO: 13141 - protein, 22 aa, Artificial Sequence
  Synthetic polypeptide
DEKVLEMDGSDGCTRAPWRTSL

SEQ ID NO: 13142 - protein, 22 aa, Artificial Sequence
  Synthetic polypeptide
DEKVLEMDGSDGCTRAPWRTSL

SEQ ID NO: 13143 - protein, 22 aa, Artificial Sequence
  Synthetic polypeptide
DEKVLEMDGSDGCTRAPWRTSL

SEQ ID NO: 13144 - protein, 70 aa, Artificial Sequence
  Synthetic polypeptide
WLHKGSMENEPVALEETQKTDPAMEPRFKVVDWDKSTRWQCPSPCSPGSSCWGHSSGASSSTSSTASCST

SEQ ID NO: 13145 - protein, 172 aa, Artificial Sequence
  Synthetic polypeptide
WLHKGSMENEPVALEETQKTDPAMEPRFKVVDWDKDLVDWRKPLLWQVGHLGEKYDEWVHQPVTRPIRLFHSDLIEGLSKTVWYSVPIIWVPLVLYLSWSYYRTFAQGNVRLFTSFTTEYTVAVPKSMFPGLFMLGTFLWSLIEYLIHRFLFHMKPPSDSYYLIMLHFVMHG

SEQ ID NO: 13146 - protein, 25 aa, Artificial Sequence
  Synthetic polypeptide
KMKRFWRWMAVMVAQGLHGERACSP

SEQ ID NO: 13147 - protein, 25 aa, Artificial Sequence
  Synthetic polypeptide
KMKRFWRWMAVMVAQGLHGERACSP

SEQ ID NO: 13148 - protein, 25 aa, Artificial Sequence
  Synthetic polypeptide
KMKRFWRWMAVMVAQGLHGERACSP

SEQ ID NO: 13149 - protein, 27 aa, Artificial Sequence
  Synthetic polypeptide
FYKMKRFWRWMAVMVAQGLHGERACSP

SEQ ID NO: 13150 - protein, 27 aa, Artificial Sequence
  Synthetic polypeptide
FYKMKRFWRWMAVMVAQGLHGERACSP

SEQ ID NO: 13151 - protein, 27 aa, Artificial Sequence
  Synthetic polypeptide
FYKMKRFWRWMAVMVAQGLHGERACSP

SEQ ID NO: 13152 - protein, 286 aa, Artificial Sequence; identical to SEQ ID NO: 13140
  Synthetic polypeptide

SEQ ID NO: 13153 - protein, 22 aa, Artificial Sequence
  Synthetic polypeptide
DEKVLEMDGSDGCTRAPWRTSL

SEQ ID NO: 13154 - protein, 22 aa, Artificial Sequence
  Synthetic polypeptide
DEKVLEMDGSDGCTRAPWRTSL

SEQ ID NO: 13155 - protein, 22 aa, Artificial Sequence
  Synthetic polypeptide
DEKVLEMDGSDGCTRAPWRTSL

SEQ ID NO: 13156 - protein, 70 aa, Artificial Sequence; identical to SEQ ID NO: 13144
  Synthetic polypeptide

SEQ ID NO: 13157 - protein, 172 aa, Artificial Sequence; identical to SEQ ID NO: 13145
  Synthetic polypeptide

SEQ ID NO: 13158 - protein, 88 aa, Artificial Sequence
  Synthetic polypeptide
KKGFKCPICSKSVASDEMEMHFIMCLSKPRLSYNDDVLTKDAGECVICLEELLQGDTIARLPCLCIYHKSCIDSWFEVNRSCPEHPAD

SEQ ID NO: 13159 - protein, 88 aa, Artificial Sequence; identical to SEQ ID NO: 13158
  Synthetic polypeptide

SEQ ID NO: 13160 - protein, 88 aa, Artificial Sequence
  Synthetic polypeptide
REKSSSFQKPKEQIIKEKSHTGTRFPIYNTKKLEDGGISSTDHGDKRNAAQASCTQASYPFSCQNERKVSSAPFAPSLWLLTRWKCTL

SEQ ID NO: 13161 - protein, 88 aa, Artificial Sequence; identical to SEQ ID NO: 13160
  Synthetic polypeptide

SEQ ID NO: 13162 - protein, 88 aa, Artificial Sequence; identical to SEQ ID NO: 13160
  Synthetic polypeptide

SEQ ID NO: 13163 - protein, 88 aa, Artificial Sequence; identical to SEQ ID NO: 13160
  Synthetic polypeptide

SEQ ID NO: 13164 - protein, 47 aa, Artificial Sequence
  Synthetic polypeptide
KMVEFHLQTTGIKGMQLKHPVPRQAIHSAVRMKERFQVPHLLQVCGF

SEQ ID NO: 13165 - protein, 47 aa, Artificial Sequence; identical to SEQ ID NO: 13164
  Synthetic polypeptide

SEQ ID NO: 13166 - protein, 47 aa, Artificial Sequence; identical to SEQ ID NO: 13164
  Synthetic polypeptide

SEQ ID NO: 13167 - protein, 47 aa, Artificial Sequence; identical to SEQ ID NO: 13164
  Synthetic polypeptide

SEQ ID NO: 13168 - protein, 139 aa, Artificial Sequence
  Synthetic polypeptide
KKGFKCPICSKSVASDEMEMHFIMCLSKPRLSYNGRIQRSLRGAQPEKTWLSGRTLQEQPWRTECSWAPMAQMQSYPHCPVENREDDVLTKDAGECVICLEELLQGDTIARLPCLCIYHKSCIDSWFEVNRSCPEHPAD

SEQ ID NO: 13169 - protein, 70 aa, Artificial Sequence
  Synthetic polypeptide
KKGFKCPICSKSVASDEMEMHFIMCLSKPRLSYNDDVLTKDAGECVICLEELLQGDTIARLPCLCIYHKR

SEQ ID NO: 13170 - protein, 105 aa, Artificial Sequence
  Synthetic polypeptide
GQVRWLTPVIPALWEAEEGGSPEIRSLGPAWPTWLRGPRHPPCAQRPVQDREWGGRRPRLLALAGVPAGQNRLPLLRGLPHQRGLGGHRCPLRGQDLRRGRGWGV

SEQ ID NO: 13171 - protein, 105 aa, Artificial Sequence; identical to SEQ ID NO: 13170
  Synthetic polypeptide

SEQ ID NO: 13172 - protein, 270 aa, Artificial Sequence
  Synthetic polypeptide
SQHFGRPRKVDHPRSGVWDQPGQHGCGVPAIHPVLSGLSRIVNGEDAVPGSWPWQVSLQDKTGFHFCGGSLISEDWVVTAAHCGVRTSDVVVAGEFDQGSDEENIQVLKIAKVFKNPKFSILTVNNDITLLKLATPARFSQTVSAVCLPSADDDFPAGTLCATTGWGKTKYNANKTPDKLQQAALPLLSNAECKKSWGRRITDVMICAGASGVSSCMGDSGGPLVCQKDGAWTLVGIVSWGSDTCSTSSPGVYARVTKLIPWVQKILAAN

SEQ ID NO: 13173 - protein, 50 aa, Artificial Sequence
  Synthetic polypeptide
PSAVANACNPSTLGGRGRWITRDQEFGTSLANMAAGSPPSTLCSAACPGS

SEQ ID NO: 13174 - protein, 50 aa, Artificial Sequence; identical to SEQ ID NO: 13173
  Synthetic polypeptide

SEQ ID NO: 13175 - protein, 165 aa, Artificial Sequence
  Synthetic polypeptide
SQHFGRPRKVDHPRSGVWDQPGQHGCGVPAIHPVLSGLSRIVNGEDAVPGSWPWQVSLQDKTGFHFCGGSLISEDWVVTAAHCGVRTSDVVVAGEFDQGSDEENIQVLKIAKVFKNPKFSILTVNNDITLLKLATPARFSQTVSAVCLPSADDDFPAGTLCATTG

SEQ ID NO: 13176 - protein, 270 aa, Artificial Sequence
  Synthetic polypeptide
GQVQWLMPVIRALWEAEGNQEAAAAPDTMAQPYASAQFAPPQNGIPAEYTAPHPHPAPEYTGQTTVPEHTLNLYPPAQTHSEQSPADTSAQTVSGTATTDDAAPTDGQPQTQPSENTENKSQPKRLHVSNIPFRFRDPDLRQMFGQFGKILDVEIIFNERGSKGFGFVTFENSADADRAREKLHGTVVEGRKIEVNNATARVMTNKKTVNPYTNGWKLNPVVGAVYSPEFYAGTVLLCQANQEGSSMYSAPSSLVYTSAMPGFPYPAATA

SEQ ID NO: 13177 - protein, 61 aa, Artificial Sequence
  Synthetic polypeptide
SEHFGRLRVIRKQPLPLTQWLSLTLRPSLLPRRTVSPRNTRPLIPTPRQSTQARPRFPSTH

SEQ ID NO: 13178 - protein, 61 aa, Artificial Sequence; identical to SEQ ID NO: 13177
  Synthetic polypeptide

SEQ ID NO: 13179 - protein, 61 aa, Artificial Sequence; identical to SEQ ID NO: 13177
  Synthetic polypeptide

SEQ ID NO: 13180 - protein, 61 aa, Artificial Sequence; identical to SEQ ID NO: 13177
  Synthetic polypeptide

SEQ ID NO: 13181 - protein, 61 aa, Artificial Sequence; identical to SEQ ID NO: 13177
  Synthetic polypeptide

SEQ ID NO: 13182 - protein, 61 aa, Artificial Sequence; identical to SEQ ID NO: 13177
  Synthetic polypeptide

SEQ ID NO: 13183 - protein, 61 aa, Artificial Sequence; identical to SEQ ID NO: 13177
  Synthetic polypeptide

SEQ ID NO: 13184 - protein, 61 aa, Artificial Sequence; identical to SEQ ID NO: 13177
  Synthetic polypeptide

SEQ ID NO: 13185 - protein, 61 aa, Artificial Sequence; identical to SEQ ID NO: 13177
  Synthetic polypeptide

SEQ ID NO: 13186 - protein, 61 aa, Artificial Sequence; identical to SEQ ID NO: 13177
  Synthetic polypeptide

SEQ ID NO: 13187 - protein, 61 aa, Artificial Sequence; identical to SEQ ID NO: 13177
  Synthetic polypeptide

SEQ ID NO: 13188 - protein, 61 aa, Artificial Sequence; identical to SEQ ID NO: 13177
  Synthetic polypeptide

SEQ ID NO: 13189 - protein, 61 aa, Artificial Sequence; identical to SEQ ID NO: 13177
  Synthetic polypeptide

SEQ ID NO: 13190 - protein, 61 aa, Artificial Sequence; identical to SEQ ID NO: 13177
  Synthetic polypeptide

SEQ ID NO: 13191 - protein, 405 aa, Artificial Sequence
  Synthetic polypeptide
GQVQWLMPVIRALWEAEGNQEAAAAPDTMAQPYASAQFAPPQNGIPAEYTAPHPHPAPEYTGQTTVPEHTLNLYPPAQTHSEQSPADTSAQTVSGTATQTDDAAPTDGQPQTQPSENTENKSQPKRLHVSNIPFRFRDPDLRQMFGQFGKILDVEIIFNERGSKGFGFVTFENSADADRAREKLHGTVVEGRKIEVNNATARVMTNKKTVNPYTNGWKLNPVVGAVYSPEFYAGTVLLCQANQEGSSMYSAPSSLVYTSAMPGFPYPAATAAAAYRGAHLRGRGRTVYNTFRAAAPPPPIPAYGGVVYQDGFYGADIYGGYAAYRYAQPTPATAAAYSDSYGRVYAADPYHHALAPAPTYGVGAMNAFAPLTDAKTRSHADDVGLVLSSLQASIYRGGYNRFAPY

SEQ ID NO: 13192 - protein, 405 aa, Artificial Sequence; identical to SEQ ID NO: 13191
  Synthetic polypeptide

SEQ ID NO: 13193 - protein, 405 aa, Artificial Sequence; identical to SEQ ID NO: 13191
  Synthetic polypeptide

SEQ ID NO: 13194 - protein, 378 aa, Artificial Sequence
  Synthetic polypeptide
GQVQWLMPVIRALWEAEGNQEAAAAPDTMAQPYASAQFAPPQNGIPAEYTAPHPHPAPEYTGQTTVPEHTLNLYPPAQTHSEQSPADTSAQTVSGTATQTDDAAPTDGQPQTQPSENTENKSQPKRLHVSNIPFRFRDPDLRQMFGQFGKILDVEIIFNERGSKGFGFVTFENSADADRAREKLHGTVVEGRKIEVNNATARVMTNKKTVNPYTNGWKLNPVVGAVYSPEFYAVPGFPYPAATAAAAYRGAHLRGRGRTVYNTFRAAAPPPPIPAYGGVVYQDGFYGADIYGGYAAYRYAQPTPATAAAYSDSYGRVYAADPYHHALAPAPTYGVGAMNAFAPLTDAKTRSHADDVGLVLSSLQASIYRGGYNRFAPY

SEQ ID NO: 13195 - protein, 431 aa, Artificial Sequence
  Synthetic polypeptide
GQVQWLMPVIRALWEAEGNQEAAAAPDTMAQPYASAQFAPPQNGIPAEYTAPHPHPAPEYTGQTTVPEHTLNLYPPAQTHSEQSPADTSAQTVSGTATQTDDAAPTDGQPQTQPSENTENKSQPKRLHVSNIPFRFRDPDLRQMFGQFGKILDVEIIFNERGSKGFGFVTFENSADADRAREKLHGTVVEGRKIEVNNATARVMTNKKTVNPYTNGWKLNPVVGAVYSPEFYAGTVLLCQANQEGSSMYSAPSSLVYTSAMPGFPYPAATAAAAYRGAHLRGRGRTVYNTFRAAAPPPPIPAYGGVVYQDGFYGADIYGGYAAYRYAQPTPATAAAYSDRNQFVFVAADEISCNTSAVTDEFMLPTPTTTHLLQPPPTALVPCPKVPAPAQTSEELSCTLPGLCCQAAENLTASPPLLQFMFKVIVAQERK

SEQ ID NO: 13196 - protein, 390 aa, Artificial Sequence
  Synthetic polypeptide
GQVQWLMPVIRALWEAEGNQEAAAAPDTMAQPYASAQFAPPQNGIPAEYTAPHPHPAPEYTGQTTVPEHTLNLYPPAQTHSEQSPADTSAQTVSGTATQTDDAAPTDGQPQTQPSENTENKSQPKRLHVSNIPFRFRDPDLRQMFGQFGKILDVEIIFNERGSKGFGFVTFENSADADRAREKLHGTVVEGRKIEVNNATARVMTNKKTVNPYTNGWKLNPVVGAVYSPEFYAGTVLLCQANQEGSSMYSAPSSLVYTSAMPGFPYPAATAAAAYRGAHLRGRGRTVYNTFRAAAPPPPIPAYGGVVYQDGFYGADIYGGYAAYRYAQPTPATAAAYSDSYGRVYAADPYHHALAPAPTYGVGAMPQGSSPSTDFRGAKLHTSRPLLSGS

SEQ ID NO: 13197 - protein, 352 aa, Artificial Sequence
  Synthetic polypeptide
GQVQWLMPVIRALWEAEGNQEAAAAPDTMAQPYASAQFAPPQNGIPAEYTAPHPHPAPEYTGQTTVPEHTLNLYPPAQTHSEQSPADTSAQTVSGTATQFGKILDVEIIFNERGSKVNNATARVMTNKKTVNPYTNGWKLNPVVGAVYSPEFYAGTVLLCQANQEGSSMYSAPSSLVYTSAMPGFPYPAATAAAAYRGAHLRGRGRTVYNTFRAAAPPPPIPAYGGVVYQDGFYGADIYGGYAAYRYAQPTPATAAAYSDRNQFVFVAADEISCNTSAVTDEFMLPTPTTTHLLQPPPTALVPCPKVPAPAQTSEELSCTLPGLCCQAAENLTASPPLLQFMFKVIVAQERK

SEQ ID NO: 13198 - protein, 363 aa, Artificial Sequence
  Synthetic polypeptide
GQVQWLMPVIRALWEAEGNQEAAAAPDTMAQPYASAQFAPPQNGIPAEYTAPHPHPAPEYTGQTTVPEHTLNLYPPAQTHSEQSPADTSAQTVSGTATTDDAAPTDGQPQTQPSENTENKSQPKRLHVSNIPFRFRDPDLRQMFGGFGFVTFENSADADRAREKLHGTVVEGRKIEVNNATARVMTNKKTVNPYTNGWKLNPVVGAVYSPEFYAGTVLLCQANQEGSSMYSAPSSLVYTSAMPGFPYPAATAAAAYRGAHLRGRGRTVYNTFRAAAPPPPIPAYGGVVYQDGFYGADIYGGYAAYRYAQPTPATAAAYSDRNQFVFVAADEISCNTSAVTDEFMLPTPTTTHLLQPPPTALVP

SEQ ID NO: 13199 - protein, 271 aa, Artificial Sequence
  Synthetic polypeptide
GQVQWLMPVIRALWEAEGNQEAAAAPDTMAQPYASAQFAPPQNGIPAEYTAPHPHPAPEYTGQTTVPEHTLNLYPPAQTHSEQSPADTSAQTVSGTATQTDDAAPTDGQPQTQPSENTENKSQPKRLHVSNIPFRFRDPDLRQMFGQFGKILDVEIIFNERGSKGFGFVTFENSADADRAREKLHGTVVEGRKIEVNNATARVMTNKKTVNPYTNGWKLNPVVGAVYSPEFYAGTVLLCQANQEGSSMYSAPSSLVYTSAMPGFPYPAATA

SEQ ID NO: 13200 - protein, 380 aa, Artificial Sequence
  Synthetic polypeptide
GQVQWLMPVIRALWEAEGNQEAAAAPDTMAQPYASAQFAPPQNGIPAEYTAPHPHPAPEYTGQTTVPEHTLNLYPPAQTHSEQSPADTSAQTVSGTATQTDDAAPTDGQPQTQPSENTENKSQPKRLHVSNIPFRFRDPDLRQMFGQFGKILDVEIIFNERGSKGFGFVTFENSADADRAREKLHGTVVEGRKIEVNNATARVMTNKKTVNPYTNGWKLNPVVGAVYSPEFYAGTVLLCQANQEGSSMYSAPSSLVYTSAMPGFPYPAATAAAAYRGAHLRGRGRTVYNTFRAAAPPPPIPAYGGVVYQEPVYGNKLLQGGYAAYRYAQPTPATAAAYSDSYGRVYAADPYHHALAPAPTYGVGAMASIYRGGYNRFAPY

SEQ ID NO: 13201 - protein, 406 aa, Artificial Sequence
  Synthetic polypeptide
GQVQWLMPVIRALWEAEGNQEAAAAPDTMAQPYASAQFAPPQNGIPAEYTAPHPHPAPEYTGQTTVPEHTLNLYPPAQTHSEQSPADTSAQTVSGTATQTDDAAPTDGQPQTQPSENTENKSQPKRLHVSNIPFRFRDPDLRQMFGQFGKILDVEIIFNERGSKGFGFVTFENSADADRAREKLHGTVVEGRKIEVNNATARVMTNKKTVNPYTNGWKLNPVVGAVYSPEFYAGTVLLCQANQEGSSMYSAPSSLVYTSAMPGFPYPAATAAAAYRGAHLRGRGRTVYNTFRAAAPPPPIPAYGGVVYQEPVYGNKLLQGGYAAYRYAQPTPATAAAYSDSYGRVYAADPYHHALAPAPTYGVGAMNAFAPLTDAKTRSHADDVGLVLSSLQASIYRGGYNRFAPY

SEQ ID NO: 13202 - protein, 383 aa, Artificial Sequence
  Synthetic polypeptide
GQVQWLMPVIRALWEAEGNQEAAAAPDTMAQPYASAQFAPPQNGIPAEYTAPHPHPAPEYTGQTTVPEHTLNLYPPAQTHSEQSPADTSAQTVSGTATQTDDAAPTDGQPQTQPSENTENKSQPKRLHVSNIPFRFRDPDLRQMFGQFGKILDVEIIFNERGSKGFGFVTFENSADADRAREKLHGTVVEGRKIEVNNATARVMTNKKTVNPYTNGWKLNPVVGAVYSPEFYAGTVLLCQANQEGSSMYSAPSSLVYTSAMPGFPYPAATAAAAYRGAHLRGRGRTVYNTFRAAAPPPPIPAYGGVVYQEPVYGNKLLQGGYAAYRYAQPTPATAAAYSDRNQFVFVAADEISCNTSAVTDEFMLPTPTTTHLLQPPPTALVP

SEQ ID NO: 13203 - protein, 195 aa, Artificial Sequence
  Synthetic polypeptide
GQVQWLMPVIRALWEAEGNQEAAAAPDTMAQPYASAQFAPPQNGIPAEYTAPHPHPAPEYTGQTTVPEHTLNLYPPAQTHSEQSPADTSAQTVSGTATQTDDAAPTDGQPQTQPSENTENKSQPKRLHVSNIPFRFRDPDLRQMFGQFGKILDVEIIFNERGSKGFGFVTFENSADADRAREKLHGTVVEGRKIE

SEQ ID NO: 13204 - protein, 38 aa, Artificial Sequence
  Synthetic polypeptide
GRARRLKLVIPALWEAEAGGSPENHRIRELQICLKKSM

SEQ ID NO: 13205 - protein, 17 aa, Artificial Sequence
  Synthetic polypeptide
SQHFGRPRRADHLRTTE

SEQ ID NO: 13206 - protein, 17 aa, Artificial Sequence
  Synthetic polypeptide
SQHFGRPRRADHLRTTE

SEQ ID NO: 13207 - protein, 27 aa, Artificial Sequence
  Synthetic polypeptide
GRARRLKLVIPALWEAEAGGSPENHRI

SEQ ID NO: 13208 - protein, 20 aa, Artificial Sequence
  Synthetic polypeptide
DPEPRNHRIRELQICLKKSM

SEQ ID NO: 13209 - protein, 8 aa, Artificial Sequence
  Synthetic polypeptide
TLSLGTTE

SEQ ID NO: 13210 - protein, 8 aa, Artificial Sequence
  Synthetic polypeptide
TLSLGTTE

SEQ ID NO: 13211 - protein, 9 aa, Artificial Sequence
  Synthetic polypeptide
DPEPRNHRI

SEQ ID NO: 13212 - protein, 25 aa, Artificial Sequence
  Synthetic polypeptide
EQRLFTSRSPAPKTMPAWCKGKPSL

SEQ ID NO: 13213 - protein, 54 aa, Artificial Sequence
  Synthetic polypeptide
ASCQTYPYRHQSNDYCLLPDLGCELHENRDCLPLAPLHLKQCLLGVKASQVFED

SEQ ID NO: 13214 - protein, 11 aa, Artificial Sequence
  Synthetic polypeptide
SRQGWRSEDSN

SEQ ID NO: 13215 - protein, 11 aa, Artificial Sequence
  Synthetic polypeptide
SRQGWRSEDSN

SEQ ID NO: 13216 - protein, 160 aa, Artificial Sequence
  Synthetic polypeptide
ADKDGDLKTQIEKLWTEVNALKEIQALQTVCLRGTKVHKKCYLASEGLKHFHEANEDCISKGGILVIPRNSDEINALQDYGKRSLPGVNDFWLGINDMVTEGKFVDVNGIAISFLNWDRAQPNGGKRENCVLFSQSAQGKWSDEACRSSKRYICEFTIPQ

SEQ ID NO: 13217 - protein, 160 aa, Artificial Sequence; identical to SEQ ID NO: 13216
  Synthetic polypeptide

SEQ ID NO: 13218 - protein, 6 aa, Artificial Sequence
  Synthetic polypeptide
QTRMEI

SEQ ID NO: 13219 - protein, 6 aa, Artificial Sequence
  Synthetic polypeptide
QTRMEI

SEQ ID NO: 13220 - protein, 22 aa, Artificial Sequence
  Synthetic polypeptide
LTRRLGLVNFSSAQLLIYRYLL

SEQ ID NO: 13221 - protein, 14 aa, Artificial Sequence
  Synthetic polypeptide
LISPVLSFLSTGIC

SEQ ID NO: 13222 - protein, 13 aa, Artificial Sequence
  Synthetic polypeptide
FLQCSASYLQVSA

SEQ ID NO: 13223 - protein, 64 aa, Artificial Sequence
  Synthetic polypeptide
RRFLLPLRLLPWCNRELPPPCTVLLSQNWRVWEGCTSTTAAAACPHQKLRAKRRPGPCGRSARG

SEQ ID NO: 13224 - protein, 64 aa, Artificial Sequence; identical to SEQ ID NO: 13223
  Synthetic polypeptide

SEQ ID NO: 13225 - protein, 64 aa, Artificial Sequence; identical to SEQ ID NO: 13223
  Synthetic polypeptide

SEQ ID NO: 13226 - protein, 64 aa, Artificial Sequence; identical to SEQ ID NO: 13223
  Synthetic polypeptide

SEQ ID NO: 13227 - protein, 88 aa, Artificial Sequence
  Synthetic polypeptide
FVLCSFSLLPPCEEGSCFPFVFCHGATGSCHHRVLCCCPRTGGSGRDVLQQLLPLHALTRSSERRDGPDPVGAQREADPRTAWQPVRL

SEQ ID NO: 13228 - protein, 88 aa, Artificial Sequence; identical to SEQ ID NO: 13227
  Synthetic polypeptide

SEQ ID NO: 13229 - protein, 91 aa, Artificial Sequence
  Synthetic polypeptide
VFGSSFCVHSPSCRLVKKVLASPSSSAMVQQGAATTVYCAAVPELEGLGGMYFNNCCRCMPSPEAQSEETARTLWALSERLIQERLGSQSG

SEQ ID NO: 13230 - protein, 91 aa, Artificial Sequence; identical to SEQ ID NO: 13229
  Synthetic polypeptide

SEQ ID NO: 13231 - protein, 91 aa, Artificial Sequence; identical to SEQ ID NO: 13229
  Synthetic polypeptide

SEQ ID NO: 13232 - protein, 200 aa, Artificial Sequence
  Synthetic polypeptide
FVLCSFSLLPPCEEGSCFPFVFCHGATGSCHHRVLCCCPRTGGSGRDVLQQLLPLHALTRSSERRDGPDPVGAQREADPRTAWQPVRLSGAQSGWAHTPALCVSPHASARAGPLPNVPPTQIRKSKGNKSSHNRVKNLKYQWEAGNSWGKVSLFWGWARHRSLCFLVVACLKVKTCLVCRFRISLEKHQQFSFFYCYRIA

SEQ ID NO: 13233 - protein, 77 aa, Artificial Sequence
  Synthetic polypeptide
FVLCSFSLLPPCEEGSCFPFVFCHGATGSCHHRVLCCCPRTGGSGRDVLQQLLPLHALTRSSERRDGPDPVGAQREA

SEQ ID NO: 13234 - protein, 81 aa, Artificial Sequence
  Synthetic polypeptide
VFGSSFCVHSPSCRLVKKVLASPSSSAMVQQGAATTVYCAAVPELEGLGGMYFNNCCRCMPSPEAQSEETARTLWALSERL

SEQ ID NO: 13235 - protein, 59 aa, Artificial Sequence
  Synthetic polypeptide
GLPSHVKRNRELPPPCTVLLSQNWRVWEGCTSTTAAAACPHQKLRAKRRPGPCGRSARG

SEQ ID NO: 13236 - protein, 59 aa, Artificial Sequence; identical to SEQ ID NO: 13235
  Synthetic polypeptide

SEQ ID NO: 13237 - protein, 59 aa, Artificial Sequence; identical to SEQ ID NO: 13235
  Synthetic polypeptide

SEQ ID NO: 13238 - protein, 59 aa, Artificial Sequence; identical to SEQ ID NO: 13235
  Synthetic polypeptide

SEQ ID NO: 13239 - protein, 64 aa, Artificial Sequence
  Synthetic polypeptide
NATGSCHHRVLCCCPRTGGSGRDVLQQLLPLHALTRSSERRDGPDPVGAQREADPRTAWQPVRL

SEQ ID NO: 13240 - protein, 64 aa, Artificial Sequence; identical to SEQ ID NO: 13239
  Synthetic polypeptide

SEQ ID NO: 13241 - protein, 103 aa, Artificial Sequence
  Synthetic polypeptide
VFGSSFCVHSPSCRLVKKVLASPSSSAMVVSFLRPPQSCETQQGAATTVYCAAVPELEGLGGMYFNNCCRCMPSPEAQSEETARTLWALSERLIQERLGSQSG

SEQ ID NO: 13242 - protein, 103 aa, Artificial Sequence; identical to SEQ ID NO: 13241
  Synthetic polypeptide

SEQ ID NO: 13243 - protein, 103 aa, Artificial Sequence; identical to SEQ ID NO: 13241
  Synthetic polypeptide

SEQ ID NO: 13244 - protein, 176 aa, Artificial Sequence
  Synthetic polypeptide
NATGSCHHRVLCCCPRTGGSGRDVLQQLLPLHALTRSSERRDGPDPVGAQREADPRTAWQPVRLSGAQSGWAHTPALCVSPHASARAGPLPNVPPTQIRKSKGNKSSHNRVKNLKYQWEAGNSWGKVSLFWGWARHRSLCFLVVACLKVKTCLVCRFRISLEKHQQFSFFYCYRIA

SEQ ID NO: 13245 - protein, 53 aa, Artificial Sequence
  Synthetic polypeptide
NATGSCHHRVLCCCPRTGGSGRDVLQQLLPLHALTRSSERRDGPDPVGAQREA

SEQ ID NO: 13246 - protein, 93 aa, Artificial Sequence
  Synthetic polypeptide
VFGSSFCVHSPSCRLVKKVLASPSSSAMVVSFLRPPQSCETQQGAATTVYCAAVPELEGLGGMYFNNCCRCMPSPEAQSEETARTLWALSERL

SEQ ID NO: 13247 - protein, 131 aa, Artificial Sequence
  Synthetic polypeptide
EAKTFETHNSTTPLQERSLGLDINMDSRIIHENIVEKERVQRITQETFGDYPQPQLEFAQYKLETKFKSGLNGSILAEREEPLRCLIKFSSPHLLEALKSLAPAGIADAPLSPLLTCIPNKRMNYFKIRDK

SEQ ID NO: 13248 - protein, 131 aa, Artificial Sequence; identical to SEQ ID NO: 13247
  Synthetic polypeptide

SEQ ID NO: 13249 - protein, 131 aa, Artificial Sequence; identical to SEQ ID NO: 13247
  Synthetic polypeptide

SEQ ID NO: 13250 - protein, 25 aa, Artificial Sequence
  Synthetic polypeptide
SQHFRRPRPLKLTTLRHLYRKEALD

SEQ ID NO: 13251 - protein, 25 aa, Artificial Sequence
  Synthetic polypeptide
SQHFRRPRPLKLTTLRHLYRKEALD

SEQ ID NO: 13252 - protein, 25 aa, Artificial Sequence
  Synthetic polypeptide
SQHFRRPRPLKLTTLRHLYRKEALD

SEQ ID NO: 13253 - protein, 25 aa, Artificial Sequence
  Synthetic polypeptide
SQHFRRPRPLKLTTLRHLYRKEALD

SEQ ID NO: 13254 - protein, 18 aa, Artificial Sequence
  Synthetic polypeptide
PGTVVHAYDPSTLGGQDL

SEQ ID NO: 13255 - protein, 18 aa, Artificial Sequence
  Synthetic polypeptide
PGTVVHAYDPSTLGGQDL

SEQ ID NO: 13256 - protein, 18 aa, Artificial Sequence
  Synthetic polypeptide
PGTVVHAYDPSTLGGQDL

SEQ ID NO: 13257 - protein, 18 aa, Artificial Sequence
  Synthetic polypeptide
PGTVVHAYDPSTLGGQDL

SEQ ID NO: 13258 - protein, 145 aa, Artificial Sequence
  Synthetic polypeptide
EAKTFETHNSTTPLQERSLGLDINMDSRIIHENIVEKERVQRITQETFGDYPQPQLEFAQYKLETKFKSGLNGSILAEREEPLRCLIKFSSPHLLEALKSLAPAALVCRIQKLLCYSGSHSQGTQDPSSWQKDLYLLFVPLYPRC

SEQ ID NO: 13259 - protein, 31 aa, Artificial Sequence
  Synthetic polypeptide
QNLWENEPVLAVGGRGDRRFAADENTQFPGH

SEQ ID NO: 13260 - protein, 31 aa, Artificial Sequence; identical to SEQ ID NO: 13259
  Synthetic polypeptide

SEQ ID NO: 13261 - protein, 63 aa, Artificial Sequence
  Synthetic polypeptide
RISGRMSQSLLSEEGEIVDLLLMKILSFLGIKSKREEPGSSREQPGSLSQTRHSRPAQALPKD

SEQ ID NO: 13262 - protein, 63 aa, Artificial Sequence; identical to SEQ ID NO: 13261
  Synthetic polypeptide

SEQ ID NO: 13263 - protein, 11 aa, Artificial Sequence
  Synthetic polypeptide
ASPCCRRKGRS

SEQ ID NO: 13264 - protein, 11 aa, Artificial Sequence
  Synthetic polypeptide
ASPCCRRKGRS

SEQ ID NO: 13265 - protein, 5 aa, Artificial Sequence
  Synthetic polypeptide
EGPLP

SEQ ID NO: 13266 - protein, 32 aa, Artificial Sequence
  Synthetic polypeptide
QGSPLKAAERAGRYCLDATSLQTVECSEKVRC

SEQ ID NO: 13267 - protein, 8 aa, Artificial Sequence
  Synthetic polypeptide
SALRRSAA

SEQ ID NO: 13268 - protein, 489 aa, Artificial Sequence
  Synthetic polypeptide
EGPLPAPSPPPAMSSSRKDHLGASSSEPLPVIIVGNGPSGICLSYLLSGYTPYTKPDAIHPHPLLQRKLTEAPGVSILDQDLDYLSEGLEGRSQSPVALLFDALLRPDTDFGGNMKSVLTWKHRKEHAIPHVVLGRNLPGGAWHSIEGSMVILSQGQWMGLPDLEVKDWMQKKRRGLRNSRATAGDIAHYYRDYVVKKGLGHNFVSGAVVTAVEWGTPDPSSCGAQDSSPLFQVSGFLTRNQAQQPFSLWARNVVLATGTFDSPARLGIPGEALPFIHHELSALEAATRVGAVTPASDPVLIIGAGLSAADAVLYARHYNIPVIHAFRRAVDDPGLVFNQLPKMLYPEYHKVHQMMREQSILSPSPYEGYRSLPRHQLLCFKEDCQAVFQDLEGVEKVFGVSLVLVLIGSHPDLSFLPGAGADFAVDPDQPLSAKRNPIDVDPFTYQSTRQEGLYAMGPLAGDNFVRFVQGGALAVASSLLRKETRKPP

SEQ ID NO: 13269 - protein, 40 aa, Artificial Sequence
  Synthetic polypeptide
QGSPLKAAERAGRYCLDATSLQTVECSEKVRCQPQAPHQP

SEQ ID NO: 13270 - protein, 38 aa, Artificial Sequence
  Synthetic polypeptide
SALRRSAASPKPPTSHELLQKGPPRRQQLRAPPGHHCG

SEQ ID NO: 13271 - protein, 61 aa, Artificial Sequence
  Synthetic polypeptide
FQQFSFNCSFVCGIISVFGSAHLDVSSRSSGRPSTPSVLPIAGTPWLGTCLAPNFPPCGQK

SEQ ID NO: 13272 - protein, 347 aa, Artificial Sequence
  Synthetic polypeptide
APGALGDQVHHLFCPLLELRGWAPAWHLIFRRADKNDDGKLSLEEFQLFFADGVLNEKELEDLFHTIDSDNTNHVDTKELCDYFVDHMGDYEDVLASLETLNHSVLKAMGYTKKVYEGGSNVDQFVTRFLLKETANQIQSLLSSVESAVEAIEEQTSQLRQNHIKPSHSAAQTWCGSPTPASAPNHKLMAMEQGKTLPSATEDAKEEGLEAQISRLAELIGRLESKALWFDLQQRLSDEDGTNMHLQLVRQEMAVCPEQLSEFLDSLRQYLRGTTGVRNCFHITAVRLSDGFTFVIYEFWETEEAWKRHLQSPLCKAFRHVKVDTLSQPEALSRILVPAAWCTVGRD

SEQ ID NO: 13273 - protein, 26 aa, Artificial Sequence
  Synthetic polypeptide
IQADYFEQCLMTSGCLPSCASPPGMP

SEQ ID NO: 13274 - protein, 92 aa, Artificial Sequence
  Synthetic polypeptide
TVPDDVRLFAFVRFTTGDAMSKRSKFALITWIGENVSGLQRAKTGTDKTLVKEVVQNFAKEFVISDRKELEEDFIKSELKKAGGANYDAQTE

SEQ ID NO: 13275 - protein, 8 aa, Artificial Sequence
  Synthetic polypeptide
LSGTSRPS

SEQ ID NO: 13276 - protein, 8 aa, Artificial Sequence
  Synthetic polypeptide
LSGTSRPS

SEQ ID NO: 13277 - protein, 8 aa, Artificial Sequence
  Synthetic polypeptide
LSGTSRPS

SEQ ID NO: 13278 - protein, 8 aa, Artificial Sequence
  Synthetic polypeptide
LSGTSRPS

SEQ ID NO: 13279 - protein, 8 aa, Artificial Sequence
  Synthetic polypeptide
LSGTSRPS

SEQ ID NO: 13280 - protein, 8 aa, Artificial Sequence
  Synthetic polypeptide
LSGTSRPS

SEQ ID NO: 13281 - protein, 8 aa, Artificial Sequence
  Synthetic polypeptide
LSGTSRPS

SEQ ID NO: 13282 - protein, 83 aa, Artificial Sequence
  Synthetic polypeptide
SVGHLARPEGPRLLPRRHRPPGATPEGDPRGPHRLHRRPRLPRLPLWPLPGPGAWTGLRAHPKAGEAARPHSVGLLFPGVREG

SEQ ID NO: 13283 - protein, 83 aa, Artificial Sequence; identical to SEQ ID NO: 13282
  Synthetic polypeptide

SEQ ID NO: 13284 - protein, 83 aa, Artificial Sequence; identical to SEQ ID NO: 13282
  Synthetic polypeptide

SEQ ID NO: 13285 - protein, 155 aa, Artificial Sequence
  Synthetic polypeptide
QWDISPVLKDPASFRAAIGLLARHLKATHGGRIDYIAGLDSRGFLFGPSLAQELGLGCVLIRKRGKLPGPTLWASYSLEYGKAELEIQKDALEPGQRVVVVDDLLATGGTMNAACELLGRLQAEVLECVSLVELTSLKGREKLAPVPFFSLLQYE

SEQ ID NO: 13286 - protein, 88 aa, Artificial Sequence
  Synthetic polypeptide
SVGHLARPEGPRLLPRRHRPPGATPEGDPRGPHRLHRRPRLPRLPLWPLPGPGAWTGLRAHPKAGEAARPHSVGLLFPGVREAVFQPH

SEQ ID NO: 13287 - protein, 123 aa, Artificial Sequence
  Synthetic polypeptide
QWDISPVLKDPASFRAAIGLLARHLKATHGGRIDYIAGLDSRGFLFGPSLAQELGLGCVLIRKRGKLPGPTLWASYSLEYGKLCFSHTEPNYTQRENAVNSFPTRAVSCPPVPQGREPQDNTR

SEQ ID NO: 13288 - protein, 109 aa, Artificial Sequence
  Synthetic polypeptide
QWDISPVLKDPASFRAAIGLLARHLKATHGGRIDYIAGLDSRGFLFGPSLAQELGLGCVLIRKRGKLPGPTLWASYSLEYGKAELEIQKDALEPGQRVVVVDDLLATGV

SEQ ID NO: 13289 - protein, 39 aa, Artificial Sequence
  Synthetic polypeptide
SVGHLARPEGPRLLPRRHRPPGATPEGDPRGPHRLHRRL

SEQ ID NO: 13290 - protein, 39 aa, Artificial Sequence; identical to SEQ ID NO: 13289
  Synthetic polypeptide

SEQ ID NO: 13291 - protein, 38 aa, Artificial Sequence
  Synthetic polypeptide
QWDISPVLKDPASFRAAIGLLARHLKATHGGRIDYIAG

SEQ ID NO: 13292 - protein, 38 aa, Artificial Sequence; identical to SEQ ID NO: 13291
  Synthetic polypeptide

SEQ ID NO: 13293 - protein, 45 aa, Artificial Sequence
  Synthetic polypeptide
SVGHLARPEGPRLLPRRHRPPGATPEGDPRGPHRLHRRRVPSGRI

SEQ ID NO: 13294 - protein, 128 aa, Artificial Sequence
  Synthetic polypeptide
QWDISPVLKDPASFRAAIGLLARHLKATHGGRIDYIAGECPVAASRALPPLRAPRAELEIQKDALEPGQRVVVVDDLLATGGTMNAACELLGRLQAEVLECVSLVELTSLKGREKLAPVPFFSLLQYE

SEQ ID NO: 13295 - protein, 137 aa, Artificial Sequence
  Synthetic polypeptide
QWDISPVLKDPASFRAAIGLLARHLKATHGGRIDYIAGLDSRGFLFGPSLAQELGLGCVLIRKRGKLPGPTLWASYSLEYGKAELEIQKDALEPGQRVVVVDDLLATGGAGLEHLLSAAQANWGPHPPIPRNHERCL

SEQ ID NO: 13296 - protein, 29 aa, Artificial Sequence
  Synthetic polypeptide
YRMTPLEWVPQTMSSSWRPRTELTFWTVL

SEQ ID NO: 13297 - protein, 29 aa, Artificial Sequence
  Synthetic polypeptide
YRMTPLEWVPQTMSSSWRPRTELTFWTVL

SEQ ID NO: 13298 - protein, 19 aa, Artificial Sequence
  Synthetic polypeptide
LHLNGYHRPCHRPGVHEPS

SEQ ID NO: 13299 - protein, 19 aa, Artificial Sequence
  Synthetic polypeptide
LHLNGYHRPCHRPGVHEPS

SEQ ID NO: 13300 - protein, 16 aa, Artificial Sequence
  Synthetic polypeptide
MSLFPHLVNRLWPRRR

SEQ ID NO: 13301 - protein, 16 aa, Artificial Sequence
  Synthetic polypeptide
MSLFPHLVNRLWPRRR

SEQ ID NO: 13302 - protein, 138 aa, Artificial Sequence
  Synthetic polypeptide
IDCGPEEGDPPAAAQVWQERWQVHHHGDRRGHLGEQRLRGALLPGQEAGRQGPLQQVRPLPGALQGQRRPGLAAGVQDGGGEEQPEPGVGGLQSLSEFPLQLRGDKASKVPGLGLRLSRKARLHRRILYHLRGDAEGL

SEQ ID NO: 13303 - protein, 138 aa, Artificial Sequence; identical to SEQ ID NO: 13302
  Synthetic polypeptide

SEQ ID NO: 13304 - protein, 22 aa, Artificial Sequence
  Synthetic polypeptide
RWPEEKDTLNTVTKNLQPWSCH

SEQ ID NO: 13305 - protein, 22 aa, Artificial Sequence
  Synthetic polypeptide
RWPEEKDTLNTVTKNLQPWSCH

SEQ ID NO: 13306 - protein, 22 aa, Artificial Sequence
  Synthetic polypeptide
RWPEEKDTLNTVTKNLQPWSCH

SEQ ID NO: 13307 - protein, 66 aa, Artificial Sequence
  Synthetic polypeptide
QRTCNHGRATSQLGSPDRAVPRLRHLPRAGLGAGRERGARTQPSAGAAHRPHGQQRQRGQRLRCRR

SEQ ID NO: 13308 - protein, 66 aa, Artificial Sequence; identical to SEQ ID NO: 13307
  Synthetic polypeptide

SEQ ID NO: 13309 - protein, 614 aa, Artificial Sequence
  Synthetic polypeptide
HMQCIQTVEIREKTMKMAGGKRYVKYSNKEPATMVVPLASSEAQTVQSLGFAIYRALDWGLDESEERELSPQLERLIDLMANNDSEDSGCGAADEGYGGPEEEEEAEGVPRSVRTFAQAMRLCAARLTDPRGAQAHYQAVCRALFVETLELRAFLARVREAKEMLQKLREDEPHLETPRAELDSLGHTDWARLWVQLMRELRRGVKLKKVQEQEFNPLPTEFQLTPFEMLMQDIRARNYKLRKVMVDGDIPPRVKKDAHELILDFIRSRPPLKQVSERRLRPLPPKQRSLHEKILEEIKQERRLRPVRGEGWAARGFGSLPCILNACSGDAKSTSCINLSVTDAGGSAQRPRPRVLLKAPTLAEMEEMNTSEEEESPCGEVTLKRDRSFSEHDLAQLRSEVASGLQSATHPPGGTEPPRPRAGSAHVWRPGSRDQGTCPASVSDPSHPLLSNRGSSGDRPEASMTPDAKHLWLEFSHPVESLALTVEEVMDVRRVLVKAEMEKFLQNKELFSSLKKGKICCCCRAKFPLFSWPPSCLFCKRSLQGPQWQSVEEAFPHIYSHGCVLKDVCSECTSFVADVVRSSRKSVDVLNTTPRRSRQTQSLYIPNTRTLDFK

SEQ ID NO: 13310 - protein, 662 aa, Artificial Sequence
  Synthetic polypeptide
HMQCIQTVEIREKTMKMAGGKRYVKYSNKEPATMVVPLASSEAQTVQSLGFAIYRALDWGLDESEERELSPQLERLIDLMANNDSEDSGCGAADEGYGGPEEEEEAEGVPRSVRTFAQAMRLCAARLTDPRGAQAHYQAVCRALFVETLELRAFLARVREAKEMLQKLREDEPHLETPRAELDSLGHTDWARLWVQLMRELRRGVKLKKVQEQEFNPLPTEFQLTPFEMLMQDIRARNYKLRKVMVDGDIPPRVKKDAHELILDFIRSRPPLKQVSERRLRPLPPKQRSLHEKILEEIKQERRLRPVRGEGWAARGFGSLPCILNACSGDAKSTSCINLSVTDAGGSAQRPRPRVLLKAPTLAEMEEMNTSEEEESPCGEVTLKRDRSFSEHDLAQLRSEVASGLQSATHPPGGTEPPRPRAGSAHVWRPGSRDQGTCPASVSDPSHPLLSNRGSSGDRPEASMTPDAKHLWLEFSHPVESLALTVEEVMDVRRVLVKAEMEKFLQNKELFSSLKKGKICCCCRAKFPLFSWPPSCLFCKRAVCTSCSIKMKMPSKKFGHIPVYTLGFESPQRVSAAKTAPIQRRDIFQSLQGPQWQSVEEAFPHIYSHGCVLKDVCSECTSFVADVVRSSRKSVDVLNTTPRRSRQTQSLYIPNTRTLDFK

SEQ ID NO: 13311 - protein, 20 aa, Artificial Sequence
  Synthetic polypeptide
QRTCNHGRATSQLGSPAAQM

SEQ ID NO: 13312 - protein, 47 aa, Artificial Sequence
  Synthetic polypeptide
HMQCIQTVEIREKTMKMAGGKRYVKYSNKEPATMVVPLASSEAQLHR

SEQ ID NO: 13313 - protein, 102 aa, Artificial Sequence
  Synthetic polypeptide
RGVSLHKLFCLLPCKRCDFVPHLPSAMSVRPLRPCATVSEPLDQLSCVTEGRPSNSRWMTQKIPMKNGHLGSKSNLLGWPSEENRVNTRRECPRRHSIMNLV

SEQ ID NO: 13314 - protein, 29 aa, Artificial Sequence
  Synthetic polypeptide
GLSDHVQLSQSHSTSFHVSPKAGHQTPGG

SEQ ID NO: 13315 - protein, 29 aa, Artificial Sequence
  Synthetic polypeptide
GLSDHVQLSQSHSTSFHVSPKAGHQTPGG

SEQ ID NO: 13316 - protein, 29 aa, Artificial Sequence
  Synthetic polypeptide
GLSDHVQLSQSHSTSFHVSPKAGHQTPGG

SEQ ID NO: 13317 - protein, 447 aa, Artificial Sequence
  Synthetic polypeptide
LCSSPAFCHECEASPTMCNCLRATRPAFMCHRRQAIKLQVDDTEDSDEEWTPRQQVKPPWMAFRGEQSKHQKGMPKASFNNESSLRELSGTPNLLNTSDSEQAQKPVSPPGEASTSGQHSRLKLELRRKETEGKMYSLRERKGHAYKEISEPQDDDYLYCEMCQNFFIDSCAAHGPPTFVKDSAVDKGHPNRSALSLPPGLRIGPSGIPQAGLGVWNEASDLPLGLHFGPYEGRITEDEEAANSGYSWLITKGRNCYEYVDGKDKSSANWMRYVNCARDDEEQNLVAFQYHRQIFYRTCRVIRPGCELLVWSGDEYGQELGIRSSIEPAESLGQAVNCWSGMGMSMARNWASSGAASGRKSSWQGENQSQRSIHVPHAVWPFQVKNFSVNMWNAITPLRTSQDHLQENFSNQRIPAQGIRIRSGNILIHAAVMTKPKVKRSKKGPNS

SEQ ID NO: 13318 - protein, 91 aa, Artificial Sequence
  Synthetic polypeptide
RGVSLHKLFCLLPCKRCDFVPHLPSAMSVRPLRPCATVSEPLDQLSCVTEGRPSNSRWMTQKIPMKNGHLGSKSNLLGWPSEENRVNTRRL

SEQ ID NO: 13319 - protein, 93 aa, Artificial Sequence
  Synthetic polypeptide
LCSSPAFCHECEASPTMCNCLRATRPAFMCHRRQAIKLQVDDTEDSDEEWTPRQQVKPPWMAFRGEQSKHQKIVRCVRTSSLTAVLLMGPLHL

SEQ ID NO: 13320 - protein, 87 aa, Artificial Sequence
  Synthetic polypeptide
RGVSLHKLFCLLPCKRCDFVPHLPSAMSVRPLRPCATVSEPLDQLSCVTEGRPSNSRWMTQKIPMKNGHLGSKTEFRSCHPGWSAMA

SEQ ID NO: 13321 - protein, 70 aa, Artificial Sequence
  Synthetic polypeptide
LCSSPAFCHECEASPTMCNCLRATRPAFMCHRRQAIKLQVDDTEDSDEEWTPRQQDRVSLLSPRLECNGV

SEQ ID NO: 13322 - protein, 12 aa, Artificial Sequence
  Synthetic polypeptide
KYKKWKQGKAWR

SEQ ID NO: 13323 - protein, 12 aa, Artificial Sequence
  Synthetic polypeptide
KYKKWKQGKAWR

SEQ ID NO: 13324 - protein, 12 aa, Artificial Sequence
  Synthetic polypeptide
KYKKWKQGKAWR

SEQ ID NO: 13325 - protein, 12 aa, Artificial Sequence
  Synthetic polypeptide
KYKKWKQGKAWR

SEQ ID NO: 13326 - protein, 12 aa, Artificial Sequence
  Synthetic polypeptide
KYKKWKQGKAWR

SEQ ID NO: 13327 - protein, 12 aa, Artificial Sequence
  Synthetic polypeptide
KYKKWKQGKAWR

SEQ ID NO: 13328 - protein, 12 aa, Artificial Sequence
  Synthetic polypeptide
KYKKWKQGKAWR

SEQ ID NO: 13329 - protein, 34 aa, Artificial Sequence
  Synthetic polypeptide
NPGSTKNTKSGSRERPGDEEAGSLGVLGQRRDLH

SEQ ID NO: 13330 - protein, 34 aa, Artificial Sequence; identical to SEQ ID NO: 13329
  Synthetic polypeptide

SEQ ID NO: 13331 - protein, 34 aa, Artificial Sequence; identical to SEQ ID NO: 13329
  Synthetic polypeptide

SEQ ID NO: 13332 - protein, 34 aa, Artificial Sequence; identical to SEQ ID NO: 13329
  Synthetic polypeptide

SEQ ID NO: 13333 - protein, 34 aa, Artificial Sequence; identical to SEQ ID NO: 13329
  Synthetic polypeptide

SEQ ID NO: 13334 - protein, 34 aa, Artificial Sequence; identical to SEQ ID NO: 13329
  Synthetic polypeptide

SEQ ID NO: 13335 - protein, 34 aa, Artificial Sequence; identical to SEQ ID NO: 13329
  Synthetic polypeptide

SEQ ID NO: 13336 - protein, 789 aa, Artificial Sequence
  Synthetic polypeptide
HGEIPALLKIQKVEAGKGLEMRKLVLSGFLASEEIYINQLEALLLPMKPLKATATTSQPVLTIQQIETIFYKIQDIYEIHKEFYDNLCPKVQQWDSQVTMGHLFQKLASQLGVYKAFVDNYKVALETAEKCSQSNNQFQKISEELKVKGPKDSKDSHTSVTMEALLYKPIDRVTRSTLVLHDLLKHTPVDHPDYPLLQDALRISQNFLSSINEDIDPRRTAVTTPKGETRQLVKDGFLVEVSESSRKLRHVFLFTDVLLCAKLKKTSAGKHQQYDCKWYIPLADLVFPSPEESEASPQVHPFPDHELEDMKMKISALKSEIQKEKANKGQSRAIERLKKKMFENEFLLLLNSPTIPFRIHNRNGKSYLFLLSSDYERSEWREAIQKLQKKDLQAFVLSSVELQVLTGSCFKLRTVHNIPVTSNKDDDESPGLYGFLHVIVHSAKGFKQSANLYCTLEVDSFGYFVSKAKTRVFRDTAEPKWDEEFEIELEGSQSLRILCYEKCYDKTKVNKDNNEIVDKIMGKGQIQLDPQTVETKNWHTDVIEMNGIKVEFSMKFTSRDMSLKRTPSKKQTGVFGVKISVVTKRERSKVPYIVRQCVEEVEKRGIEEVGIYRISGVATDIQALKAVFDANNKDILLMLSDMDINAIAGTLKLYFRELPEPLLTDRLYPAFMEGIALSDPAAKENCMMHLLRSLPDPNLITFLFLLEHLKRVAEKEPINKMSLHNLATVFGPTLLRPSEVESKAHLTSAADIWSHDVMAQVQVLLYYLQHPPISFAELKRNTLYFSTDV

SEQ ID NO: 13337 - protein, 789 aa, Artificial Sequence; identical to SEQ ID NO: 13336
  Synthetic polypeptide

SEQ ID NO: 13338 - protein, 789 aa, Artificial Sequence; identical to SEQ ID NO: 13336
  Synthetic polypeptide

SEQ ID NO: 13339 - protein, 789 aa, Artificial Sequence; identical to SEQ ID NO: 13336
  Synthetic polypeptide

SEQ ID NO: 13340 - protein, 105 aa, Artificial Sequence
  Synthetic polypeptide
HGEIPALLKIQKVEAGKGLEMRKLVLSGFLASEEIYINQLEALLLPMKPLKATATTSQPVLTIQQIETIFYKIQDIYEIHKEFYDNLCPKVQQWDSQVTMGHLFQ

SEQ ID NO: 13341 - protein, 64 aa, Artificial Sequence
  Synthetic polypeptide
HGEIPALLKIQKVEAGKGLEMRKLVLSGFLASEEIYINQLEALLLPMKPLKATATTSQPVLTIQ

SEQ ID NO: 13342 - protein, 62 aa, Artificial Sequence
  Synthetic polypeptide
HGEIPALLKIQKVEAGKGLEMRKLVLSGFLASEEIYINQLEALLLPMKPLKATATTSQPVLT

SEQ ID NO: 13343 - protein, 810 aa, Artificial Sequence
  Synthetic polypeptide
GRVRWLTPVIPALWEAKAGGSRGQEIETILANTVEAGKGLEMRKLVLSGFLASEEIYINQLEALLLPMKPLKATATTSQPVLTIQQIETIFYKIQDIYEIHKEFYDNLCPKVQQWDSQVTMGHLFQKLASQLGVYKAFVDNYKVALETAEKCSQSNNQFQKISEELKVKGPKDSKDSHTSVTMEALLYKPIDRVTRSTLVLHDLLKHTPVDHPDYPLLQDALRISQNFLSSINEDIDPRRTAVTTPKGETRQLVKDGFLVEVSESSRKLRHVFLFTDVLLCAKLKKTSAGKHQQYDCKWYIPLADLVFPSPEESEASPQVHPFPDHELEDMKMKISALKSEIQKEKANKGQSRAIERLKKKMFENEFLLLLNSPTIPFRIHNRNGKSYLFLLSSDYERSEWREAIQKLQKKDLQAFVLSSVELQVLTGSCFKLRTVHNIPVTSNKDDDESPGLYGFLHVIVHSAKGFKQSANLYCTLEVDSFGYFVSKAKTRVFRDTAEPKWDEEFEIELEGSQSLRILCYEKCYDKTKVNKDNNEIVDKIMGKGQIQLDPQTVETKNWHTDVIEMNGIKVEFSMKFTSRDMSLKRTPSKKQTGVFGVKISVVTKRERSKVPYIVRQCVEEVEKRGIEEVGIYRISGVATDIQALKAVFDANNKDILLMLSDMDINAIAGTLKLYFRELPEPLLTDRLYPAFMEGIALSDPAAKENCMMHLLRSLPDPNLITFLFLLEHLKRVAEKEPINKMSLHNLATVFGPTLLRPSEVESKAHLTSAADIWSHDVMAQVQVLLYYLQHPPISFAELKRNTLYFSTDV

SEQ ID NO: 13344 - protein, 810 aa, Artificial Sequence; identical to SEQ ID NO: 13343
  Synthetic polypeptide

SEQ ID NO: 13345 - protein, 810 aa, Artificial Sequence; identical to SEQ ID NO: 13343
  Synthetic polypeptide

SEQ ID NO: 13346 - protein, 810 aa, Artificial Sequence; identical to SEQ ID NO: 13343
  Synthetic polypeptide

SEQ ID NO: 13347 - protein, 32 aa, Artificial Sequence
  Synthetic polypeptide
SQHFGRPRRADHEVRRSRPSWLTRWKQGKAWR

SEQ ID NO: 13348 - protein, 32 aa, Artificial Sequence; identical to SEQ ID NO: 13347
  Synthetic polypeptide

SEQ ID NO: 13349 - protein, 32 aa, Artificial Sequence; identical to SEQ ID NO: 13347
  Synthetic polypeptide

SEQ ID NO: 13350 - protein, 32 aa, Artificial Sequence; identical to SEQ ID NO: 13347
  Synthetic polypeptide

SEQ ID NO: 13351 - protein, 32 aa, Artificial Sequence; identical to SEQ ID NO: 13347
  Synthetic polypeptide

SEQ ID NO: 13352 - protein, 32 aa, Artificial Sequence; identical to SEQ ID NO: 13347
  Synthetic polypeptide

SEQ ID NO: 13353 - protein, 32 aa, Artificial Sequence; identical to SEQ ID NO: 13347
  Synthetic polypeptide

SEQ ID NO: 13354 - protein, 26 aa, Artificial Sequence
  Synthetic polypeptide
HGGSRERPGDEEAGSLGVLGQRRDLH

SEQ ID NO: 13355 - protein, 26 aa, Artificial Sequence
  Synthetic polypeptide
HGGSRERPGDEEAGSLGVLGQRRDLH

SEQ ID NO: 13356 - protein, 26 aa, Artificial Sequence
  Synthetic polypeptide
HGGSRERPGDEEAGSLGVLGQRRDLH

SEQ ID NO: 13357 - protein, 26 aa, Artificial Sequence
  Synthetic polypeptide
HGGSRERPGDEEAGSLGVLGQRRDLH

SEQ ID NO: 13358 - protein, 26 aa, Artificial Sequence
  Synthetic polypeptide
HGGSRERPGDEEAGSLGVLGQRRDLH

SEQ ID NO: 13359 - protein, 26 aa, Artificial Sequence
  Synthetic polypeptide
HGGSRERPGDEEAGSLGVLGQRRDLH

SEQ ID NO: 13360 - protein, 26 aa, Artificial Sequence
  Synthetic polypeptide
HGGSRERPGDEEAGSLGVLGQRRDLH

SEQ ID NO: 13361 - protein, 126 aa, Artificial Sequence
  Synthetic polypeptide
GRVRWLTPVIPALWEAKAGGSRGQEIETILANTVEAGKGLEMRKLVLSGFLASEEIYINQLEALLLPMKPLKATATTSQPVLTIQQIETIFYKIQDIYEIHKEFYDNLCPKVQQWDSQVTMGHLFQ

SEQ ID NO: 13362 - protein, 85 aa, Artificial Sequence
  Synthetic polypeptide
GRVRWLTPVIPALWEAKAGGSRGQEIETILANTVEAGKGLEMRKLVLSGFLASEEIYINQLEALLLPMKPLKATATTSQPVLTIQ

SEQ ID NO: 13363 - protein, 83 aa, Artificial Sequence
  Synthetic polypeptide
GRVRWLTPVIPALWEAKAGGSRGQEIETILANTVEAGKGLEMRKLVLSGFLASEEIYINQLEALLLPMKPLKATATTSQPVLT

SEQ ID NO: 13364 - protein, 21 aa, Artificial Sequence
  Synthetic polypeptide
QYGHRRTVAVMCRRETENTQH

SEQ ID NO: 13365 - protein, 21 aa, Artificial Sequence
  Synthetic polypeptide
QYGHRRTVAVMCRRETENTQH

SEQ ID NO: 13366 - protein, 329 aa, Artificial Sequence
  Synthetic polypeptide
CAGERLRTHSIESSGKLKISPEQHWDFTAEDLKDLGEIGRGAYGSVNKMVHKPSGQIMAVKRIRSTVDEKEQKQLLMDLDVVMRSSDCPYIVQFYGALFREGDCWICMELMSTSFDKFYKYVYSVLDDVIPEEILGKITLATVKALNHLKENLKIIHRDIKPSNILLDRSGNIKLCDFGISGQLVDSIAKTRDAGCRPYMAPERIDPSASRQGYDVRSDVWSLGITLYELATGRFPYPKWNSVFDQLTQVVKGDPPQLSNSEEREFSPSFINFVNLCLTKDESKRPKYKELLKHPFILMYEERAVEVACYVCKILDQMPATPSSPMYVD

SEQ ID NO: 13367 - protein, 329 aa, Artificial Sequence; identical to SEQ ID NO: 13366
  Synthetic polypeptide

SEQ ID NO: 13368 - protein, 21 aa, Artificial Sequence
  Synthetic polypeptide
HLEIVTVRTQKNSCSDVQERD

SEQ ID NO: 13369 - protein, 21 aa, Artificial Sequence
  Synthetic polypeptide
HLEIVTVRTQKNSCSDVQERD

SEQ ID NO: 13370 - protein, 21 aa, Artificial Sequence
  Synthetic polypeptide
HLEIVTVRTQKNSCSDVQERD

SEQ ID NO: 13371 - protein, 21 aa, Artificial Sequence
  Synthetic polypeptide
HLEIVTVRTQKNSCSDVQERD

SEQ ID NO: 13372 - protein, 21 aa, Artificial Sequence
  Synthetic polypeptide
HLEIVTVRTQKNSCSDVQERD

SEQ ID NO: 13373 - protein, 16 aa, Artificial Sequence
  Synthetic polypeptide
QYGHRRTVAVMCRRET

SEQ ID NO: 13374 - protein, 16 aa, Artificial Sequence
  Synthetic polypeptide
QYGHRRTVAVMCRRET

SEQ ID NO: 13375 - protein, 16 aa, Artificial Sequence
  Synthetic polypeptide
QYGHRRTVAVMCRRET

SEQ ID NO: 13376 - protein, 6 aa, Artificial Sequence
  Synthetic polypeptide
CAGERL

SEQ ID NO: 13377 - protein, 6 aa, Artificial Sequence
  Synthetic polypeptide
CAGERL

SEQ ID NO: 13378 - protein, 6 aa, Artificial Sequence
  Synthetic polypeptide
CAGERL

SEQ ID NO: 13379 - protein, 177 aa, Artificial Sequence
  Synthetic polypeptide
GPRYGPDAQNPGRADHHGEDAQLLRHAGGPRAHLGHVQGHQAHRGGAGPGDQGHLGLHADAVQAARHPHLRELDVQKQDSGPHRHVVERHPDRHLRQAPGALAAPLPHPPDALRERRAAHQRPGRGAGPRARLPGPQEDHHGQALLLQQDQGLPLPEEGGGQQPAPLPGQDQGQDPS

SEQ ID NO: 13380 - protein, 225 aa, Artificial Sequence
  Synthetic polypeptide
GEAQTAPRSSATTAEDPDMDLMPRTLDGQITMEKTPSYFVTREAPARISAMSKDTKLIVVVRDPVTRAISDYTQTLSKRPDIPTFESLTFKNRTAGLIDTSWSAIQIGIYAKHLEHWLRHFPIRQMLFVSGERLISDPAGELGRVQDFLGLKRIITDKHFYFNKTKGFPCLKKAEGSSRPHCLGKTKGRTHPEIDREVVRRLREFYRPFNLKFYQMTGHDFGWDG

SEQ ID NO: 13381 - protein, 45 aa, Artificial Sequence
  Synthetic polypeptide
SPDSFCCGSPWSPEPPNKEFNNPAEERPRQLPDLQPPQLRTQIWT

SEQ ID NO: 13382 - protein, 295 aa, Artificial Sequence
  Synthetic polypeptide
GETLRNHPPVFIFLHLLICKTCWFCLHSAYPLPSFLLSPWPKPTLSRVNYRNSFLADLSAFLLAPLKFSLRTLARYKSLVTGTRARGVIAVLWVLAFGIGLTPFLGWNSKDSATNNCTEPWDGTTNESCCLVKCLFENVVPMSYMVYFNFFGCVLPPLLIMLVIYIKIFLVACRQLQRTELMDHSRTTLQREIHAAKSLAMIVGIFALCWLPVHAVNCVTLFQPAQGKNKPKWAMNMAILLSHANSVVNPIVYAYRNRDFRYTFHKIISRYLLCQADVKSGNGQAGVQPALGVGL

SEQ ID NO: 13383 - protein, 34 aa, Artificial Sequence
  Synthetic polypeptide
NSVSVLWPGIKVWSRGPEQEGSLLSSGSLPLASD

SEQ ID NO: 13384 - protein, 19 aa, Artificial Sequence
  Synthetic polypeptide
SLCFSSGSPKIQSPYSGQV

SEQ ID NO: 13385 - protein, 35 aa, Artificial Sequence
  Synthetic polypeptide
KQHMLFSRPGIKVWSRGPEQEGSLLSSGSLPLASD

SEQ ID NO: 13386 - protein, 14 aa, Artificial Sequence
  Synthetic polypeptide
FLHESSTCCSLGLV

SEQ ID NO: 13387 - protein, 233 aa, Artificial Sequence
  Synthetic polypeptide
SCMKAAHVVLSAWYKSLVTGTRARGVIAVLWVLAFGIGLTPFLGWNSKDSATNNCTEPWDGTTNESCCLVKCLFENVVPMSYMVYFNFFGCVLPPLLIMLVIYIKIFLVACRQLQRTELMDHSRTTLQREIHAAKSLAMIVGIFALCWLPVHAVNCVTLFQPAQGKNKPKWAMNMAILLSHANSVVNPIVYAYRNRDFRYTFHKIISRYLLCQADVKSGNGQAGVQPALGVGL

SEQ ID NO: 13388 - protein, 59 aa, Artificial Sequence
  Synthetic polypeptide
FHSRNPSDNSHMWKNVCFRQPTWMEKLTCPHVTMSQSIQFRETMASRYIQRRASLPCRP

SEQ ID NO: 13389 - protein, 59 aa, Artificial Sequence; identical to SEQ ID NO: 13388
  Synthetic polypeptide

SEQ ID NO: 13390 - protein, 59 aa, Artificial Sequence; identical to SEQ ID NO: 13388
  Synthetic polypeptide

SEQ ID NO: 13391 - protein, 59 aa, Artificial Sequence; identical to SEQ ID NO: 13388
  Synthetic polypeptide

SEQ ID NO: 13392 - protein, 59 aa, Artificial Sequence; identical to SEQ ID NO: 13388
  Synthetic polypeptide

SEQ ID NO: 13393 - protein, 31 aa, Artificial Sequence
  Synthetic polypeptide
LFPSSFTPGIPQITPTCGKTSVSGSRLGWRN

SEQ ID NO: 13394 - protein, 31 aa, Artificial Sequence; identical to SEQ ID NO: 13393
  Synthetic polypeptide

SEQ ID NO: 13395 - protein, 31 aa, Artificial Sequence; identical to SEQ ID NO: 13393
  Synthetic polypeptide

SEQ ID NO: 13396 - protein, 31 aa, Artificial Sequence; identical to SEQ ID NO: 13393
  Synthetic polypeptide

SEQ ID NO: 13397 - protein, 31 aa, Artificial Sequence; identical to SEQ ID NO: 13393
  Synthetic polypeptide

SEQ ID NO: 13398 - protein, 623 aa, Artificial Sequence
  Synthetic polypeptide
LPHVEKRLFQAADLDGEIDLSACYDVTEYPVQRNYGFQIHTKEGEFTLSAMTSGIRRNWIQTIMKHVHPTTAPDVTSSLPEEKNKSSCSFETCPRPTEKQEAELGEPDPEQKRSRARERRREGRSKTFDWAEFRPIQQALAQERVGGVGPADTHEPLRPEAEPGELERERARRREERRKRFGMLDATDGPGTEDAALRMEVDRSPGLPMSDLKTHNVHVEIEQRWHQVETTPLREEKQVPIAPVHLSSEDGGDRLSTHELTSLLEKELEQSQKEASDLLEQNRLLQDQLRVALGREQSAREGYVLQATCERGFAAMEETHQKKIEDLQRQHQRELEKLREEKDRLLAEETAATISAIEAMKNAHREEMERELEKSQRSQISSVNSDVEALRRQYLEELQSVQRELEVLSEQYSQKCLENAHLAQALEAERQALRQCQRENQELNAHNQELNNRLAAEITRLRTLLTGDGGGEATGSPLAQGKDAYELEVLLRVKESEIQYLKQEISSLKDELQTALRDKKYASDKYKDIYTELSIAKAKADCDISRLKEQLKAATEALGEKSPDSATVSGYDIMKSKSNPDFLKKDRSCVTRQLRNIRSKSLKEGLTVQERLKLFESRDLKKD

SEQ ID NO: 13399 - protein, 623 aa, Artificial Sequence; identical to SEQ ID NO: 13398
  Synthetic polypeptide

SEQ ID NO: 13400 - protein, 623 aa, Artificial Sequence; identical to SEQ ID NO: 13398
  Synthetic polypeptide

SEQ ID NO: 13401 - protein, 610 aa, Artificial Sequence
  Synthetic polypeptide
LPHVEKRLFQAADLDGEIDLSACYDVTEYPVQRNYGFQIHTKEGEFTLSAMTSGIRRNWIQTIMKHVHPTTAPDVTSSLPEEKNKSSCSFETCPRPTEKQEAELGEPDPEQKRSRARERRREGRSKTFDWAEFRPIQQALAQERVGGVGPADTHEPLRPEAEPGELERERARRREERRKRFGMLDATDGPGTEDAALRMEVDRSPGLPMSDLKTHNVHVEIEQRWHQVETTPLREEKQVPIAPVHLSSEDGGDRLSTHELTSLLEKELEQSQKEASDLLEQNRLLQDQLRVALGREQSAREGYVLQATCERGFAAMEETHQKKIEDLQRQHQRELEKLREEKDRLLAEETAATISAIEAMKNAHREEMERELEKSQRSQISSVNSDVEALRRQYLEELQSVQRELEVLSEQYSQKCLENAHLAQALEAERQALRQCQRENQELNAHNQELNNRLAAEITRLRTLLTGDGGGEATGSPLAQGKDAYELEVLLRVKESEIQYLKQEISSLKDELQTALRDKKYASDKYKDIYTELSIAKAKADCDISRLKEQLKAATEALGEKSPDSATVSGYDIMKSKSNPDFLKKDRSCVTRQLRNIRSKSVIEQVSWDT

SEQ ID NO: 13402 - protein, 610 aa, Artificial Sequence; identical to SEQ ID NO: 13401
  Synthetic polypeptide

SEQ ID NO: 13403 - protein, 34 aa, Artificial Sequence
  Synthetic polypeptide
GRGCSEPRSHHCTPAWATECLRQSSLDAHSVLRG

SEQ ID NO: 13404 - protein, 34 aa, Artificial Sequence; identical to SEQ ID NO: 13403
  Synthetic polypeptide

SEQ ID NO: 13405 - protein, 23 aa, Artificial Sequence
  Synthetic polypeptide
THEAEVVVSRDHTIALQPGRQSV

SEQ ID NO: 13406 - protein, 23 aa, Artificial Sequence
  Synthetic polypeptide
THEAEVVVSRDHTIALQPGRQSV

SEQ ID NO: 13407 - protein, 386 aa, Artificial Sequence
  Synthetic polypeptide
AEITPLHSSLGDRVFEAEQFGCPQRAQRMNTAFTPFLHQRNGNAARSLTSLTSDDNLWACLHTSFAWLLKACGSRLTEKLLEGAPTEDTLVQMEKLADLEEESESWDNSEAEEEEKAPVLPESTEGRELTQGPAESSSLSGCGSWQPRKLPVFKSLRHMRQVLGAPSFRMLAWHVLMGNQVIWKSRDVDLVQSAFEVLRTMLPVGCVRIIPYSSQYEEAYRCNFLGLSPHVQIPPHVLSSEFAVIVEVHAAARSTLHPVGCEDDQSLSKYEFVVTSGSPVAADRVGPTILNKIEAALTNQNLSVDVVDQCLVCLKEEWMNKVKVLFKFTKVDSRPKEDTQKLLSILGASEEDNVKLLKFWMTGLSKTYKSHLMSTVRSPTASESRN

SEQ ID NO: 13408 - protein, 149 aa, Artificial Sequence
  Synthetic polypeptide
AEITPLHSSLGDRVFEAEQFGCPQRAQRMNTAFTPFLHQRNGNAARSLTSLTSDDNLWACLHTSFAWLLKACGSRLTEKLLEGAPTEDTLVQMEKLAGEAGVLLPGPWPGWPWGGTSCLLSWQESLREGNAALNQPRTSLREAHPPISV

SEQ ID NO: 13409 - protein, 1053 aa, Artificial Sequence
  Synthetic polypeptide
PGFESCICTKTSDMLQLINNQDSDFPGLFDPPYAGSGAGGTDPASPDTSSPGSLSPPPATLSSSLEAFLSGPQAAPSPLSPPQPAPTPLKMYPSMPAFSPGPGIKEESVPLSILQTPTPQPLPGALLPQSFPAPAPPQFSSTPVLGYPSPPGGFSTGSPPGNTQQPLPGLPLASPPGVPPVSLHTQVQSVVPQQLLTVTAAPTAAPVTTTVTSQIQQVPVLLQPHFIKADSLLLTAMKTDGATVKAAGLSPLVSGTTVQTGPLPTLVSGGTILATVPLVVDAEKLPINRLAAGSKAPASAQSRGEKRTAHNAIEKRYRSSINDKIIELKDLVVGTEAKLNKSAVLRKAIDYIRFLQHSNQKLKQENLSLRTAVHKSKSLKDLVSACGSGGNTDVLMEGVKTEVEDTLTPPPSDAGSPFQSSPLSLGSRGSGSGGSGSDSEPDSPVFEDSKAKPEQRPSLHSRGMLDRSRLALCTLVFLCLSCNPLASLLGARGLPSPSDTTSVYHSPGRNVLGTESRDGPGWAQWLLPPVVWLLNGLLVLVSLVLLFVYGEPVTRPHSGPAVYFWRHRKQADLDLARGDFAQAAQQLWLALRALGRPLPTSHLDLACSLLWNLIRHLLQRLWVGRWLAGRAGGLQQDCALRVDASASARDAALVYHKLHQLHTMGKHTGGHLTATNLALSALNLAECAGDAVSVATLAEIYVAAALRVKTSLPRALHFLTRFFLSSARQACLAQSGSVPPAMQWLCHPVGHRFFVDGDWSVLSTPWESLYSLAGNPVDPLAQVTQLFREHLLERALNCVTQPNPSPGSADGDKEFSDALGYLQLLNSCSDAAGAPAYSFSISSSMATTTGVDPVAKWWASLTAVVIHWLRRDEEAAERLCPLVEHLPRVLQESERPLPRAALHSFKAARALLGCAKAESGPASLTICEKASGYLQDSLATTPASSSIDKAVQLFLCDLLLVVRTSLWRQQQPPAPAPAAQGTSSRPQASALELRGFQRDLSSLRRLAQSFRPAMRRLMDVLTSESAWALPQHLGKGFPSPSGHKVPGWHGRMD

SEQ ID NO: 13410 - protein, 60 aa, Artificial Sequence
  Synthetic polypeptide
MGLSPASAPRPQTCFSLSTTKTVTSLAYLTHPMLGVGQGAQTLPAPIPAPQAACLHLLPH

SEQ ID NO: 13411 - protein, 60 aa, Artificial Sequence; identical to SEQ ID NO: 13410
  Synthetic polypeptide

SEQ ID NO: 13412 - protein, 60 aa, Artificial Sequence; identical to SEQ ID NO: 13410
  Synthetic polypeptide

SEQ ID NO: 13413 - protein, 60 aa, Artificial Sequence; identical to SEQ ID NO: 13410
  Synthetic polypeptide

SEQ ID NO: 13414 - protein, 60 aa, Artificial Sequence; identical to SEQ ID NO: 13410
  Synthetic polypeptide

SEQ ID NO: 13415 - protein, 19 aa, Artificial Sequence
  Synthetic polypeptide
VLHLHQDLRHASAYQQPRQ

SEQ ID NO: 13416 - protein, 19 aa, Artificial Sequence
  Synthetic polypeptide
VLHLHQDLRHASAYQQPRQ

SEQ ID NO: 13417 - protein, 19 aa, Artificial Sequence
  Synthetic polypeptide
VLHLHQDLRHASAYQQPRQ

SEQ ID NO: 13418 - protein, 19 aa, Artificial Sequence
  Synthetic polypeptide
VLHLHQDLRHASAYQQPRQ

SEQ ID NO: 13419 - protein, 19 aa, Artificial Sequence
  Synthetic polypeptide
VLHLHQDLRHASAYQQPRQ

SEQ ID NO: 13420 - protein, 1129 aa, Artificial Sequence
  Synthetic polypeptide
PGFESCICTKTSDMLQLINNQDSDFPGLFDPPYAGSGAGGTDPASPDTSSPGSLSPPPATLSSSLEAFLSGPQAAPSPLSPPQPAPTPLKMYPSMPAFSPGPGIKEESVPLSILQTPTPQPLPGALLPQSFPAPAPPQFSSTPVLGYPSPPGGFSTGSPPGNTQQPLPGLPLASPPGVPPVSLHTQVQSVVPQQLLTVTAAPTAAPVTTTVTSQIQQVPVLLQPHFIKADSLLLTAMKTDGATVKAAGLSPLVSGTTVQTGPLPTLVSGGTILATVPLVVDAEKLPINRLAAGSKAPASAQSRGEKRTAHNAIEKRYRSSINDKIIELKDLVVGTEAKLNKSAVLRKAIDYIRFLQHSNQKLKQENLSLRTAVHKSKSLKDLVSACGSGGNTDVLMEGVKTEVEDTLTPPPSDAGSPFQSSPLSLGSRGSGSGGSGSDSEPDSPVFEDSKAKPEQRPSLHSRGMLDRSRLALCTLVFLCLSCNPLASLLGARGLPSPSDTTSVYHSPGRNVLGTESRDGPGWAQWLLPPVVWLLNGLLVLVSLVLLFVYGEPVTRPHSGPAVYFWRHRKQADLDLARGDFAQAAQQLWLALRALGRPLPTSHLDLACSLLWNLIRHLLQRLWVGRWLAGRAGGLQQDCALRVDASASARDAALVYHKLHQLHTMGKHTGGHLTATNLALSALNLAECAGDAVSVATLAEIYVAAALRVKTSLPRALHFLTRFFLSSARQACLAQSGSVPPAMQWLCHPVGHRFFVDGDWSVLSTPWESLYSLAGNPVDPLAQVTQLFREHLLERALNCVTQPNPSPGSADGDKEFSDALGYLQLLNSCSDAAGAPAYSFSISSSMATTTGVDPVAKWWASLTAVVIHWLRRDEEAAERLCPLVEHLPRVLQESERPLPRAALHSFKAARALLGCAKAESGPASLTICEKASGYLQDSLATTPASSSIDKAVQLFLCDLLLVVRTSLWRQQQPPAPAPAAQGTSSRPQASALELRGFQRDLSSLRRLAQSFRPAMRRVFLHEATARLMAGASPTRTHQLLDRSLRRRAGPGGKGGAVAELEPRPTRREHAEALLLASCYLPPGFLSAPGQRVGMLAEAARTLEKLGDRRLLHDCQQMLMRLGGGTTVTSS

SEQ ID NO: 13421 - protein, 1129 aa, Artificial Sequence; identical to SEQ ID NO: 13420
  Synthetic polypeptide

SEQ ID NO: 13422 - protein, 452 aa, Artificial Sequence
  Synthetic polypeptide
PGFESCICTKTSDMLQLINNQDSDFPGLFDPPYAGSGAGGTDPASPDTSSPGSLSPPPATLSSSLEAFLSGPQAAPSPLSPPQPAPTPLKMYPSMPAFSPGPGIKEESVPLSILQTPTPQPLPGALLPQSFPAPAPPQFSSTPVLGYPSPPGGFSTGSPPGNTQQPLPGLPLASPPGVPPVSLHTQVQSVVPQQLLTVTAAPTAAPVTTTVTSQIQQVPVLLQPHFIKADSLLLTAMKTDGATVKAAGLSPLVSGTTVQTGPLPTLVSGGTILATVPLVVDAEKLPINRLAAGSKAPASAQSRGEKRTAHNAIEKRYRSSINDKIIELKDLVVGTEAKLNKSAVLRKAIDYIRFLQHSNQKLKQENLSLRTAVHKSKSLKDLVSACGSGGNTDVLMEGVKTEVEDTLTPPPSDAGSPFQSSPLSLGSRGSGSGGSGSDSEPDSPVFEDSKTE

SEQ ID NO: 13423 - protein, 331 aa, Artificial Sequence
  Synthetic polypeptide
PGFESCICTKTSDMLQLINNQDSDFPGLFDPPYAGSGAGGTDPASPDTSSPGSLSPPPATLSSSLEAFLSGPQAAPSPLSPPQPAPTPLKMYPSMPAFSPGPGIKEESVPLSILQTPTPQPLPGALLPQSFPAPAPPQFSSTPVLGYPSPPGGFSTGSPPGNTQQPLPGLPLASPPGVPPVSLHTQVQSVVPQQLLTVTAAPTAAPVTTTVTSQIQQVLLQPHFIKADSLLLTAMKTDGATVKAAGLSPLVSGTTVQTGPLPTLVSGGTILATVPLVVDAEKLPINRLAAGSKAPASAQSRGEKRTAHNAIEKRYRSSINDKIIELKDLVV

SEQ ID NO: 13424 - protein, 58 aa, Artificial Sequence
  Synthetic polypeptide
EVRSLSARQPPRLGSEERLRPAATPSGREVGGSAPRPASRPVREKRQQMAPCKVRIGR

SEQ ID NO: 13425 - protein, 58 aa, Artificial Sequence; identical to SEQ ID NO: 13424
  Synthetic polypeptide

SEQ ID NO: 13426 - protein, 58 aa, Artificial Sequence; identical to SEQ ID NO: 13424
  Synthetic polypeptide

SEQ ID NO: 13427 - protein, 58 aa, Artificial Sequence; identical to SEQ ID NO: 13424
  Synthetic polypeptide

SEQ ID NO: 13428 - protein, 58 aa, Artificial Sequence; identical to SEQ ID NO: 13424
  Synthetic polypeptide

SEQ ID NO: 13429 - protein, 58 aa, Artificial Sequence; identical to SEQ ID NO: 13424
  Synthetic polypeptide

SEQ ID NO: 13430 - protein, 58 aa, Artificial Sequence; identical to SEQ ID NO: 13424
  Synthetic polypeptide

SEQ ID NO: 13431 - protein, 51 aa, Artificial Sequence
  Synthetic polypeptide
GASPPGSHPVWEVRSVSARQPPRPGGRWGGQPPARPAAPSGRKGNRWLPAK

SEQ ID NO: 13432 - protein, 51 aa, Artificial Sequence; identical to SEQ ID NO: 13431
  Synthetic polypeptide

SEQ ID NO: 13433 - protein, 51 aa, Artificial Sequence; identical to SEQ ID NO: 13431
  Synthetic polypeptide

SEQ ID NO: 13434 - protein, 51 aa, Artificial Sequence; identical to SEQ ID NO: 13431
  Synthetic polypeptide

SEQ ID NO: 13435 - protein, 51 aa, Artificial Sequence; identical to SEQ ID NO: 13431
  Synthetic polypeptide

SEQ ID NO: 13436 - protein, 51 aa, Artificial Sequence; identical to SEQ ID NO: 13431
  Synthetic polypeptide

SEQ ID NO: 13437 - protein, 51 aa, Artificial Sequence; identical to SEQ ID NO: 13431
  Synthetic polypeptide

SEQ ID NO: 13438 - protein, 468 aa, Artificial Sequence
  Synthetic polypeptide
GASPPGSHPVREGGGGVSPPPGQPPRPGEKATDGSLQSEDWTLNMEICDIINETEEGPKDAIRALKKRLNGNRNYREVMLALTAWADAFRSSPDLTGVVHIYEELKRKGVEFPMADLDALSPIHTPQRSVPEVDPAATMPRSQSQQRTSAGSYSSPPPAPYSAPQAPALSVTGPITANSEQIARLRSELDVVRGNTKVMSEMLTEMVPGQEDSSDLELLQELNRTCRAMQQRIVELISRVSNEEVTEELLHVNDDLNNVFLRYERFERYRSGRSVQNASNGVLNEVTEDNLIDLGPGSPAVVSPMVGNTAPPSSLSSQLAGLDLGTESVSGTLSSLQQCNPRDGFDMFAQTRGNSLAEQRKTVTYEDPQAVGGLASALDNRKQSSEGIPVAQPSVMDDIEVWLRTDLKGDDLEEGVTSEEFDKFLEERAKAAEMVPDLPSPPMEAPAPASNPSGRKKPERSEDALFAL

SEQ ID NO: 13439 - protein, 518 aa, Artificial Sequence
  Synthetic polypeptide
GASPPGSHPVREGGGGVSPPPGQPPRPGEKATDGSLQSEDWTLNMEICDIINETEEGPKDAIRALKKRLNGNRNYREVMLALTVLETCVKNCGHRFHILVANRDFIDSVLVKIISPKNNPPTIVQDKVLALIQAWADAFRSSPDLTGVVHIYEELKRKGVEFPMADLDALSPIHTPQRSVPEVDPAATMPRSQSQQRTSAGSYSSPPPAPYSAPQAPALSVTGPITANSEQIARLRSELDVVRGNTKVMSEMLTEMVPGQEDSSDLELLQELNRTCRAMQQRIVELISRVSNEEVTEELLHVNDDLNNVFLRYERFERYRSGRSVQNASNGVLNEVTEDNLIDLGPGSPAVVSPMVGNTAPPSSLSSQLAGLDLGTESVSGTLSSLQQCNPRDGFDMFAQTRGNSLAEQRKTVTYEDPQAVGGLASALDNRKQSSEGIPVAQPSVMDDIEVWLRTDLKGDDLEEGVTSEEFDKFLEERAKAAEMVPDLPSPPMEAPAPASNPSGRKKPERSEDALFAL

SEQ ID NO: 13440 - protein, 473 aa, Artificial Sequence
  Synthetic polypeptide
GASPPGSHPVREGGGGVSPPPGQPPRPGEKATDGSLQSEDWTLNMEICDIINETEEGPKDAIRALKKRLNGNRNYREVMLALTVLETCVKNCGHRFHILVANRDFIDSVLVKIISPKNNPPTIVQDKVLALIQSVPEVDPAATMPRSQSQQRTSAGSYSSPPPAPYSAPQAPALSVTGPITANSEQIARLRSELDVVRGNTKVMSEMLTEMVPGQEDSSDLELLQELNRTCRAMQQRIVELISRVSNEEVTEELLHVNDDLNNVFLRYERFERYRSGRSVQNASNGVLNEVTEDNLIDLGPGSPAVVSPMVGNTAPPSSLSSQLAGLDLGTESVSGTLSSLQQCNPRDGFDMFAQTRGNSLAEQRKTVTYEDPQAVGGLASALDNRKQSSEGIPVAQPSVMDDIEVWLRTDLKGDDLEEGVTSEEFDKFLEERAKAAEMVPDLPSPPMEAPAPASNPSGRKKPERSEDALFAL

SEQ ID NO: 13441 - protein, 473 aa, Artificial Sequence; identical to SEQ ID NO: 13440
  Synthetic polypeptide

SEQ ID NO: 13442 - protein, 494 aa, Artificial Sequence
  Synthetic polypeptide
GASPPGSHPVREGGGGVSPPPGQPPRPGEKATDGSLQSEDWTLNMEICDIINETEEGPKDAIRALKKRLNGNRNYREVMLALTVLETCVKNCGHRFHILVANRDFIDSVLVKIISPKNNPPTIVQDKVLALIQAWADAFRSSPDLTGVVHIYEELKRKGVEFPMADLDALSPIHTPQRIARLRSELDVVRGNTKVMSEMLTEMVPGQEDSSDLELLQELNRTCRAMQQRIVELISRVSNEEVTEELLHVNDDLNNVFLRYERFERYRSGRSVQNASNGVLNEVTEDNLIDLGPGSPAVVSPMVGNTAPPSSLSSQLAGLDLGTESVSGTLSSLQQCNPRDGFDMFAQTRGNSLAEQRKTVTYEDPQAVGGLASALDNRKQSSEGTFLSSAQKRGRGGESDLEPIDSWLITQGMIPVAQPSVMDDIEVWLRTDLKGDDLEEGVTSEEFDKFLEERAKAAEMVPDLPSPPMEAPAPASNPSGRKKPERSEDALFAL

SEQ ID NO: 13443 - protein, 400 aa, Artificial Sequence
  Synthetic polypeptide
GASPPGSHPVREGGGGVSPPPGQPPRPGEKATDGSLQSEDWTLNMEICDIINETEEGPKDAIRALKKRLNGNRNYREVMLALTVLETCVKNCGHRFHILVANRDFIDSVLVKIISPKNNPPTIVQDKVLALIQIARLRSELDVVRGNTKVMSEMLTEMVPGQEDSSDLELLQELNRTCRAMQQRIVELISRVSNEEVTEELLHVNDDLNNVFLRYERFERYRSGRSVQNASNGVLNEVTEDNLIDLGPGSPAVVSPMVGNTAPPSSLSSQLAGLDLGTESVSGTLSSLQQCNPRDGFDMFAQTRGNSLAEQRKTVTYEDPQAVGGLASALDNRKQSSEGKGDDLEEGVTSEEFDKFLEERAKAAEMVPDLPSPPMEAPAPASNPSGRKKPERSEDALFAL

SEQ ID NO: 13444 - protein, 399 aa, Artificial Sequence
  Synthetic polypeptide
GASPPGSHPVREGGGGVSPPPGQPPRPGEKATDGSLQSEDWTLNMEICDIINETEEGPKDAIRALKKRLNGNRNYREVMLALTIARLRSELDVVRGNTKVMSEMLTEMVPGQEDSSDLELLQELNRTCRAMQQRIVELISRVSNEEVTEELLHVNDDLNNVFLRYERFERYRSGRSVQNASNGVLNEVTEDNLIDLGPGSPAVVSPMVGNTAPPSSLSSQLAGLDLGTESVSGTLSSLQQCNPRDGFDMFAQTRGNSLAEQRKTVTYEDPQAVGGLASALDNRKQSSEGTFLSSAQKRGRGGESDLEPIDSWLITQGMIPVAQPSVMDDIEVWLRTDLKGDDLEEGVTSEEFDKFLEERAKAAEMVPDLPSPPMEAPAPASNPSGRKKPERSEDALFAL

SEQ ID NO: 13445 - protein, 454 aa, Artificial Sequence
  Synthetic polypeptide
EVRSLSARQPPRLGKKATDGSLQSEDWTLNMEICDIINETEEGPKDAIRALKKRLNGNRNYREVMLALTAWADAFRSSPDLTGVVHIYEELKRKGVEFPMADLDALSPIHTPQRSVPEVDPAATMPRSQSQQRTSAGSYSSPPPAPYSAPQAPALSVTGPITANSEQIARLRSELDVVRGNTKVMSEMLTEMVPGQEDSSDLELLQELNRTCRAMQQRIVELISRVSNEEVTEELLHVNDDLNNVFLRYERFERYRSGRSVQNASNGVLNEVTEDNLIDLGPGSPAVVSPMVGNTAPPSSLSSQLAGLDLGTESVSGTLSSLQQCNPRDGFDMFAQTRGNSLAEQRKTVTYEDPQAVGGLASALDNRKQSSEGIPVAQPSVMDDIEVWLRTDLKGDDLEEGVTSEEFDKFLEERAKAAEMVPDLPSPPMEAPAPASNPSGRKKPERSEDALFAL

SEQ ID NO: 13446 - protein, 26 aa, Artificial Sequence
  Synthetic polypeptide
GASPPGSHPVWEKRQQMAPCKVRIGR

SEQ ID NO: 13447 - protein, 26 aa, Artificial Sequence
  Synthetic polypeptide
GASPPGSHPVWEKRQQMAPCKVRIGR

SEQ ID NO: 13448 - protein, 26 aa, Artificial Sequence
  Synthetic polypeptide
GASPPGSHPVWEKRQQMAPCKVRIGR

SEQ ID NO: 13449 - protein, 26 aa, Artificial Sequence
  Synthetic polypeptide
GASPPGSHPVWEKRQQMAPCKVRIGR

SEQ ID NO: 13450 - protein, 26 aa, Artificial Sequence
  Synthetic polypeptide
GASPPGSHPVWEKRQQMAPCKVRIGR

SEQ ID NO: 13451 - protein, 26 aa, Artificial Sequence
  Synthetic polypeptide
GASPPGSHPVWEKRQQMAPCKVRIGR

SEQ ID NO: 13452 - protein, 26 aa, Artificial Sequence
  Synthetic polypeptide
GASPPGSHPVWEKRQQMAPCKVRIGR

SEQ ID NO: 13453 - protein, 37 aa, Artificial Sequence
  Synthetic polypeptide
EVRSPSAQQPPRLRSEEPLRPAATPSGKKGNRWLPAK

SEQ ID NO: 13454 - protein, 37 aa, Artificial Sequence; identical to SEQ ID NO: 13453
  Synthetic polypeptide

SEQ ID NO: 13455 - protein, 37 aa, Artificial Sequence; identical to SEQ ID NO: 13453
  Synthetic polypeptide

SEQ ID NO: 13456 - protein, 37 aa, Artificial Sequence; identical to SEQ ID NO: 13453
  Synthetic polypeptide

SEQ ID NO: 13457 - protein, 37 aa, Artificial Sequence; identical to SEQ ID NO: 13453
  Synthetic polypeptide

SEQ ID NO: 13458 - protein, 37 aa, Artificial Sequence; identical to SEQ ID NO: 13453
  Synthetic polypeptide

SEQ ID NO: 13459 - protein, 37 aa, Artificial Sequence; identical to SEQ ID NO: 13453
  Synthetic polypeptide

SEQ ID NO: 13460 - protein, 504 aa, Artificial Sequence
  Synthetic polypeptide
EVRSLSARQPPRLGKKATDGSLQSEDWTLNMEICDIINETEEGPKDAIRALKKRLNGNRNYREVMLALTVLETCVKNCGHRFHILVANRDFIDSVLVKIISPKNNPPTIVQDKVLALIQAWADAFRSSPDLTGVVHIYEELKRKGVEFPMADLDALSPIHTPQRSVPEVDPAATMPRSQSQQRTSAGSYSSPPPAPYSAPQAPALSVTGPITANSEQIARLRSELDVVRGNTKVMSEMLTEMVPGQEDSSDLELLQELNRTCRAMQQRIVELISRVSNEEVTEELLHVNDDLNNVFLRYERFERYRSGRSVQNASNGVLNEVTEDNLIDLGPGSPAVVSPMVGNTAPPSSLSSQLAGLDLGTESVSGTLSSLQQCNPRDGFDMFAQTRGNSLAEQRKTVTYEDPQAVGGLASALDNRKQSSEGIPVAQPSVMDDIEVWLRTDLKGDDLEEGVTSEEFDKFLEERAKAAEMVPDLPSPPMEAPAPASNPSGRKKPERSEDALFAL

SEQ ID NO: 13461 - protein, 459 aa, Artificial Sequence
  Synthetic polypeptide
EVRSLSARQPPRLGKKATDGSLQSEDWTLNMEICDIINETEEGPKDAIRALKKRLNGNRNYREVMLALTVLETCVKNCGHRFHILVANRDFIDSVLVKIISPKNNPPTIVQDKVLALIQSVPEVDPAATMPRSQSQQRTSAGSYSSPPPAPYSAPQAPALSVTGPITANSEQIARLRSELDVVRGNTKVMSEMLTEMVPGQEDSSDLELLQELNRTCRAMQQRIVELISRVSNEEVTEELLHVNDDLNNVFLRYERFERYRSGRSVQNASNGVLNEVTEDNLIDLGPGSPAVVSPMVGNTAPPSSLSSQLAGLDLGTESVSGTLSSLQQCNPRDGFDMFAQTRGNSLAEQRKTVTYEDPQAVGGLASALDNRKQSSEGIPVAQPSVMDDIEVWLRTDLKGDDLEEGVTSEEFDKFLEERAKAAEMVPDLPSPPMEAPAPASNPSGRKKPERSEDALFAL

SEQ ID NO: 13462 - protein, 459 aa, Artificial Sequence; identical to SEQ ID NO: 13461
  Synthetic polypeptide

SEQ ID NO: 13463 - protein, 480 aa, Artificial Sequence
  Synthetic polypeptide
EVRSLSARQPPRLGKKATDGSLQSEDWTLNMEICDIINETEEGPKDAIRALKKRLNGNRNYREVMLALTVLETCVKNCGHRFHILVANRDFIDSVLVKIISPKNNPPTIVQDKVLALIQAWADAFRSSPDLTGVVHIYEELKRKGVEFPMADLDALSPIHTPQRIARLRSELDVVRGNTKVMSEMLTEMVPGQEDSSDLELLQELNRTCRAMQQRIVELISRVSNEEVTEELLHVNDDLNNVFLRYERFERYRSGRSVQNASNGVLNEVTEDNLIDLGPGSPAVVSPMVGNTAPPSSLSSQLAGLDLGTESVSGTLSSLQQCNPRDGFDMFAQTRGNSLAEQRKTVTYEDPQAVGGLASALDNRKQSSEGTFLSSAQKRGRGGESDLEPIDSWLITQGMIPVAQPSVMDDIEVWLRTDLKGDDLEEGVTSEEFDKFLEERAKAAEMVPDLPSPPMEAPAPASNPSGRKKPERSEDALFAL

SEQ ID NO: 13464 - protein, 386 aa, Artificial Sequence
  Synthetic polypeptide
EVRSLSARQPPRLGKKATDGSLQSEDWTLNMEICDIINETEEGPKDAIRALKKRLNGNRNYREVMLALTVLETCVKNCGHRFHILVANRDFIDSVLVKIISPKNNPPTIVQDKVLALIQIARLRSELDVVRGNTKVMSEMLTEMVPGQEDSSDLELLQELNRTCRAMQQRIVELISRVSNEEVTEELLHVNDDLNNVFLRYERFERYRSGRSVQNASNGVLNEVTEDNLIDLGPGSPAVVSPMVGNTAPPSSLSSQLAGLDLGTESVSGTLSSLQQCNPRDGFDMFAQTRGNSLAEQRKTVTYEDPQAVGGLASALDNRKQSSEGKGDDLEEGVTSEEFDKFLEERAKAAEMVPDLPSPPMEAPAPASNPSGRKKPERSEDALFAL

SEQ ID NO: 13465 - protein, 385 aa, Artificial Sequence
  Synthetic polypeptide
EVRSLSARQPPRLGKKATDGSLQSEDWTLNMEICDIINETEEGPKDAIRALKKRLNGNRNYREVMLALTIARLRSELDVVRGNTKVMSEMLTEMVPGQEDSSDLELLQELNRTCRAMQQRIVELISRVSNEEVTEELLHVNDDLNNVFLRYERFERYRSGRSVQNASNGVLNEVTEDNLIDLGPGSPAVVSPMVGNTAPPSSLSSQLAGLDLGTESVSGTLSSLQQCNPRDGFDMFAQTRGNSLAEQRKTVTYEDPQAVGGLASALDNRKQSSEGTFLSSAQKRGRGGESDLEPIDSWLITQGMIPVAQPSVMDDIEVWLRTDLKGDDLEEGVTSEEFDKFLEERAKAAEMVPDLPSPPMEAPAPASNPSGRKKPERSEDALFAL

SEQ ID NO: 13466 - protein, 8 aa, Artificial Sequence
  Synthetic polypeptide
WMLGLIPR

SEQ ID NO: 13467 - protein, 8 aa, Artificial Sequence
  Synthetic polypeptide
WMLGLIPR

SEQ ID NO: 13468 - protein, 8 aa, Artificial Sequence
  Synthetic polypeptide
WMLGLIPR

SEQ ID NO: 13469 - protein, 8 aa, Artificial Sequence
  Synthetic polypeptide
WMLGLIPR

SEQ ID NO: 13470 - protein, 8 aa, Artificial Sequence
  Synthetic polypeptide
WMLGLIPR

SEQ ID NO: 13471 - protein, 8 aa, Artificial Sequence
  Synthetic polypeptide
WMLGLIPR

SEQ ID NO: 13472 - protein, 138 aa, Artificial Sequence
  Synthetic polypeptide
YQGDGEREPLRAVLPPRALPPCGHHLRQWLCAAVLHQLPASQRAACQPSSHYPDSHPHGAECLWTDVLYSRHPTYDVPPPCLSDAFHHHHSGRAVPIQVHHPVRHCPAQCSEVWILCEAHCLKVAVDGQHVFEYYHRL

SEQ ID NO: 13473 - protein, 144 aa, Artificial Sequence
  Synthetic polypeptide
LMDAGLDTKVMVNGSLFVQYFHRVPFHRVDTISVNGSVQLSYISFQPPSVRPANPAPITQTVIHTVQSASGQMFSTPAIPPMMYPHPAYPMPFITTIPGGLYPSKSIILSGTVLPSAQRCGSCVKLTASRWPWMVSTCLNTTIA

SEQ ID NO: 13474 - protein, 66 aa, Artificial Sequence
  Synthetic polypeptide
YQGDGEREPLRAVLPPRALPPCGHHLRQWLCAAVLHQLPADAFHHHHSGRAVPIQVHHPVRHCPAQ

SEQ ID NO: 13475 - protein, 73 aa, Artificial Sequence
  Synthetic polypeptide
LMDAGLDTKVMVNGSLFVQYFHRVPFHRVDTISVNGSVQLSYISFQPMPFITTIPGGLYPSKSIILSGTVLPS

SEQ ID NO: 13476 - protein, 164 aa, Artificial Sequence
  Synthetic polypeptide
YQGDGEREPLRAVLPPRALPPCGHHLRQWLCAAVLHQLPESPRSPRSACLLHGAVLPACLFPTQAQGAQTKTSQRAACQPSSHYPDSHPHGAECLWTDVLSDSRHPTYDVPPPCLSDAFHHHHSGRAVPIQVHHPVRHCPAQCSEVPHQPVLWEPHRLPHEPPF

SEQ ID NO: 13477 - protein, 164 aa, Artificial Sequence; identical to SEQ ID NO: 13476
  Synthetic polypeptide

SEQ ID NO: 13478 - protein, 254 aa, Artificial Sequence
  Synthetic polypeptide
LMDAGLDTKVMVNGSLFVQYFHRVPFHRVDTISVNGSVQLSYISFQNPRAVPVQPAFSTVPFSQPVCFPPRPRGRRQKPPSVRPANPAPITQTVIHTVQSASGQMFSQTPAIPPMMYPHPAYPMPFITTIPGGLYPSKSIILSGTVLPSAQRFHINLCSGSHIAFHMNPRFDENAVVRNTQINNSWGSEERSLPRKMPFVRGQSFSVWILCEAHCLKVAVDGQHVFEYYHRLRNLPTINKLEVGGDIQLTHVQT

SEQ ID NO: 13479 - protein, 254 aa, Artificial Sequence; identical to SEQ ID NO: 13478
  Synthetic polypeptide

SEQ ID NO: 13480 - protein, 131 aa, Artificial Sequence
  Synthetic polypeptide
YQGDGEREPLRAVLPPRALPPCGHHLRQWLCAAVLHQLPASQRAACQPSSHYPDSHPHGAECLWTDVLYSRHPTYDVPPPCLSDAFHHHHSGRAVPIQVHHPVRHCPAQCSEVPHQPVLWEPHRLPHEPPF

SEQ ID NO: 13481 - protein, 221 aa, Artificial Sequence
  Synthetic polypeptide
LMDAGLDTKVMVNGSLFVQYFHRVPFHRVDTISVNGSVQLSYISFQPPSVRPANPAPITQTVIHTVQSASGQMFSTPAIPPMMYPHPAYPMPFITTIPGGLYPSKSIILSGTVLPSAQRFHINLCSGSHIAFHMNPRFDENAVVRNTQINNSWGSEERSLPRKMPFVRGQSFSVWILCEAHCLKVAVDGQHVFEYYHRLRNLPTINKLEVGGDIQLTHVQT

SEQ ID NO: 13482 - protein, 126 aa, Artificial Sequence
  Synthetic polypeptide
YQGDGEREPLRAVLPPRALPPCGHHLRQWLCAAVLHQLPDPDSHPHGAECLWTDVLYSRHPTYDVPPPCLSDAFHHHHSGRAVPIQVHHPVRHCPAQCSEVWILCEAHCLKVAVDGQHVFEYYHRL

SEQ ID NO: 13483 - protein, 132 aa, Artificial Sequence
  Synthetic polypeptide
LMDAGLDTKVMVNGSLFVQYFHRVPFHRVDTISVNGSVQLSYISFQTQTVIHTVQSASGQMFSTPAIPPMMYPHPAYPMPFITTIPGGLYPSKSIILSGTVLPSAQRCGSCVKLTASRWPWMVSTCLNTTIA

SEQ ID NO: 13484 - protein, 150 aa, Artificial Sequence
  Synthetic polypeptide
RSFSERVEHRKPRGREVAFSPEREAGFLALLGCNCRQPLRQLRPWPWPPTALSGFLCVRGVLRGERALSPSPEAPLRASGQRANPTTAPAAECPPYNPRDLCWTPGWLPMGPESGKRRSRCVEEDAGPALHRQGGTGPAVSSSQGPCLRD

SEQ ID NO: 13485 - protein, 150 aa, Artificial Sequence; identical to SEQ ID NO: 13484
  Synthetic polypeptide

SEQ ID NO: 13486 - protein, 150 aa, Artificial Sequence; identical to SEQ ID NO: 13484
  Synthetic polypeptide

SEQ ID NO: 13487 - protein, 248 aa, Artificial Sequence
  Synthetic polypeptide
RFLLSVKPAFWRCLAATADSHSGSSGRGPGPRRPSVASSVSEEYFEVREHSVPLRRRHSEQVANGPTPPPRRQLSAPHITRGTFVGPQGGSPWAQSRGREEADALKRMQAQRSTDKEAQGQQFHHHRVPASGTRDKDGFPGPPRYRSAADSVQSSTRNAGPAMAGPHHWQAKGGQVPRLLPDPGSPRLAQNARPMTDGRATEEHPSPFGIPYSKLSQSKHLKARTGGSQWASSDSKRRAQAPRDRKDP

SEQ ID NO: 13488 - protein, 248 aa, Artificial Sequence; identical to SEQ ID NO: 13487
  Synthetic polypeptide

SEQ ID NO: 13489 - protein, 248 aa, Artificial Sequence; identical to SEQ ID NO: 13487
  Synthetic polypeptide

SEQ ID NO: 13490 - protein, 40 aa, Artificial Sequence
  Synthetic polypeptide
SRLSGVAWLQLPTATQAAPAVALAPDGPQWLPLCQRSTSR

SEQ ID NO: 13491 - protein, 40 aa, Artificial Sequence; identical to SEQ ID NO: 13490
  Synthetic polypeptide

SEQ ID NO: 13492 - protein, 40 aa, Artificial Sequence; identical to SEQ ID NO: 13490
  Synthetic polypeptide

SEQ ID NO: 13493 - protein, 40 aa, Artificial Sequence; identical to SEQ ID NO: 13490
  Synthetic polypeptide

SEQ ID NO: 13494 - protein, 163 aa, Artificial Sequence
  Synthetic polypeptide
RSFSERVEHRKPRGREVAFSPEREAGFLALLGCNCRQPLRQLRPWPWPPTALSGFLCVRGVLRGERALSPSPEAPLRASGQRANPTTAPAAECPPYNPRDLCWTPGWLPMGPESGKRRSRCVEEDAGPALHRQGGTGQGPRTLGALQPGFSARSPSYLGTMRG

SEQ ID NO: 13495 - protein, 159 aa, Artificial Sequence
  Synthetic polypeptide
RFLLSVKPAFWRCLAATADSHSGSSGRGPGPRRPSVASSVSEEYFEVREHSVPLRRRHSEQVANGPTPPPRRQLSAPHITRGTFVGPQGGSPWAQSRGREEADALKRMQAQRSTDKEAQDKVPEPWVPCSLGSVPGARPTWEQCAADHARHDDQAHGEH

SEQ ID NO: 13496 - protein, 248 aa, Artificial Sequence; identical to SEQ ID NO: 13487
  Synthetic polypeptide

SEQ ID NO: 13497 - protein, 248 aa, Artificial Sequence; identical to SEQ ID NO: 13487
  Synthetic polypeptide

SEQ ID NO: 13498 - protein, 248 aa, Artificial Sequence; identical to SEQ ID NO: 13487
  Synthetic polypeptide

SEQ ID NO: 13499 - protein, 40 aa, Artificial Sequence; identical to SEQ ID NO: 13490
  Synthetic polypeptide

SEQ ID NO: 13500 - protein, 40 aa, Artificial Sequence; identical to SEQ ID NO: 13490
  Synthetic polypeptide

SEQ ID NO: 13501 - protein, 40 aa, Artificial Sequence; identical to SEQ ID NO: 13490
  Synthetic polypeptide

SEQ ID NO: 13502 - protein, 40 aa, Artificial Sequence; identical to SEQ ID NO: 13490
  Synthetic polypeptide

SEQ ID NO: 13503 - protein, 159 aa, Artificial Sequence; identical to SEQ ID NO: 13495
  Synthetic polypeptide

SEQ ID NO: 13504 - protein, 150 aa, Artificial Sequence
  Synthetic polypeptide
RSFFERVEHRKPRGREVAFSPEREAGFLALLGCNCRQPLRQLRPWPWPPTALSGFLCVRGVLRGERALSPSPEAPLRASGQRANPTTAPAAECPPYNPRDLCWTPGWLPMGPESGKRRSRCVEEDAGPALHRQGGTGPAVSSSQGPCLRD

SEQ ID NO: 13505 - protein, 150 aa, Artificial Sequence; identical to SEQ ID NO: 13504
  Synthetic polypeptide

SEQ ID NO: 13506 - protein, 150 aa, Artificial Sequence; identical to SEQ ID NO: 13504
  Synthetic polypeptide

SEQ ID NO: 13507 - protein, 163 aa, Artificial Sequence
  Synthetic polypeptide
RSFFERVEHRKPRGREVAFSPEREAGFLALLGCNCRQPLRQLRPWPWPPTALSGFLCVRGVLRGERALSPSPEAPLRASGQRANPTTAPAAECPPYNPRDLCWTPGWLPMGPESGKRRSRCVEEDAGPALHRQGGTGQGPRTLGALQPGFSARSPSYLGTMRG

SEQ ID NO: 13508 - protein, 8 aa, Artificial Sequence
  Synthetic polypeptide
WMLGLIPR

SEQ ID NO: 13509 - protein, 8 aa, Artificial Sequence
  Synthetic polypeptide
WMLGLIPR

SEQ ID NO: 13510 - protein, 164 aa, Artificial Sequence
  Synthetic polypeptide
YQGDGEREPLRAVLPPRALPPCGHHLRQWLCAAVLHQLPESPHSPRSACLLHGAVLPACLFPTQAQGAQTKTSQRAACQPSSHYPDSHPHGAERLWTDVLSDSRHPTYDVPPPCLSDAFHHHHSGRAVPIQVHHPVRHCPAQCSEVPHQPVLWEPHRLPHEPPF

SEQ ID NO: 13511 - protein, 254 aa, Artificial Sequence
  Synthetic polypeptide
LMDAGLDTKVMVNGSLFVQYFHRVPFHRVDTISVNGSVQLSYISFQNPRTVPVQPAFSTVPFSQPVCFPPRPRGRRQKPPSVRPANPAPITQTVIHTVQSASGQMFSQTPAIPPMMYPHPAYPMPFITTIPGGLYPSKSIILSGTVLPSAQRFHINLCSGSHIAFHMNPRFDENAVVRNTQINNSWGSEERSLPRKMPFVRGQSFSVWILCEAHCLKVAVDGQHVFEYYHRLRNLPTINKLEVGGDIQLTHVQT

SEQ ID NO: 13512 - protein, 163 aa, Artificial Sequence
  Synthetic polypeptide
YQGDGEREPLRAVLPPRALPPCGHHLRQWLCAAVLHQLPESPHSPRSACLLHGAVLPACLFPTQAQGAQTKTSQRAACQPSSHYPDSHPHGAERLWTDVLYSRHPTYDVPPPCLSDAFHHHHSGRAVPIQVHHPVRHCPAQCSEVPHQPVLWEPHRLPHEPPF

SEQ ID NO: 13513 - protein, 253 aa, Artificial Sequence
  Synthetic polypeptide
LMDAGLDTKVMVNGSLFVQYFHRVPFHRVDTISVNGSVQLSYISFQNPRTVPVQPAFSTVPFSQPVCFPPRPRGRRQKPPSVRPANPAPITQTVIHTVQSASGQMFSTPAIPPMMYPHPAYPMPFITTIPGGLYPSKSIILSGTVLPSAQRFHINLCSGSHIAFHMNPRFDENAVVRNTQINNSWGSEERSLPRKMPFVRGQSFSVWILCEAHCLKVAVDGQHVFEYYHRLRNLPTINKLEVGGDIQLTHVQT

SEQ ID NO: 13514 - protein, 19 aa, Artificial Sequence
  Synthetic polypeptide
ELLASIRVSDRIISPAPQT

SEQ ID NO: 13515 - protein, 19 aa, Artificial Sequence
  Synthetic polypeptide
ELLASIRVSDRIISPAPQT

SEQ ID NO: 13516 - protein, 89 aa, Artificial Sequence
  Synthetic polypeptide
SSWLPYVSQTESSPLPHKHERKDKRSTPEEEGRSAPEKIIQSLKLCPGGHRPASLSSGCPAGCRLSFNLPPSMLLSVQKCCMPSSLKTC

SEQ ID NO: 13517 - protein, 42 aa, Artificial Sequence
  Synthetic polypeptide
ALGFHTCLRQNHLPCPTNMKEKTREAPQKRRGEVPQKKSSSL

SEQ ID NO: 13518 - protein, 19 aa, Artificial Sequence
  Synthetic polypeptide
SSWLPYVSQTESSPLPHKH

SEQ ID NO: 13519 - protein, 19 aa, Artificial Sequence
  Synthetic polypeptide
ALGFHTCLRQNHLPCPTNM

SEQ ID NO: 13520 - protein, 147 aa, Artificial Sequence
  Synthetic polypeptide
YWLACRVIGRPTHKKGLIPCPAHRPAHHAVSVAPLQRRPRLQWHPPKGGLQQPQRGPHHAGSGDPYLPLDPLHERGRLPGGALLVHPAGSLERQCGPPPAASAGLAGPAAPGPSVRFCGAAAAPRRLLRAGSHPLCPPRRLRWPSGC

SEQ ID NO: 13521 - protein, 147 aa, Artificial Sequence; identical to SEQ ID NO: 13520
  Synthetic polypeptide

SEQ ID NO: 13522 - protein, 397 aa, Artificial Sequence
  Synthetic polypeptide
YRAQHIGPLTTQYLWHRFSADLGYNGTRQRGGCSNRSADPTMQEVETLTSHWTLYMNVGGFLVGLFSSTLLGAWSDSVGRRPLLVLASLGLLLQALVSVFVVQLQLHVGYFVLGRILCALLGDFGGLLAASFASVADVSSSRSRTFRMALLEASIGVAGMLASLLGGHWLRAQGYANPFWLALALLIAMTLYAAFCFGETLKEPKSTRLFTFRHHRSIVQLYVAPAPEKSRKHLALYSLAIFVVITVHFGAQDILTLYELSTPLCWDSKLIGYGSAAQHLPYLTSLLALKLLQYCLADAWVAEIGLAFNILGMVVFAFATITPLMFTGALFSAVACVNSLAMLTASGFNSLYPATLNFMKGFPFLLGAGLLLIPAVLIGMLEKADPHLEFQQFPQSP

SEQ ID NO: 13523 - protein, 426 aa, Artificial Sequence
  Synthetic polypeptide
YRAQHIGPLTTQYLWHRFSADLGYNGTRQRGGCSNRSADPTMQEVETLTSHWTLYMNVGGFLVGLFSSTLLGAWSDSVGRRPLLVLASLGLLLQALVSVFVVQLQLHVGYFVLGRILCALLGDFGGLLAASFASVADVSSSRSRTFRMALLEASIGVAGMLASLLGGHWLRAQGYANPFWLALALLIAMTLYAAFCFGETLKEPKSTRLFTFRHHRSIVQLYVAPAPEKSRKHLALYSLAIFVVITVHFGAQDILTLYELSTPLCWDSKLIGYGSAAQHLPYLTSLLALKLLQYCLADAWVAEIGLAFNILGMVVFAFATITPLMFTGYGLLFLSLVITPVIRAKLSKLVRETEQGALFSAVACVNSLAMLTASGIFNSLYPATLNFMKGFPFLLGAGLLLIPAVLIGMLEKADPHLEFQQFPQSP

SEQ ID NO: 13524 - protein, 16 aa, Artificial Sequence
  Synthetic polypeptide
GQEFETNLANMCMADS

SEQ ID NO: 13525 - protein, 16 aa, Artificial Sequence
  Synthetic polypeptide
GQEFETNLANMCMADS

SEQ ID NO: 13526 - protein, 207 aa, Artificial Sequence
  Synthetic polypeptide
FQHFGEAEAGGSPEVRSLRPTWPTCVWQTPDMLVEIETAWSLSGYLLVCFSAGYFIHDTVDIVASGQTRASWEYLVHHVMAMGAFFSGIFWSSFVGGGVLTLLVEVSNIFLTIRMMMKISNAQDHLLYRVNKYVNLVMYFLFRLAPQAYLTHFFLRYVNQRTLGTFLLGILLMLDVMIIIYFSRLLRSDFCPEHVPKKQHKDKFLTE

SEQ ID NO: 13527 - protein, 207 aa, Artificial Sequence; identical to SEQ ID NO: 13526
  Synthetic polypeptide

SEQ ID NO: 13528 - protein, 14 aa, Artificial Sequence
  Synthetic polypeptide
DQPGQHVYGRLLTC

SEQ ID NO: 13529 - protein, 14 aa, Artificial Sequence
  Synthetic polypeptide
DQPGQHVYGRLLTC

SEQ ID NO: 13530 - protein, 245 aa, Artificial Sequence
  Synthetic polypeptide
HAQLCGLERAVEPLDAIRQLGGIVRDGEKVVEINPGLLVTVKTTSRSYQAKSLVITAGPWTNQLLRPLGIEMPLQTLRINVCYWREMVPGSYGVSQAFPCFLWLGLCPHHIYGLPTGEYPGLMKVSYHHGNHADPEERDCPTARTDIGDVQILSSFVRDHLPDLKPEPAVIESCMYTNTPDEQFILDRHPKYDNIVIGAGFSGHGFKLAPVVGKILYELSMKLTPSYDLAPFRISRFPSLGKAHL

SEQ ID NO: 13531 - protein, 33 aa, Artificial Sequence
  Synthetic polypeptide
RALELDLALNLSSDTLSCVVWNELLNLWMQFDS

SEQ ID NO: 13532 - protein, 33 aa, Artificial Sequence; identical to SEQ ID NO: 13531
  Synthetic polypeptide

SEQ ID NO: 13533 - protein, 33 aa, Artificial Sequence; identical to SEQ ID NO: 13531
  Synthetic polypeptide

SEQ ID NO: 13534 - protein, 13 aa, Artificial Sequence
  Synthetic polypeptide
TSGCNSTARRHSA

SEQ ID NO: 13535 - protein, 13 aa, Artificial Sequence
  Synthetic polypeptide
TSGCNSTARRHSA

SEQ ID NO: 13536 - protein, 13 aa, Artificial Sequence
  Synthetic polypeptide
TSGCNSTARRHSA

SEQ ID NO: 13537 - protein, 74 aa, Artificial Sequence
  Synthetic polypeptide
HAQLCGLERAVEPLDAIRQLGGIVRDGEKVVEINPGLLVTVKTTSRSYQAKSLVITAGPWTNQLLRPLGIEMPL

SEQ ID NO: 13538 - protein, 125 aa, Artificial Sequence
  Synthetic polypeptide
HAQLCGLERAVEPLDAIRQLGGIVRDGEKVVEINPGLLVTVKTTSRSYQAKSLVITAGPWTNQLLRPLGIEMPLQTLRINVCYWREMVPGSYGVSQAFPCFLWLGLCPHHIYGLPTGEYPGLMKV

SEQ ID NO: 13539 - protein, 229 aa, Artificial Sequence
  Synthetic polypeptide
GWARWLMPVIPALLEAKSLASRLKENMEKLTEERDQRIAAENREKEQNKRLQRQLRDTKEEMGELARKEAEASRKKHELEMDLESLEAANQSLQADLKLAFKRIGDLQAAIEDEMESDENEDLINSLQDMVTKYQKRKNKLEGDSDVDSELEDRVDGVKSWLSKNKGPSKAASDDGSLKSSSPTSYWKSLAPDRSDDEHDPLDNTSRPRYSHSYLSDSDTEAKLTETNA

SEQ ID NO: 13540 - protein, 229 aa, Artificial Sequence; identical to SEQ ID NO: 13539
  Synthetic polypeptide

SEQ ID NO: 13541 - protein, 20 aa, Artificial Sequence
  Synthetic polypeptide
SQHFWRPRAWLAVSRKTWRS

SEQ ID NO: 13542 - protein, 20 aa, Artificial Sequence
  Synthetic polypeptide
SQHFWRPRAWLAVSRKTWRS

SEQ ID NO: 13543 - protein, 20 aa, Artificial Sequence
  Synthetic polypeptide
SQHFWRPRAWLAVSRKTWRS

SEQ ID NO: 13544 - protein, 20 aa, Artificial Sequence
  Synthetic polypeptide
SQHFWRPRAWLAVSRKTWRS

SEQ ID NO: 13545 - protein, 19 aa, Artificial Sequence
  Synthetic polypeptide
MGAVAHACNPSTFGGQEPG

SEQ ID NO: 13546 - protein, 19 aa, Artificial Sequence
  Synthetic polypeptide
MGAVAHACNPSTFGGQEPG

SEQ ID NO: 13547 - protein, 19 aa, Artificial Sequence
  Synthetic polypeptide
MGAVAHACNPSTFGGQEPG

SEQ ID NO: 13548 - protein, 19 aa, Artificial Sequence
  Synthetic polypeptide
MGAVAHACNPSTFGGQEPG

SEQ ID NO: 13549 - protein, 214 aa, Artificial Sequence
  Synthetic polypeptide
GWARWLMPVIPALLEAKSLASRLKENMEKLTEERDQRIAAENREKEQNKRLQRQLRDTKEEMGELARKEAEASRKKHELEMDLESLEAANQSLQADLKLAFKRIGDLQAAIEDEMESDENEDLINSEGDSDVDSELEDRVDGVKSWLSKNKGPSKAASDDGSLKSSSPTSYWKSLAPDRSDDEHDPLDNTSRPRYSHSYLSDSDTEAKLTETNA

SEQ ID NO: 13550 - protein, 214 aa, Artificial Sequence; identical to SEQ ID NO: 13549
  Synthetic polypeptide

SEQ ID NO: 13551 - protein, 113 aa, Artificial Sequence
  Synthetic polypeptide
GMMEGAPARHRRRRTSSWRLTTWNPRRMTLWLLWTRPPISPWSARWPAQTRRGACSGYWKRRLWCQGPVRTPSWSAFSPIMAPRKVTKKAKAPFCTAANHTTFSWATAMAPTG

SEQ ID NO: 13552 - protein, 113 aa, Artificial Sequence; identical to SEQ ID NO: 13551
  Synthetic polypeptide

SEQ ID NO: 13553 - protein, 113 aa, Artificial Sequence; identical to SEQ ID NO: 13551
  Synthetic polypeptide

SEQ ID NO: 13554 - protein, 113 aa, Artificial Sequence; identical to SEQ ID NO: 13551
  Synthetic polypeptide

SEQ ID NO: 13555 - protein, 17 aa, Artificial Sequence
  Synthetic polypeptide
WRELLHGTEGGEHRAGV

SEQ ID NO: 13556 - protein, 17 aa, Artificial Sequence
  Synthetic polypeptide
WRELLHGTEGGEHRAGV

SEQ ID NO: 13557 - protein, 17 aa, Artificial Sequence
  Synthetic polypeptide
WRELLHGTEGGEHRAGV

SEQ ID NO: 13558 - protein, 17 aa, Artificial Sequence
  Synthetic polypeptide
WRELLHGTEGGEHRAGV

SEQ ID NO: 13559 - protein, 1229 aa, Artificial Sequence
  Synthetic polypeptide
DDGGSSCTAQKEENIELAFDDLEPPTDDSVAAVDQASHQSLVRSLARTDEARGLLWLLEEEALVPGASEDTLLERLFSYYGPQEGDKKGQSPLLHSSKPHHFLLGHSHGTNWVEYNVTGWLNYTKQNPATQNAPRLLQDSQKKIISNLFLGRAGSATVLSGSIAGLEGGSQLALRRATSMRKTFTTGMAAVKKKSLCIQMKLQVDALIDTIKKSKLHFVHCFLPVAEGWAGEPRSASSRRVSSSSELDLPSGDHCEAGLLQLDVPLLRTQLRGSRLLDAMRMYRQGYPDHMVFSEFRRRFDVLAPHLTKKHGRNYIVVDERRAVEELLECLDLEKSSCCMGLSRVFFRAGTLARLEEQRDEQTSRNLTLFQAACRGYLARQHFKKRKIQDLAIRCVQKNIKKNKGVKDWPWWKLFTTVRPLIEVQLSEEQIRNKDEEIQQLRSKLEKAEKERNELRLNSDRLESRISELTSELTDERNTGESASQLLDAETAERLRAEKEMKELQTQYDALKKQMEVMEMEVMEARLIRAAEINGEVDDDDAGGEWRLKYERAVREVDFTKKRLQQEFEDKLEVEQQNKRQLERRLGDLQADSEESQRALQQLKKKCQRLTAELQDTKLHLEGQQVRNHELEKKQRRFDSELSQAHEEAQREKLQREKLQREKDMLLAEAFSLKQQLEEKDMDIAGFTQKVVSLEAELQDISSQESKDEASLAKVKKQLRDLEAKVKDQEEELDEQAGTIQMLEQAKLRLEMEMERMRQTHSKEMESRDEEVEEARQSCQKKLKQMEVQLEEEYEDKQKVLREKRELEGKLATLSDQVNRRDFESEKRLRKDLKRTKALLADAQLMLDHLKNSAPSKREIAQLKNQLEESEFTCAAAVKARKAMEVEIEDLHLQIDDIAKAKTALEEQLSRLQREKNEIQNRLEEDQEDMNELMKKHKAAVAQASRDLAQINDLQAQLEEANKEKQELQEKLQALQSQVEFLEQSMVDKSLVSRQEAKIRELETRLEFERTQVKRLESLASRLKENMEKLTEERDQRIAAENREKEQNKRLQRQLRDTKEEMGELARKEAEASRKKHELEMDLESLEAANQSLQADLKLAFKRIGDLQAAIEDEMESDENEDLINSLQDMVTKYQKRKNKLEGDSDVDSELEDRVDGVKSWLSKNKGPSKAASDDGSLKSSSPTSYWKSLAPDRSDDEHDPLDNTSRPRYSHSYLSDSDTEAKLTETNA

SEQ ID NO: 13560 - protein, 1229 aa, Artificial Sequence; identical to SEQ ID NO: 13559
  Synthetic polypeptide

SEQ ID NO: 13561 - protein, 1177 aa, Artificial Sequence
  Synthetic polypeptide
DDGGSSCTAQKEENIELAFDDLEPPTDDSVAAVDQASHQSLVRSLARTDEARGLLWLLEEEALVPGASEDTLLERLFSYYGPQEGDKKGQSPLLHSSKPHHFLLGHSHGTNWVEYNVTGWLNYTKQNPATQNAPRLLQDSQKKIISNLFLGRAGSATVLSGSIAGLEGGSQLALRRATSMRKTFTTGMAAVKKKSLCIQMKLQVDALIDTIKKSKLHFVHCFLPVAEGWAGEPRSASSRRVSSSSELDLPSGDHCEAGLLQLDVPLLRTQLRGSRLLDAMRMYRQGYPDHMVFSEFRRRFDVLAPHLTKKHGRNYIVVDERRAVEELLECLDLEKSSCCMGLSRVFFRAGTLARLEEQRDEQTSRNLTLFQAACRGYLARQHFKKRKIQDLAIRCVQKNIKKNKGVKDWPWWKLFTTVRPLIEVQLSEEQIRNKDEEIQQLRSKLEKAEKERNELRLNSDRLESRISELTSELTDERNTGESASQLLDAETAERLRAEKEMKELQTQYDALKKQMEVMEMEVMEARLIRAAEINGEVDDDDAGGEWRLKYERAVREVDFTKKRLQQEFEDKLEVEQQNKRQLERRLGDLQADSEESQRALQQLKKKCQRLTAELQDTKLHLEGQQVRNHELEKKQRRFDSELSQAHEEAQREKLQREKLQREKDMLLAEAFSLKQQLEEKDMDIAGFTQKVVSLEAELQDISSQESKDEASLAKVKKQLRDLEAKVKDQEEELDEQAGTIQMLEQLKQMEVQLEEEYEDKQKVLREKRELEGKLATLSDQVNRRDFESEKRLRKDLKRTKALLADAQLMLDHLKNSAPSKREIAQLKNQLEESEFTCAAAVKARKAMEVEIEDLHLQIDDIAKAKTALEEQLSRLQREKNEIQNRLEEDQEDMNELMKKHKAAVAQASRDLAQINDLQAQLEEANKEKQELQEKLQALQSQVEFLEQSMVDKSLVSRQEAKIRELETRLEFERTQVKRLESLASRLKENMEKLTEERDQRIAAENREKEQNKRLQRQLRDTKEEMGELARKEAEASRKKHELEMDLESLEAANQSLQADLKLAFKRIGDLQAAIEDEMESDENEDLINSEGDSDVDSELEDRVDGVKSWLSKNKGPSKAASDDGSLKSSSPTSYWKSLAPDRSDDEHDPLDNTSRPRYSHSYLSDSDTEAKLTETNA

SEQ ID NO: 13562 - protein, 1214 aa, Artificial Sequence
  Synthetic polypeptide
DDGGSSCTAQKEENIELAFDDLEPPTDDSVAAVDQASHQSLVRSLARTDEARGLLWLLEEEALVPGASEDTLLERLFSYYGPQEGDKKGQSPLLHSSKPHHFLLGHSHGTNWVEYNVTGWLNYTKQNPATQNAPRLLQDSQKKIISNLFLGRAGSATVLSGSIAGLEGGSQLALRRATSMRKTFTTGMAAVKKKSLCIQMKLQVDALIDTIKKSKLHFVHCFLPVAEGWAGEPRSASSRRVSSSSELDLPSGDHCEAGLLQLDVPLLRTQLRGSRLLDAMRMYRQGYPDHMVFSEFRRRFDVLAPHLTKKHGRNYIVVDERRAVEELLECLDLEKSSCCMGLSRVFFRAGTLARLEEQRDEQTSRNLTLFQAACRGYLARQHFKKRKIQDLAIRCVQKNIKKNKGVKDWPWWKLFTTVRPLIEVQLSEEQIRNKDEEIQQLRSKLEKAEKERNELRLNSDRLESRISELTSELTDERNTGESASQLLDAETAERLRAEKEMKELQTQYDALKKQMEVMEMEVMEARLIRAAEINGEVDDDDAGGEWRLKYERAVREVDFTKKRLQQEFEDKLEVEQQNKRQLERRLGDLQADSEESQRALQQLKKKCQRLTAELQDTKLHLEGQQVRNHELEKKQRRFDSELSQAHEEAQREKLQREKLQREKDMLLAEAFSLKQQLEEKDMDIAGFTQKVVSLEAELQDISSQESKDEASLAKVKKQLRDLEAKVKDQEEELDEQAGTIQMLEQAKLRLEMEMERMRQTHSKEMESRDEEVEEARQSCQKKLKQMEVQLEEEYEDKQKVLREKRELEGKLATLSDQVNRRDFESEKRLRKDLKRTKALLADAQLMLDHLKNSAPSKREIAQLKNQLEESEFTCAAAVKARKAMEVEIEDLHLQIDDIAKAKTALEEQLSRLQREKNEIQNRLEEDQEDMNELMKKHKAAVAQASRDLAQINDLQAQLEEANKEKQELQEKLQALQSQVEFLEQSMVDKSLVSRQEAKIRELETRLEFERTQVKRLESLASRLKENMEKLTEERDQRIAAENREKEQNKRLQRQLRDTKEEMGELARKEAEASRKKHELEMDLESLEAANQSLQADLKLAFKRIGDLQAAIEDEMESDENEDLINSEGDSDVDSELEDRVDGVKSWLSKNKGPSKAASDDGSLKSSSPTSYWKSLAPDRSDDEHDPLDNTSRPRYSHSYLSDSDTEAKLTETNA

SEQ ID NO: 13563 - protein, 36 aa, Artificial Sequence
  Synthetic polypeptide
QWSALPCKIRWGLAWGLAAQAGLELVASRDPPVSAS

SEQ ID NO: 13564 - protein, 36 aa, Artificial Sequence; identical to SEQ ID NO: 13563
  Synthetic polypeptide

SEQ ID NO: 13565 - protein, 50 aa, Artificial Sequence
  Synthetic polypeptide
SCVVSESRTGILGSGRQISSDCKEEFVTVECTALQNKMGTCLGSCCPGWS

SEQ ID NO: 13566 - protein, 50 aa, Artificial Sequence; identical to SEQ ID NO: 13565
  Synthetic polypeptide

SEQ ID NO: 13567 - protein, 534 aa, Artificial Sequence
  Synthetic polypeptide
LGGSKLKTVHERIPLAGLSKLPSVPQIAKAFCDDAVGLRFNPVLYPKASQMIVSYDEHEVNNTFKFGVIYQKARQTLEEELFGNNEESPAFKEFLDLLGDTITLQDFKGFRGGLDVTHGQTGVESVYTTFRDREIMFHVSTKLPFTDGDAQQLQRKRHIGNDIVAIIFQEENTPFVPDMIASNFLHAYIVVQVETPGTETPSYKVSVTAREDVPTFGPPLPSPPVFQKGPEFREFLLTKLTNAENACCKSDKFAKLEDRTRAALLDNLHDELHAHTQAMLGLGPEEDKFENGGHGGFLESFKRAIRVRSHSMETMVGGQKKSHSGGIPGSLSGGISHNSMEVTKTTFSPPVVAATVKNQSRSPIKRRSGLFPRLHTGSEGQGDSRARCDSTSSTPKTPDGGHSSQEIKSETSSNPSSPEICPNKEKPFMKLKENGRAISRSSSSTSSVSSTAGEGEAMEEGDSGGSQPSTTSPFKQEVFVYSPSPSSESPSLGAAATPIIMSRSPTDAKSRNSPRSNLKFRFDKLSHASSGAGH

SEQ ID NO: 13568 - protein, 534 aa, Artificial Sequence; identical to SEQ ID NO: 13567
  Synthetic polypeptide

SEQ ID NO: 13569 - protein, 534 aa, Artificial Sequence; identical to SEQ ID NO: 13567
  Synthetic polypeptide

SEQ ID NO: 13570 - protein, 534 aa, Artificial Sequence; identical to SEQ ID NO: 13567
  Synthetic polypeptide

SEQ ID NO: 13571 - protein, 46 aa, Artificial Sequence
  Synthetic polypeptide
LCSFPLFLLDRAALRVVSCAVKSHLSSSMGGGLPLARTACDWVGPN

SEQ ID NO: 13572 - protein, 46 aa, Artificial Sequence; identical to SEQ ID NO: 13571
  Synthetic polypeptide

SEQ ID NO: 13573 - protein, 46 aa, Artificial Sequence; identical to SEQ ID NO: 13571
  Synthetic polypeptide

SEQ ID NO: 13574 - protein, 46 aa, Artificial Sequence; identical to SEQ ID NO: 13571
  Synthetic polypeptide

SEQ ID NO: 13575 - protein, 25 aa, Artificial Sequence
  Synthetic polypeptide
AAPWEGACPWPALPVTGWVQTEDGT

SEQ ID NO: 13576 - protein, 25 aa, Artificial Sequence
  Synthetic polypeptide
AAPWEGACPWPALPVTGWVQTEDGT

SEQ ID NO: 13577 - protein, 25 aa, Artificial Sequence
  Synthetic polypeptide
AAPWEGACPWPALPVTGWVQTEDGT

SEQ ID NO: 13578 - protein, 25 aa, Artificial Sequence
  Synthetic polypeptide
AAPWEGACPWPALPVTGWVQTEDGT

SEQ ID NO: 13579 - protein, 157 aa, Artificial Sequence
  Synthetic polypeptide
VLSGLKAGFATADHSSQERETEKAMDRLARGTQSIPNDSPARGEGTHSEEEGFAMDEEDSDGELNTWELSEGTNCPPKEQPGDLFNEDWDSELKADQGNPYDADDIQESISQELKPWVCCAPQGDMIYDPSWHHPPPLIPYYSKMVFETGQFDDAED

SEQ ID NO: 13580 - protein, 157 aa, Artificial Sequence; identical to SEQ ID NO: 13579
  Synthetic polypeptide

SEQ ID NO: 13581 - protein, 26 aa, Artificial Sequence
  Synthetic polypeptide
LQFLPVLVYSLYRLGAERLEGWLCYS

SEQ ID NO: 13582 - protein, 26 aa, Artificial Sequence
  Synthetic polypeptide
LQFLPVLVYSLYRLGAERLEGWLCYS

SEQ ID NO: 13583 - protein, 26 aa, Artificial Sequence
  Synthetic polypeptide
LQFLPVLVYSLYRLGAERLEGWLCYS

SEQ ID NO: 13584 - protein, 55 aa, Artificial Sequence
  Synthetic polypeptide
VLSGLKAGFATADHSSQERETEKAMDRLASPLCCLVAFSAQLNSNLLWKPCLELP

SEQ ID NO: 13585 - protein, 13 aa, Artificial Sequence
  Synthetic polypeptide
GEKYFQTHNNGYH

SEQ ID NO: 13586 - protein, 576 aa, Artificial Sequence
  Synthetic polypeptide
GKSIFKLIITAIIKKASDLEYKIQRRTLFKEDFINYVQYEINLLELIQRRRTRIGYSFKKDEIENSIVHRVQGVFQRASAKWKDDVQLWLSYVAFCKKWATKTRLSKVFSAMLAIHSNKPALWIMAAKWEMEDRLSSESARQLFLRALRFHPECPKLYKEYFRMELMHAEKLRKEKEEFEKASMDVENPDYSEEILKGELAWIIYKNSVSIIKGAEFHVSLLSIAQLFDFAKDLQKEIYDDLQALHTDDPLTWDYVARRELEIESQTEEQPTTKQAKAVEVGRKEERCCAVYEEAVKTLPTEAMWKCYITFCLERFTKKSNSGFLRGKRLERTMTVFRKAHELKLLSECQYKQLSVSLLCYNFLREALEVAVAGTELFRDSGTMWQLKLQVLIESKSPDIAMLFEEAFVHLKPQVCLPLWISWAEWSEGAKSQEDTEAVFKKALLAVIGADSVTLKNKYLDWAYRSGGYKKARAVFKSLQESRPFSVDFFRKMIQFEKEQESCNMANIREYYERALREFGSADSDLWMDYMKEELNHPLGRPENCGQIYWRAMKMLQGESAEAFVAKHAMHQTGHL

SEQ ID NO: 13587 - protein, 55 aa, Artificial Sequence
  Synthetic polypeptide
SVLSTTVSLPVPDEQQAFQQLPPSHPAGQPQAKQQGPAGGEGAEPLAATYPPCGL

SEQ ID NO: 13588 - protein, 55 aa, Artificial Sequence; identical to SEQ ID NO: 13587
  Synthetic polypeptide

SEQ ID NO: 13589 - protein, 55 aa, Artificial Sequence; identical to SEQ ID NO: 13587
  Synthetic polypeptide

SEQ ID NO: 13590 - protein, 55 aa, Artificial Sequence; identical to SEQ ID NO: 13587
  Synthetic polypeptide

SEQ ID NO: 13591 - protein, 327 aa, Artificial Sequence
  Synthetic polypeptide
APPYPSLCLMSNKRSNSFRQAILQGNRRLSSKALLEEKGLSLSQRLIRHVAYETLPREIDRKWYYDSYTCCPPPWFMITVTLLEVAFFLYNGVSLGQFVLQVTHPRYLKNSLVYHPQLRAQVWRYLTYIFMHAGIEHLGLNVVLQLLVGVPLEMVHGATRIGLVYVAGVVAELVRHEVPVQAAADGCGPYLYEHGVWAGRVAPLPPVGLSPVPSPKLCGALGWRGRGHHPGRGGPEELRAEAPGPVTVVDFCGHVHRLRAVRCLLEHLCLHPAGLKAAASPLRAGGPRSGRGGKSSTHRERLRGFFSSPAQLGRADKDRRLWATVMF

SEQ ID NO: 13592 - protein, 315 aa, Artificial Sequence
  Synthetic polypeptide
APPYPSLCLMSNKRSNSFRQAILQGNRRLSSKALLEEKGLSLSQRLIRHVAYETLPREIDRKWYYDSYTCCPPPWFMITVTLLEVAFFLYNGVSLGQFVLQVTHPRYLKNSLVYHPQLRAQVWRYLTYIFMHAGIEHLGLNVVLQLLVGVPLEMVHGATRIGLVYVAGVVAGSLAVSVADMTAPVVGSSGGVYALVSAHLANIVMNWSGMKCQFKLLRMAVALICMSMEFGRAVWLRFHPSAYPPCPHPSFVAHLGGVAVGITLGVVVLRNYEQRLQDQSLWWIFVAMYTVFVLFAVFWNIFAYTLLDLKLPPPP

SEQ ID NO: 13593 - protein, 315 aa, Artificial Sequence; identical to SEQ ID NO: 13592
  Synthetic polypeptide

SEQ ID NO: 13594 - protein, 315 aa, Artificial Sequence; identical to SEQ ID NO: 13592
  Synthetic polypeptide

SEQ ID NO: 13595 - protein, 4 aa, Artificial Sequence
  Synthetic polypeptide
EREA

SEQ ID NO: 13596 - protein, 4 aa, Artificial Sequence
  Synthetic polypeptide
EREA

SEQ ID NO: 13597 - protein, 4 aa, Artificial Sequence
  Synthetic polypeptide
EREA

SEQ ID NO: 13598 - protein, 404 aa, Artificial Sequence
  Synthetic polypeptide
GVGGRGRGRCESVKRDIQENDEEAVQVKEQSILELGSLLAKTGQAAELGGLLKYVRPFLNSISKAKAARLVRSLLDLFLDMEAATGQEVELCLECIEWAKSEKRTFLRQALEARLVSLYFDTKRYQEALHLGSQLLRELKKMDDKALLVEVQLLESKTYHALSNLPKARAALTSARTTANAIYCPPKLQATLDMQSGIIHAAEEKDWKTAYSYFYEAFEGYDSIDSPKAITSLKYMLLCKIMLNTPEDVQALVSGKLALRYAGRQTEALKCVAQASKNRSLADFEKALTDYRAELRDDPIISTHLAKLYDNLLEQNLIRVIEPFSRVQIEHISSLIKLSKADVERKLSQMILDKKFHGILDQGEGVLIIFDEPPVDKTYEAALETIQNMSKVVDSLYNKAKKLT

SEQ ID NO: 13599 - protein, 404 aa, Artificial Sequence; identical to SEQ ID NO: 13598
  Synthetic polypeptide

SEQ ID NO: 13600 - protein, 169 aa, Artificial Sequence
  Synthetic polypeptide
GVGGRGRGRCESVKRDIQENDEEAVQVKEQSILELGSLLAKTGQAAELGGLLKYVRPFLNSISKAKAARLVRSLLDLFLDMEAATGQEFLFVTGHLILWVCSMLCFVSGDCQWSLESSLHQGHKLILVFEVELCLECIEWAKSEKRTFLRQALEARLVSLYFDTKRYQE

SEQ ID NO: 13601 - protein, 16 aa, Artificial Sequence
  Synthetic polypeptide
TLNRKCEAQVRSATFK

SEQ ID NO: 13602 - protein, 16 aa, Artificial Sequence
  Synthetic polypeptide
TLNRKCEAQVRSATFK

SEQ ID NO: 13603 - protein, 54 aa, Artificial Sequence
  Synthetic polypeptide
SPSEKRHLQVNVTNPVQCSLHGKKCTVSVETRLNQPQPDFTKNRSGFILSVPGN

SEQ ID NO: 13604 - protein, 54 aa, Artificial Sequence; identical to SEQ ID NO: 13603
  Synthetic polypeptide

SEQ ID NO: 13605 - protein, 330 aa, Artificial Sequence
  Synthetic polypeptide
AFVFTHHLITNSPKATFSPASSIYDWAWEAVNPELAPVMKTVDTGQIPHSVSRPLRSQDSVFNSIQSNTGRSQGGWSYRDGNKNTSLKTWNKNDFKPQCKRTNLVANDGKNSCPVSSGAQQQKQLRIPEPPNLSRNKETELLRQTHSSKISGCTMRGLDKNSALQTLKPNFQQNQYKKQMLDDIPEDNTLKETSLYQLQFKEKASSLRIISAVIESMKYWREHAQKTVLLFEVLAVLDSAVTPGPYYSKTFLMRDGKNTLPCVFYEIDRELPRLIRGRVHRCVGNYDQKKNIFQCVSVRPASVSEQKTFQAFVKIADVEMQYYINVMNET

SEQ ID NO: 13606 - protein, 330 aa, Artificial Sequence; identical to SEQ ID NO: 13605
  Synthetic polypeptide

SEQ ID NO: 13607 - protein, 330 aa, Artificial Sequence; identical to SEQ ID NO: 13605
  Synthetic polypeptide

SEQ ID NO: 13608 - protein, 330 aa, Artificial Sequence; identical to SEQ ID NO: 13605
  Synthetic polypeptide

SEQ ID NO: 13609 - protein, 330 aa, Artificial Sequence; identical to SEQ ID NO: 13605
  Synthetic polypeptide

SEQ ID NO: 13610 - protein, 330 aa, Artificial Sequence; identical to SEQ ID NO: 13605
  Synthetic polypeptide

SEQ ID NO: 13611 - protein, 22 aa, Artificial Sequence
  Synthetic polypeptide
SLTHPKQLSVLQAPFMIGPGKL

SEQ ID NO: 13612 - protein, 22 aa, Artificial Sequence
  Synthetic polypeptide
SLTHPKQLSVLQAPFMIGPGKL

SEQ ID NO: 13613 - protein, 22 aa, Artificial Sequence
  Synthetic polypeptide
SLTHPKQLSVLQAPFMIGPGKL

SEQ ID NO: 13614 - protein, 22 aa, Artificial Sequence
  Synthetic polypeptide
SLTHPKQLSVLQAPFMIGPGKL

SEQ ID NO: 13615 - protein, 22 aa, Artificial Sequence
  Synthetic polypeptide
SLTHPKQLSVLQAPFMIGPGKL

SEQ ID NO: 13616 - protein, 22 aa, Artificial Sequence
  Synthetic polypeptide
SLTHPKQLSVLQAPFMIGPGKL

SEQ ID NO: 13617 - protein, 22 aa, Artificial Sequence
  Synthetic polypeptide
SLTHPKQLSVLQAPFMIGPGKL

SEQ ID NO: 13618 - protein, 22 aa, Artificial Sequence
  Synthetic polypeptide
SLTHPKQLSVLQAPFMIGPGKL

SEQ ID NO: 13619 - protein, 22 aa, Artificial Sequence
  Synthetic polypeptide
SLTHPKQLSVLQAPFMIGPGKL

SEQ ID NO: 13620 - protein, 22 aa, Artificial Sequence
  Synthetic polypeptide
SLTHPKQLSVLQAPFMIGPGKL

SEQ ID NO: 13621 - protein, 236 aa, Artificial Sequence
  Synthetic polypeptide
AFVFTHHLITNSPKATFSPASSIYDWAWEAVNPELAPVMKTVDTGQIPHSVSRPLRSQDSVFNSIQSNTGRSQGGWSYRDGNKNTSLKTWNKNDFKPQCKRTNLVANDGKNSCPVSSGAQQQKQLRIPEPPNLSRNKETELLRQTHSSKISGCTMRGLDKNSALQTLKPNFQQNQYKKQMLDDIPEDNTLKETSLYQLQFKEKASSLRIISAVIESMKYWREHAQKTVLLFEVLGS

SEQ ID NO: 13622 - protein, 189 aa, Artificial Sequence
  Synthetic polypeptide
AFVFTHHLITNSPKATFSPASSIYDWAWEAVNPELAPVMKTVDTGQIPHSVSRPLRSQDSVFNSIQSNTGRSQGGWSYRDGNKNTSLKTWNKNDFKPQCKRTNLVANDGKNSCPVSSGAQQQKQLRIPEPPNLSRNKETELLRQTHSSKISGCTMRGLDKNSALQTLKPNFQQNQYKKQMLDDIPEDNT

SEQ ID NO: 13623 - protein, 131 aa, Artificial Sequence
  Synthetic polypeptide
AFVFTHHLITNSPKATFSPASSIYDWAWEAVNPELAPVMKTVDTGQIPHSVSRPLRSQDSVFNSIQSNTGRSQGGWSYRDGNKNTSLKTWNKNDFKPQCKRTNLVANDGKNSCPVSSGAQQQKQLRIPEPP

SEQ ID NO: 13624 - protein, 32 aa, Artificial Sequence
  Synthetic polypeptide
AFVFTHHLITNSPKATFSPASSIYDWAWEAVN

SEQ ID NO: 13625 - protein, 27 aa, Artificial Sequence
  Synthetic polypeptide
PRQNRISLYAGSRLETTASWGSHVFNS

SEQ ID NO: 13626 - protein, 27 aa, Artificial Sequence
  Synthetic polypeptide
PRQNRISLYAGSRLETTASWGSHVFNS

SEQ ID NO: 13627 - protein, 75 aa, Artificial Sequence
  Synthetic polypeptide
PVRIESPCMQDQDWKPLHPGDPMFLTLDGKTIPLGGDCTVYPVFVNEAAYYEKKEAFAKTTKLTLNAKSIRCCLH

SEQ ID NO: 13628 - protein, 75 aa, Artificial Sequence; identical to SEQ ID NO: 13627
  Synthetic polypeptide

SEQ ID NO: 13629 - protein, 20 aa, Artificial Sequence
  Synthetic polypeptide
NLLVCRIKTGNHCILGIPCF

SEQ ID NO: 13630 - protein, 20 aa, Artificial Sequence
  Synthetic polypeptide
NLLVCRIKTGNHCILGIPCF

SEQ ID NO: 13631 - protein, 108 aa, Artificial Sequence
  Synthetic polypeptide
QDSEGELIHALGEWCTPTPQERKLLQILPCVIFPSGYLFASFLNIPRTPHPAALPTLPAHCPVPTSRSISTPVASAPTQQSSLSPERTAKCVPTQRRNGFGSTSTLWR

SEQ ID NO: 13632 - protein, 108 aa, Artificial Sequence; identical to SEQ ID NO: 13631
  Synthetic polypeptide

SEQ ID NO: 13633 - protein, 106 aa, Artificial Sequence
  Synthetic polypeptide
RRTHPRAGRVVHPNSTGTEAPPDLALCYLSIWLFICILFKYSSDTTPCCFAYIARPLPRAHIKEYFYTSGKCSNPAVVFVTRKNRQVCANPEKKWVREYINSLEMS

SEQ ID NO: 13634 - protein, 106 aa, Artificial Sequence; identical to SEQ ID NO: 13633
  Synthetic polypeptide

SEQ ID NO: 13635 - protein, 104 aa, Artificial Sequence
  Synthetic polypeptide
QDSEGELIHALGEWCTPTPQERKLLQILPCVIFPSGYLFASFLNIPRTPHPAALPTLPAHCPVPTSRSISTPVASAPTQQSSTGQGCQRERDSKSGRISCMTPG

SEQ ID NO: 13636 - protein, 169 aa, Artificial Sequence
  Synthetic polypeptide
RRTHPRAGRVVHPNSTGTEAPPDLALCYLSIWLFICILFKYSSDTTPCCFAYIARPLPRAHIKEYFYTSGKCSNPAVVHRSRMPKREGQQVWQDFLYDSRLNKGKLCHPKEPPSVCQPREEMGSGVHQLFGDELGWRVLEPELTQICLFLLALVLAWEASPHYPTPPAP

SEQ ID NO: 13637 - protein, 32 aa, Artificial Sequence
  Synthetic polypeptide
GWALWLMPVIPALWEAKAGGSLDRSPRSGVQA

SEQ ID NO: 13638 - protein, 32 aa, Artificial Sequence; identical to SEQ ID NO: 13637
  Synthetic polypeptide

SEQ ID NO: 13639 - protein, 25 aa, Artificial Sequence
  Synthetic polypeptide
SQHFGRPRQEDLLTGAQGQEFKLDQ

SEQ ID NO: 13640 - protein, 25 aa, Artificial Sequence
  Synthetic polypeptide
SQHFGRPRQEDLLTGAQGQEFKLDQ

SEQ ID NO: 13641 - protein, 152 aa, Artificial Sequence
  Synthetic polypeptide
QEPKVRSSSLTNEVVHMCPTIGSNVEEIILPKTHFFMWDIVRPEALSFIWNTYYSNTEFIILVIDSTDRDRLLTTREELYKMLAHEALQDASVLIFANKQDVKDSMRMVEISHFLTLSTIKDHSWHIQGCCALTREGLPARLQWMESQAAAN

SEQ ID NO: 13642 - protein, 152 aa, Artificial Sequence; identical to SEQ ID NO: 13641
  Synthetic polypeptide

SEQ ID NO: 13643 - protein, 12 aa, Artificial Sequence
  Synthetic polypeptide
SARSAWHMVPLR

SEQ ID NO: 13644 - protein, 12 aa, Artificial Sequence
  Synthetic polypeptide
SARSAWHMVPLR

SEQ ID NO: 13645 - protein, 12 aa, Artificial Sequence
  Synthetic polypeptide
CKVPAVPGTWCL

SEQ ID NO: 13646 - protein, 12 aa, Artificial Sequence
  Synthetic polypeptide
CKVPAVPGTWCL

SEQ ID NO: 13647 - protein, 62 aa, Artificial Sequence
  Synthetic polypeptide
VKCPQCLAHGAFEIEINGQLVFSKLENGGFPYEKDLIEAIRRASNGETLEKITNSRPPCVIL

SEQ ID NO: 13648 - protein, 63 aa, Artificial Sequence
  Synthetic polypeptide
VKCPQCLAHGAFEIEINGQLVFSKLENGGFPYEKDVSIYSVGRTSWSPYPNSASSCHSTPLAH

SEQ ID NO: 13649 - protein, 76 aa, Artificial Sequence
  Synthetic polypeptide
SQHFGRPRRADQEFKTSLANMDKGTQLVPLSPSLAQTPWSWICLHLILAALRKTFAQPLGPLLGLPGPLIPLCLRR

SEQ ID NO: 13650 - protein, 38 aa, Artificial Sequence
  Synthetic polypeptide
PGVVAYACNPSTLGGQGGRIRSSRPAWPTWTRAHNWFR

SEQ ID NO: 13651 - protein, 578 aa, Artificial Sequence
  Synthetic polypeptide
RAWWLTPVIPALWEAKAGGSGVQDQPGQHGQGHTTGSVKPLSCSDAMELDLSPPHLSSSPEDLCPAPGTPPGTPRPPDTPLPEEVKRSQPLLIPTTGRKLREEERRATSLPSIPNPFPELCSPPSQSPILGGPSSARGLLPRDASRPHVVKVYSEDGACRSVEVAAGATARHVCEMLVQRAHALSDETWGLVECHPHLALERGLEDHESVVEVQAAWPVGGDSRFVFRKNFAKYELFKSSPHSLFPEKMVSSCLDAHTGISHEDLIQNFLNAGSFPEIQGFLQLRGSGRKLWKRFFCFLRRSGLYYSTKGTSKDPRHLQYVADVNESNVYVVTQGRKLYGMPTDFGFCVKPNKLRNGHKGLRIFCSEDEQSRTCWLAAFRLFKYGVQLYKNYQQAQSRHLHPSCLGSPPLRSASDNTLVAMDFSGHAGRVIENPREALSVALEEAQAWRKKTNHRLSLPMPASGTSLSAAIHRTQLWFHGRISREESQRLIGQQGLVDGLFLVRESQRNPQGFVLSLCHLQKVKHYLILPSEEEGRLYFSMDDGQTRFTDLLQLVEFHQLNRGILPCLLRHCCTRVAL

SEQ ID NO: 13652 - protein, 19 aa, Artificial Sequence
  Synthetic polypeptide
ERALDLESKHRTRAHNWFR

SEQ ID NO: 13653 - protein, 559 aa, Artificial Sequence
  Synthetic polypeptide
KEHWTWSLNTGQGHTTGSVKPLSCSDAMELDLSPPHLSSSPEDLCPAPGTPPGTPRPPDTPLPEEVKRSQPLLIPTTGRKLREEERRATSLPSIPNPFPELCSPPSQSPILGGPSSARGLLPRDASRPHVVKVYSEDGACRSVEVAAGATARHVCEMLVQRAHALSDETWGLVECHPHLALERGLEDHESVVEVQAAWPVGGDSRFVFRKNFAKYELFKSSPHSLFPEKMVSSCLDAHTGISHEDLIQNFLNAGSFPEIQGFLQLRGSGRKLWKRFFCFLRRSGLYYSTKGTSKDPRHLQYVADVNESNVYVVTQGRKLYGMPTDFGFCVKPNKLRNGHKGLRIFCSEDEQSRTCWLAAFRLFKYGVQLYKNYQQAQSRHLHPSCLGSPPLRSASDNTLVAMDFSGHAGRVIENPREALSVALEEAQAWRKKTNHRLSLPMPASGTSLSAAIHRTQLWFHGRISREESQRLIGQQGLVDGLFLVRESQRNPQGFVLSLCHLQKVKHYLILPSEEEGRLYFSMDDGQTRFTDLLQLVEFHQLNRGILPCLLRHCCTRVAL

SEQ ID NO: 13654 - protein, 57 aa, Artificial Sequence
  Synthetic polypeptide
TQDKGTQLVPLSPSLAQTPWSWICLHLILAALRKTFAQPLGPLLGLPGPLIPLCLRR

SEQ ID NO: 13655 - protein, 63 aa, Artificial Sequence
  Synthetic polypeptide
VRWLTPVIPALRTAKSEEEGRLYFSMDDGQTRFTDLLQLVEFHQLNRGILPCLLRHCCTRVAL

SEQ ID NO: 13656 - protein, 63 aa, Artificial Sequence; identical to SEQ ID NO: 13655
  Synthetic polypeptide

SEQ ID NO: 13657 - protein, 63 aa, Artificial Sequence; identical to SEQ ID NO: 13655
  Synthetic polypeptide

SEQ ID NO: 13658 - protein, 63 aa, Artificial Sequence; identical to SEQ ID NO: 13655
  Synthetic polypeptide

SEQ ID NO: 13659 - protein, 37 aa, Artificial Sequence
  Synthetic polypeptide
SQHLGRPRARRRAACTSAWMMARPASLTCCSSWSSTS

SEQ ID NO: 13660 - protein, 37 aa, Artificial Sequence; identical to SEQ ID NO: 13659
  Synthetic polypeptide

SEQ ID NO: 13661 - protein, 37 aa, Artificial Sequence; identical to SEQ ID NO: 13659
  Synthetic polypeptide

SEQ ID NO: 13662 - protein, 37 aa, Artificial Sequence; identical to SEQ ID NO: 13659
  Synthetic polypeptide

SEQ ID NO: 13663 - protein, 15 aa, Artificial Sequence
  Synthetic polypeptide
DGQERGGGPPVLQHG

SEQ ID NO: 13664 - protein, 15 aa, Artificial Sequence
  Synthetic polypeptide
DGQERGGGPPVLQHG

SEQ ID NO: 13665 - protein, 15 aa, Artificial Sequence
  Synthetic polypeptide
DGQERGGGPPVLQHG

SEQ ID NO: 13666 - protein, 15 aa, Artificial Sequence
  Synthetic polypeptide
DGQERGGGPPVLQHG

SEQ ID NO: 13667 - protein, 14 aa, Artificial Sequence
  Synthetic polypeptide
PCDLGCLAKTRSSS

SEQ ID NO: 13668 - protein, 14 aa, Artificial Sequence
  Synthetic polypeptide
PCDLGCLAKTRSSS

SEQ ID NO: 13669 - protein, 14 aa, Artificial Sequence
  Synthetic polypeptide
PCDLGCLAKTRSSS

SEQ ID NO: 13670 - protein, 14 aa, Artificial Sequence
  Synthetic polypeptide
PCDLGCLAKTRSSS

SEQ ID NO: 13671 - protein, 14 aa, Artificial Sequence
  Synthetic polypeptide
PCDLGCLAKTRSSS

SEQ ID NO: 13672 - protein, 36 aa, Artificial Sequence
  Synthetic polypeptide
CPTSHVTWAALRRPDHPPEGVLHGDHVPAGGCPLRP

SEQ ID NO: 13673 - protein, 36 aa, Artificial Sequence; identical to SEQ ID NO: 13672
  Synthetic polypeptide

SEQ ID NO: 13674 - protein, 36 aa, Artificial Sequence; identical to SEQ ID NO: 13672
  Synthetic polypeptide

SEQ ID NO: 13675 - protein, 36 aa, Artificial Sequence; identical to SEQ ID NO: 13672
  Synthetic polypeptide

SEQ ID NO: 13676 - protein, 36 aa, Artificial Sequence; identical to SEQ ID NO: 13672
  Synthetic polypeptide

SEQ ID NO: 13677 - protein, 251 aa, Artificial Sequence
  Synthetic polypeptide
PGLPCEDQIILLKGCCMEIMSLRAAVRYDPESDTLTLSGEMAVKREQLKNGGLGVVSDAIFELGKSLSAFNLDDTEVALLQAVLLMSTDRSGLLCVDKIEKSQEAYLLAFEHYVNHRKHNIPHFWPKLLMKEREVQSSILYKGAAAEGRPGGSLGVHPEGQQLLGMHVVQGPQVRQLEQQLGEAGSLQGPVLQHQSPKSPQQRLLELLHRSGILHARAVCGEDDSSEADSPSSSEEEPEVCEDLAGNAASP

SEQ ID NO: 13678 - protein, 251 aa, Artificial Sequence; identical to SEQ ID NO: 13677
  Synthetic polypeptide

SEQ ID NO: 13679 - protein, 212 aa, Artificial Sequence
  Synthetic polypeptide
PGLPCEDQIILLKGCCMEIMSLRAAVRYDPESDTLTLSGEMAVKREQLKNGGLGVVSDAIFELGKSLSAFNLDDTEVALLQAVLLMSTDRSGLLCVDKIEKSQEAYLLAFEHYVNHRKHNIPHFWPKLLMKGPQVRQLEQQLGEAGSLQGPVLQHQSPKSPQQRLLELLHRSGILHARAVCGEDDSSEADSPSSSEEEPEVCEDLAGNAASP

SEQ ID NO: 13680 - protein, 171 aa, Artificial Sequence
  Synthetic polypeptide
PGLPCEDQIILLKGCCMEIMSLRAAVRYDPESDTLTLSGEMAVKREQLKNGGLGVVSDAIFELGKSLSAFNLDDTEVALLQAVLLMSTDRSGLLCVDKIEKSQEAYLLAFEHYVNHRKHNIPHFWPKLLMKVTDLRMIGACHASRFLHMKVECPTELFPPLFLEVFEDQEV

SEQ ID NO: 13681 - protein, 171 aa, Artificial Sequence; identical to SEQ ID NO: 13680
  Synthetic polypeptide

SEQ ID NO: 13682 - protein, 88 aa, Artificial Sequence
  Synthetic polypeptide
SQVRTAMTSSDTSSSSRLPKECISKEQMRSPTLGASLPSCASIPSWPWPCPANSPSHRENWEVQMGPRTLQTAQPPARRNLRAATPCT

SEQ ID NO: 13683 - protein, 31 aa, Artificial Sequence
  Synthetic polypeptide
AQESETSLSNMAKPCRYKNYPGVVEHTCSPR

SEQ ID NO: 13684 - protein, 237 aa, Artificial Sequence
  Synthetic polypeptide
AIWQNPVATKITQVWWSTPVVPGEDSNDLIRHFLIESSAKGVHLKGADEEPYFGSLSAFVCQHSIMALALPCKLTIPQRELGGADGASDSTDSPASCQKKSAGCHTLYLSSVSVETLTGALAVQKAISTTFERDILPTPTVVHFKVTEQGITLTDVQRKVFFRRHYPLTTLRFCGMDPEQRKWQKYCKPSWIFGFVAKSQTEPQENVCHLFAEYDMVQPASQVIGLVTALLQDAERM

SEQ ID NO: 13685 - protein, 9 aa, Artificial Sequence
  Synthetic polypeptide
QCTTLSVVT

SEQ ID NO: 13686 - protein, 584 aa, Artificial Sequence
  Synthetic polypeptide
QISHWPIAVYNSERCDIKYIEVTSARSRCHDGPQHCSSPSVTPPFGSLRSGGLLLSRDVPRETRSSSESLIFSGNQGRGHQRPLPPSEGLSPRPPNSPSISIPCMGSKASSPHGLGSPLVASPRLEKRLGGLAPQRGSRISVLSASPVSDVSYMFGSSQSLLHSSNSSHQSSSRSLESPANSSSSLHSLGSVSLCTRPSDFQAPRNPTLTMGQPRTPHSPPLAKEHASSCPPSITNSMVDIPIVLINGCPEPGSSPPQRTPGHQNSVQPGAASPSNPCPATRSNSQTLSDAPFTTCPEGPARDMQPTMKFVMDTSKYWFKPNITREQAIELLRKEEPGAFVIRDSSSYRGSFGLALKVQEVPASAQSRPGEDSNDLIRHFLIESSAKGVHLKGADEEPYFGSLSAFVCQHSIMALALPCKLTIPQRELGGADGASDSTDSPASCQKKSAGCHTLYLSSVSVETLTGALAVQKAISTTFERDILPTPTVVHFKVTEQGITLTDVQRKVFFRRHYPLTTLRFCGMDPEQRKWQKYCKPSWIFGFVAKSQTEPQENVCHLFAEYDMVQPASQVIGLVTALLQDAERM

SEQ ID NO: 13687 - protein, 9 aa, Artificial Sequence
  Synthetic polypeptide
TAGDSWCHH

SEQ ID NO: 13688 - protein, 9 aa, Artificial Sequence
  Synthetic polypeptide
TAGDSWCHH

SEQ ID NO: 13689 - protein, 275 aa, Artificial Sequence
  Synthetic polypeptide
GPTLSQFSDLYKLLEILGATIENSRIVLQIDNARLAADDFRTKFETEQALRMSVEADINGLRRVLDELTLARTDLEMQIEGLKEELAYLKKNHEEEISTLRGQVGGQVSVEVDSAPGTDLAKILSDMRSQYEVMAEQNRKDAEAWFTSRTEELNREVAGHTEQLQMSRSEVTDLRRTLQGLEIELQSQLSMKAALEDTLAETEARFGAQLAHIQALISGIEAQLGDVRADSERQNQEYQRLMDIKSRLEQEIATYRSLLEGQEDHYNNLSASKVL

SEQ ID NO: 13690 - protein, 63 aa, Artificial Sequence
  Synthetic polypeptide
AGHQLWDFRQAEAPLSLSFLTYINCWRFLVPPLRTPGLSCRSTMPVWLQMTSEPSLRRNRLCA

SEQ ID NO: 13691 - protein, 63 aa, Artificial Sequence; identical to SEQ ID NO: 13690
  Synthetic polypeptide

SEQ ID NO: 13692 - protein, 102 aa, Artificial Sequence
  Synthetic polypeptide
GPTLSQFSDLYKLLEILGATIENSRIVLQIDNARLAADDFRTKFETEQALRMSVEADINGLRRVLDELTLARTDLEMQIEGLKEELAYLKKNHEEEISTLRG

SEQ ID NO: 13693 - protein, 11 aa, Artificial Sequence
  Synthetic polypeptide
TPHSSFTRLWT

SEQ ID NO: 13694 - protein, 51 aa, Artificial Sequence
  Synthetic polypeptide
KPELLNQTTWVGVLAPMLNSLEEFGQGTEPHIPLSQDCGPDSGQQQNSPGH

SEQ ID NO: 13695 - protein, 427 aa, Artificial Sequence
  Synthetic polypeptide
IALKSLGKVLNPTFLFHKIVDLTVGNNKTLLDIDNTRMTLDDFRIKFEMEQNLRQGVDADINGLRQVLDNLTMEKSDLEMQYETLQEELMALKKNHKEEMSQLTGQNSGDVNVEINVAPGKDLTKTLNDMRQEYEQLIAKNRKDIENQYETQITQIEHEVSSSGQEVQSSAKEVTQLRHGVQELEIELQSQLSKKAALEKSLEDTKNRYCGQLQMIQEQISNLEAQITDVRQEIECQNQEYSLLLSIKMRLEKEIETYHNLLEGGQEDFESSGAGKIGLGGRGGSGGSYGRGSRGGSGGSYGGGGSGGGYGGGSGSRGGSGGSYGGGSGSGGGSGGGYGGGSGGGHSGGSGGGHSGGSGGNYGGGSGSGGGSGGGYGGGSGSRGGSGGSHGGGSGFGGESGGSYGGGEEASGSGGGYGGGSGKSSHS

SEQ ID NO: 13696 - protein, 37 aa, Artificial Sequence
  Synthetic polypeptide
AGYSGDECPERPGGWRCQCGDGRCTWRGPEPHSERDA

SEQ ID NO: 13697 - protein, 221 aa, Artificial Sequence
  Synthetic polypeptide
MGTVEMNALRGQVGGDVNVEMDAAPGVDLSRILNEMRDQYEKMAEKNRKDAEEWFFTKTEELNREVATNSELVQSGKSEISELRRTMQNLEIELQSQLSMKASLENSLEETKGRYCMQLAQIQEMIGSVEEQLAQLRCEMEQQNQEYKILLDVKTRLEQEIATYRRLLEGEDAHLSSSQFSSGSQSSRDVTSSSRQIRTKVMDVHDGKVVSTHEQVLRTKN

SEQ ID NO: 13698 - protein, 5 aa, Artificial Sequence
  Synthetic polypeptide
WVQWR

SEQ ID NO: 13699 - protein, 13 aa, Artificial Sequence
  Synthetic polypeptide
QVTWVILVHSQPT

SEQ ID NO: 13700 - protein, 13 aa, Artificial Sequence
  Synthetic polypeptide
QVTWVILVHSQPT

SEQ ID NO: 13701 - protein, 13 aa, Artificial Sequence
  Synthetic polypeptide
QVTWVILVHSQPT

SEQ ID NO: 13702 - protein, 13 aa, Artificial Sequence
  Synthetic polypeptide
QVTWVILVHSQPT

SEQ ID NO: 13703 - protein, 13 aa, Artificial Sequence
  Synthetic polypeptide
QVTWVILVHSQPT

SEQ ID NO: 13704 - protein, 12 aa, Artificial Sequence
  Synthetic polypeptide
FWSTASLHEEEP

SEQ ID NO: 13705 - protein, 12 aa, Artificial Sequence
  Synthetic polypeptide
FWSTASLHEEEP

SEQ ID NO: 13706 - protein, 12 aa, Artificial Sequence
  Synthetic polypeptide
FWSTASLHEEEP

SEQ ID NO: 13707 - protein, 12 aa, Artificial Sequence
  Synthetic polypeptide
FWSTASLHEEEP

SEQ ID NO: 13708 - protein, 12 aa, Artificial Sequence
  Synthetic polypeptide
FWSTASLHEEEP

SEQ ID NO: 13709 - protein, 259 aa, Artificial Sequence
  Synthetic polypeptide
MKTPWGAYKRIRLLGPTLGVLIQLFIAGYLGDSGPQPAYMKKNHEEEMKEFSNQVVGQVNVEMDATPGIDLTRVLAEMREQYEAMAERNRRDAEEWFHTKSAELNKEVSTNTAMIQTSKTEITELRRTLQGLEIELQSQLSMKAGLENTVAETECRYALQLQQIQGLISSIEAQLSELRSEMECQNQEYKMLLDIKTRLEQEIATYRSLLEGQDAKMIGFPSSAGSVSPRSTSVTTTSSASVTTTSNASGRRTSDVRRP

SEQ ID NO: 13710 - protein, 221 aa, Artificial Sequence
  Synthetic polypeptide
MKTPWGAYKRIRLLGPTLGVLIQLFIAGYLGDSGPQPAYMKKNHEEEMKEFSNQVVGQVNVEMDATPGIDLTRVLAEMREQYEAMAERNRRDAEEWFHTKSAELNKEVSTNTAMIQTSKTEITELRRTLQGLEIELQSQLSMKAGLENTVAETECRYALQLQQIQGLISSIEAQLSELRSEMECQNQEYKMLLDIKTRLEQEIATYRSLLEGQDAKKRQPP

SEQ ID NO: 13711 - protein, 216 aa, Artificial Sequence
  Synthetic polypeptide
MKTPWGAYKRIRLLGPTLGVLIQLFIAGYLGDSGPQPAYMKKNHEEEMKEFSNQVVGQVNVEMDATPGIDLTRVLAEMREQYEAMAERNRRDAEEWFHTKSAELNKEVSTNTAMIQTSKTEITELRRTLQGLEIELQSQLSMKAGLENTVAETECRYALQLQQIQGLISSIEAQLSELRSEMECQNQEYKMLLDIKTRLEQEIATYRSLLEGQDAK

SEQ ID NO: 13712 - protein, 73 aa, Artificial Sequence
  Synthetic polypeptide
MKTPWGAYKRIRLLGPTLGVLIQLFIAGYLGDSGPQPAYMKKNHEEEMKEFSNQVVGQVNVEMDATPGIDLTR

SEQ ID NO: 13713 - protein, 56 aa, Artificial Sequence
  Synthetic polypeptide
MKTPWGAYKRIRLLGPTLGVLIQLFIAGYLGDSGPQPAYMKKNHEEEMKEFSNQVV

SEQ ID NO: 13714 - protein, 124 aa, Artificial Sequence
  Synthetic polypeptide
LPGRVPCLFHSWEPSPGCLSSPCPPSAVKALVNFNSTEFYLFTLLSPWTVSHPGQNQEYKILLDVKTRLEQEIATYRRLLEGEDAHLTQYKKEPVTTRQVRTIVEEVQDGKVISSREQVHQTTR

SEQ ID NO: 13715 - protein, 124 aa, Artificial Sequence; identical to SEQ ID NO: 13714
  Synthetic polypeptide

SEQ ID NO: 13716 - protein, 14 aa, Artificial Sequence
  Synthetic polypeptide
ATRGRTRNTKSCWM

SEQ ID NO: 13717 - protein, 14 aa, Artificial Sequence
  Synthetic polypeptide
ATRGRTRNTKSCWM

SEQ ID NO: 13718 - protein, 87 aa, Artificial Sequence
  Synthetic polypeptide
VLFIHSPLPLDCEPPGAEPGIQNPAGCEDAAGAGDCHLPPPAGGRGCPPDSVQERTGDHPSGAYHCGRGPGWQGHLLPRAGPPDHPL

SEQ ID NO: 13719 - protein, 87 aa, Artificial Sequence; identical to SEQ ID NO: 13718
  Synthetic polypeptide

SEQ ID NO: 13720 - protein, 24 aa, Artificial Sequence
  Synthetic polypeptide
GLHIQLLRDSDPPTGLAGLSRPPD

SEQ ID NO: 13721 - protein, 347 aa, Artificial Sequence
  Synthetic polypeptide
ASTYSCSGTVIPPQASLVFHVLLIDVHNPKDAVQLETLELPPGCVRRAGAGDFMRYHYNGSLMDGTLFDSSYSRNHTYNTYIGQGYIIPGMDQGLQGACMGERRRITIPPHLAYGENGTGDKIPGSAVLIFNVHVIDFHNPADVVEIRTLSRPSETCNETTKLGDFVRYHYNCSLLDGTQLFTSHDYGAPQEATLGANKVIEGLDTGLQGMCVGERRQLIVPPHLAHGESGARGVPGSAVLLFEVELVSREDGLPTGYLFVWHKDPPANLFEDMDLNKDGEVPPEEFSTFIKAQVSEGKGRLMPGQDPEKTIGDMFQNQDRNQDGKITVDELKLKSDEDEERVHEEL

SEQ ID NO: 13722 - protein, 9 aa, Artificial Sequence
  Synthetic polypeptide
PPHTVAQGQ

SEQ ID NO: 13723 - protein, 37 aa, Artificial Sequence
  Synthetic polypeptide
GLHIQLLRLYTARGHPTKDSRDSDPPTGLAGLSRPPD

SEQ ID NO: 13724 - protein, 360 aa, Artificial Sequence
  Synthetic polypeptide
ASTYSCSGCILHEGIQPRTQGTVIPPQASLVFHVLLIDVHNPKDAVQLETLELPPGCVRRAGAGDFMRYHYNGSLMDGTLFDSSYSRNHTYNTYIGQGYIIPGMDQGLQGACMGERRRITIPPHLAYGENGTGDKIPGSAVLIFNVHVIDFHNPADVVEIRTLSRPSETCNETTKLGDFVRYHYNCSLLDGTQLFTSHDYGAPQEATLGANKVIEGLDTGLQGMCVGERRQLIVPPHLAHGESGARGVPGSAVLLFEVELVSREDGLPTGYLFVWHKDPPANLFEDMDLNKDGEVPPEEFSTFIKAQVSEGKGRLMPGQDPEKTIGDMFQNQDRNQDGKITVDELKLKSDEDEERVHEEL

SEQ ID NO: 13725 - protein, 22 aa, Artificial Sequence
  Synthetic polypeptide
PPHTVAQVVYCTRASNQGLKGQ

SEQ ID NO: 13726 - protein, 42 aa, Artificial Sequence
  Synthetic polypeptide
EPQCPHLSSGQAMLIRRVSYWEFARRRQDPWLCRANLQRPCH

SEQ ID NO: 13727 - protein, 42 aa, Artificial Sequence; identical to SEQ ID NO: 13726
  Synthetic polypeptide

SEQ ID NO: 13728 - protein, 42 aa, Artificial Sequence; identical to SEQ ID NO: 13726
  Synthetic polypeptide

SEQ ID NO: 13729 - protein, 235 aa, Artificial Sequence
  Synthetic polypeptide
VTGSLQDGDKIPGSAVLIFNVHVIDFHNPADVVEIRTLSRPSETCNETTKLGDFVRYHYNCSLLDGTQLFTSHDYGAPQEATLGANKVIEGLDTGLQGMCVGERRQLIVPPHLAHGESGARGVPGSAVLLFEVELVSREDGLPTGYLFVWHKDPPANLFEDMDLNKDGEVPPEEFSTFIKAQVSEGKGRLMPGQDPEKTIGDMFQNQDRNQDGKITVDELKLKSDEDEERVHEEL

SEQ ID NO: 13730 - protein, 235 aa, Artificial Sequence; identical to SEQ ID NO: 13729
  Synthetic polypeptide

SEQ ID NO: 13731 - protein, 235 aa, Artificial Sequence; identical to SEQ ID NO: 13729
  Synthetic polypeptide

SEQ ID NO: 13732 - protein, 34 aa, Artificial Sequence
  Synthetic polypeptide
ASVSSPVKWASHADPQGKLLGVCKTETRSLALPC

SEQ ID NO: 13733 - protein, 34 aa, Artificial Sequence; identical to SEQ ID NO: 13732
  Synthetic polypeptide

SEQ ID NO: 13734 - protein, 34 aa, Artificial Sequence; identical to SEQ ID NO: 13732
  Synthetic polypeptide

SEQ ID NO: 13735 - protein, 17 aa, Artificial Sequence
  Synthetic polypeptide
ARWLTPVIPALWEAEVA

SEQ ID NO: 13736 - protein, 17 aa, Artificial Sequence
  Synthetic polypeptide
ARWLTPVIPALWEAEVA

SEQ ID NO: 13737 - protein, 17 aa, Artificial Sequence
  Synthetic polypeptide
ARWLTPVIPALWEAEVA

SEQ ID NO: 13738 - protein, 17 aa, Artificial Sequence
  Synthetic polypeptide
ARWLTPVIPALWEAEVA

SEQ ID NO: 13739 - protein, 17 aa, Artificial Sequence
  Synthetic polypeptide
ARWLTPVIPALWEAEVA

SEQ ID NO: 13740 - protein, 237 aa, Artificial Sequence
  Synthetic polypeptide
ARRGGSRLSSQHFGRPRLPKYSCQFIEMCLMVTADHGPAVSGAHNTIICARAGKDLVSSLTSGLLTIGDRFGGALDAAAKMFSKAFDSGIIPMEFVNKMKKEGKLIMGIGHRVKSINNPDMRVQILKDYVRQHFPATPLLDYALEVEKITTSKKPNLILNVDGLIGVAFVDMLRNCGSFTREEADEYIDIGALNGIFVLGRSMGFIGHYLDQKRLKQGLYRHPWDDISYVLPEHMSM

SEQ ID NO: 13741 - protein, 237 aa, Artificial Sequence; identical to SEQ ID NO: 13740
  Synthetic polypeptide

SEQ ID NO: 13742 - protein, 237 aa, Artificial Sequence; identical to SEQ ID NO: 13740
  Synthetic polypeptide

SEQ ID NO: 13743 - protein, 237 aa, Artificial Sequence; identical to SEQ ID NO: 13740
  Synthetic polypeptide

SEQ ID NO: 13744 - protein, 237 aa, Artificial Sequence; identical to SEQ ID NO: 13740
  Synthetic polypeptide

SEQ ID NO: 13745 - protein, 29 aa, Artificial Sequence
  Synthetic polypeptide
LGAVAHACHPSTLGGRGCLSTLASSLRCV

SEQ ID NO: 13746 - protein, 29 aa, Artificial Sequence
  Synthetic polypeptide
LGAVAHACHPSTLGGRGCLSTLASSLRCV

SEQ ID NO: 13747 - protein, 29 aa, Artificial Sequence
  Synthetic polypeptide
LGAVAHACHPSTLGGRGCLSTLASSLRCV

SEQ ID NO: 13748 - protein, 29 aa, Artificial Sequence
  Synthetic polypeptide
LGAVAHACHPSTLGGRGCLSTLASSLRCV

SEQ ID NO: 13749 - protein, 29 aa, Artificial Sequence
  Synthetic polypeptide
LGAVAHACHPSTLGGRGCLSTLASSLRCV

SEQ ID NO: 13750 - protein, 116 aa, Artificial Sequence
  Synthetic polypeptide
YVLLKYLTFCPWFLKQLQNSSRVIKVPQEASADLFSVSLPGRDERRSGSALQFTPDTQEADAERRLCGGAGQHSPEPDCHRPPAHPEPVLLPDQPAGVHHHVGQHHHPALPRLHEQ

SEQ ID NO: 13751 - protein, 36 aa, Artificial Sequence
  Synthetic polypeptide
GTRAIIVCFVKIFDLLSLVSETAPEQLQSDKGTPRS

SEQ ID NO: 13752 - protein, 36 aa, Artificial Sequence
  Synthetic polypeptide
AFTLWDLMLSSGLRAVSLHRWGYGFWPGLLPPGATE

SEQ ID NO: 13753 - protein, 322 aa, Artificial Sequence
  Synthetic polypeptide
CYLQGFVLCHSIAGGTGSGLGSYLLERLNDRYPKKLVQTYSVFPYQDEMSDVVVQPYNSLLTLKRLTQNADCVVVLDNTALNRIATDRLHIQNPSFSQINQLVSTIMSASTTTLRYPGYMNNDLIGLIASLIPTPRLHFLMTGYTPLTTDQSVASVRKTTVLDVMRRLLQPKNVMVSTGRDRQTNHCYIAILNIIQGEVDPTQVHKSLQRIRERKLANFIPWGPASIQVALSRKSPYLPSAHRVSGLMMANHTSISSLFESSCQQFDKLRKRDAFLEQFRKEDMFKDNFDEMDRSREVVQELIDEYHAATQPDYISWGTQEQ

SEQ ID NO: 13754 - protein, 49 aa, Artificial Sequence
  Synthetic polypeptide
SLCWHWKWESLVGLSLHSVGSDAIFRASCCVTPSLGVRVLAWAPTSWSD

SEQ ID NO: 13755 - protein, 16 aa, Artificial Sequence
  Synthetic polypeptide
AFTLWDLMLSSGTPRS

SEQ ID NO: 13756 - protein, 95 aa, Artificial Sequence
  Synthetic polypeptide
CYLQVPQEASADLFSVSLPGRDERRSGSALQFTPDTQEADAERRLCGGAGQHSPEPDCHRPPAHPEPVLLPDQPAGVHHHVGQHHHPALPRLHEQ

SEQ ID NO: 13757 - protein, 317 aa, Artificial Sequence
  Synthetic polypeptide
SLCWHWKWESLVGLSLHSVGSDAIFRYPKKLVQTYSVFPYQDEMSDVVVQPYNSLLTLKRLTQNADCVVVLDNTALNRIATDRLHIQNPSFSQINQLVSTIMSASTTTLRYPGYMNNDLIGLIASLIPTPRLHFLMTGYTPLTTDQSVASVRKTTVLDVMRRLLQPKNVMVSTGRDRQTNHCYIAILNIIQGEVDPTQVHKSLQRIRERKLANFIPWGPASIQVALSRKSPYLPSAHRVSGLMMANHTSISSLFESSCQQFDKLRKRDAFLEQFRKEDMFKDNFDEMDRSREVVQELIDEYHAATQPDYISWGTQEQ

SEQ ID NO: 13758 - protein, 31 aa, Artificial Sequence
  Synthetic polypeptide
SQHFGRPRWADHEVRRSRPSWLTRWKRSCSW

SEQ ID NO: 13759 - protein, 31 aa, Artificial Sequence; identical to SEQ ID NO: 13758
  Synthetic polypeptide

SEQ ID NO: 13760 - protein, 31 aa, Artificial Sequence; identical to SEQ ID NO: 13758
  Synthetic polypeptide

SEQ ID NO: 13761 - protein, 60 aa, Artificial Sequence
  Synthetic polypeptide
HGGRDHAAGECLLGQPLPREALQQLFSSMPRPARHLPSQPAPGPGRAPGTVWLLGAAAGL

SEQ ID NO: 13762 - protein, 60 aa, Artificial Sequence; identical to SEQ ID NO: 13761
  Synthetic polypeptide

SEQ ID NO: 13763 - protein, 60 aa, Artificial Sequence; identical to SEQ ID NO: 13761
  Synthetic polypeptide

SEQ ID NO: 13764 - protein, 69 aa, Artificial Sequence
  Synthetic polypeptide
GQEIETILANTVEEIMQLVNAYLANPSPERPCSSSSPPCQDLPDTSPPSQRPGLDEPQGQSGCLGQLQD

SEQ ID NO: 13765 - protein, 69 aa, Artificial Sequence; identical to SEQ ID NO: 13764
  Synthetic polypeptide

SEQ ID NO: 13766 - protein, 69 aa, Artificial Sequence; identical to SEQ ID NO: 13764
  Synthetic polypeptide

SEQ ID NO: 13767 - protein, 71 aa, Artificial Sequence
  Synthetic polypeptide
SQHFGRPRWADHEVEEIMQLVNAYLANPSPERPCSSSSPPCQDLPDTSPPSQRPGLDEPQGQSGCLGQLQD

SEQ ID NO: 13768 - protein, 71 aa, Artificial Sequence; identical to SEQ ID NO: 13767
  Synthetic polypeptide

SEQ ID NO: 13769 - protein, 71 aa, Artificial Sequence; identical to SEQ ID NO: 13767
  Synthetic polypeptide

SEQ ID NO: 13770 - protein, 29 aa, Artificial Sequence
  Synthetic polypeptide
PAAVAHACNPSTLGGRDGRIMRWKRSCSW

SEQ ID NO: 13771 - protein, 29 aa, Artificial Sequence
  Synthetic polypeptide
PAAVAHACNPSTLGGRDGRIMRWKRSCSW

SEQ ID NO: 13772 - protein, 29 aa, Artificial Sequence
  Synthetic polypeptide
PAAVAHACNPSTLGGRDGRIMRWKRSCSW

SEQ ID NO: 13773 - protein, 28 aa, Artificial Sequence
  Synthetic polypeptide
REGERESKQAAGCRRAGGRHRGRERASS

SEQ ID NO: 13774 - protein, 28 aa, Artificial Sequence
  Synthetic polypeptide
REGERESKQAAGCRRAGGRHRGRERASS

SEQ ID NO: 13775 - protein, 28 aa, Artificial Sequence
  Synthetic polypeptide
REGERESKQAAGCRRAGGRHRGRERASS

SEQ ID NO: 13776 - protein, 28 aa, Artificial Sequence
  Synthetic polypeptide
REGERESKQAAGCRRAGGRHRGRERASS

SEQ ID NO: 13777 - protein, 28 aa, Artificial Sequence
  Synthetic polypeptide
REGERESKQAAGCRRAGGRHRGRERASS

SEQ ID NO: 13778 - protein, 28 aa, Artificial Sequence
  Synthetic polypeptide
REGERESKQAAGCRRAGGRHRGRERASS

SEQ ID NO: 13779 - protein, 267 aa, Artificial Sequence
  Synthetic polypeptide
GRASERASRQQAAGGRADGTEGGSERAVDSFRERITSEAEDLVANFFPKKLLELDSFLKEPILNIHDLTQIHSDMNLPVPDPILLTNSHDGLDGPTYKKRRLDECEEAFQGTKVFVMPNGMLKSNQQLVDIIEKVKPEIRLLIEKCNTVKMWVQLLIPRIEDGNNFGVSIQEETVAELRTVESEAASYLDQISRYYITRAKLVSKIAKYPHVEDYRRTVTEIDEKEYISLRLIISELRNQYVTLHDMILKNIEKIKRPRSSNAETLY

SEQ ID NO: 13780 - protein, 267 aa, Artificial Sequence; identical to SEQ ID NO: 13779
  Synthetic polypeptide

SEQ ID NO: 13781 - protein, 51 aa, Artificial Sequence
  Synthetic polypeptide
GGRAREQAGSRLPAGGRTAQREGASEQLILSGSGSQVRQKTWWQIFSQRSY

SEQ ID NO: 13782 - protein, 51 aa, Artificial Sequence; identical to SEQ ID NO: 13781
  Synthetic polypeptide

SEQ ID NO: 13783 - protein, 51 aa, Artificial Sequence; identical to SEQ ID NO: 13781
  Synthetic polypeptide

SEQ ID NO: 13784 - protein, 51 aa, Artificial Sequence; identical to SEQ ID NO: 13781
  Synthetic polypeptide

SEQ ID NO: 13785 - protein, 51 aa, Artificial Sequence; identical to SEQ ID NO: 13781
  Synthetic polypeptide

SEQ ID NO: 13786 - protein, 192 aa, Artificial Sequence
  Synthetic polypeptide
GRASERASRQQAAGGRADGTEGGSERAVDSFRERITSEAEDLVANFFPKKLLELDSFLKEPILNIHDLTQIHSDMNLPVPDPILLTNSHDGLDGPTYKKRRLDECEEAFQGTKVFVMPNGMLKSNQQLVDIIEKVKPEIRLLIEKCNTEETVAELRTVESEAASYLDQISRYYITRAKLVSKIAKYPHVEDY

SEQ ID NO: 13787 - protein, 143 aa, Artificial Sequence
  Synthetic polypeptide
GRASERASRQQAAGGRADGTEGGSERAVDSFRERITSEAEDLVANFFPKKLLELDSFLKEPILNIHDLTQIHSDMNLPVPDPILLTNSHDGLDGPTYKKRRLDECEEAFQGQNVGTAPDSQDRRWKQLWGVHSGGNSCRAKNC

SEQ ID NO: 13788 - protein, 280 aa, Artificial Sequence
  Synthetic polypeptide
GRASERASRQQAAGGRADGTEGGSERAVDSFRERITSEAEDLVANFFPKKLLELDSFLKEPILNIHDLTQIHSDMNLPVPDPILLTNSHDGLDGPTYKKRRLDECEEAFQGTKVFVMPNGMLKSNQQLVDIIEKVKPEIRLLIEKCNTPSGKGPHICFDLQVKMWVQLLIPRIEDGNNFGVSIQEETVAELRTVESEAASYLDQISRYYITRAKLVSKIAKYPHVEDYRRTVTEIDEKEYISLRLIISELRNQYVTLHDMILKNIEKIKRPRSSNAETLY

SEQ ID NO: 13789 - protein, 211 aa, Artificial Sequence
  Synthetic polypeptide
GRASERASRQQAAGGRADGTEGGSERAVDSFRERITSEPTYKKRRLDECEEAFQGTKVFVMPNGMLKSNQQLVDIIEKVKPEIRLLIEKCNTVKMWVQLLIPRIEDGNNFGVSIQEETVAELRTVESEAASYLDQISRYYITRAKLVSKIAKYPHVEDYRRTVTEIDEKEYISLRLIISELRNQYVTLHDMILKNIEKIKRPRSSNAETLY

SEQ ID NO: 13790 - protein, 59 aa, Artificial Sequence
  Synthetic polypeptide
GGRAREQAGSRLPAGGRTAQREGASEQLILSGSGSQVSPLIRSEGWMSVKKPSKEPRCL

SEQ ID NO: 13791 - protein, 49 aa, Artificial Sequence
  Synthetic polypeptide
LSIIYKALEIGLGPQSALSKGRRPGDGVEPVRDVAGRGDCALGPDLPDS

SEQ ID NO: 13792 - protein, 49 aa, Artificial Sequence; identical to SEQ ID NO: 13791
  Synthetic polypeptide

SEQ ID NO: 13793 - protein, 283 aa, Artificial Sequence
  Synthetic polypeptide
ALYIKHLKSGSALSQHSVKAGDRVMVLNRSGMWQEEVTVPSVQTFLIPEAMTFEEAAALLVNYITAYMVLFDFGNLQPGHSVLVHMAAGGVGMAAVQLCRTVENVTVFGTASASKHEALKENGVTHPIDYHTTDYVDEIKKISPKGVDIVMDPLGGSDTAKGYNLLKPMGKVVTYGMANLLTGPKRNLMALARTWWNQFSVTALQLLQANRAVCGFHLGYLDGEVELVSGVVARLLALYNQGHIKPHIDSVWPFEKVADAMKQMQEKKNVGKVLLVPGPEKEN

SEQ ID NO: 13794 - protein, 283 aa, Artificial Sequence; identical to SEQ ID NO: 13793
  Synthetic polypeptide

SEQ ID NO: 13795 - protein, 37 aa, Artificial Sequence
  Synthetic polypeptide
LSIIYKALEIGLGPQSALSKGRRPGDGVEPVRDVAGR

SEQ ID NO: 13796 - protein, 36 aa, Artificial Sequence
  Synthetic polypeptide
ALYIKHLKSGSALSQHSVKAGDRVMVLNRSGMWQEE

SEQ ID NO: 13797 - protein, 60 aa, Artificial Sequence
  Synthetic polypeptide
PLPSCVRLARYFKHSDGSFSNKQWIFFWFGLADIRDSYELVNHAKGLPDSFHKPASDPGS

SEQ ID NO: 13798 - protein, 60 aa, Artificial Sequence; identical to SEQ ID NO: 13797
  Synthetic polypeptide

SEQ ID NO: 13799 - protein, 60 aa, Artificial Sequence
  Synthetic polypeptide
RSLPVCAWQGTSNTVMAASPTSSGSSSGLAWLISGTPMSWSTTPRDCQTPFTSQLLTQAA

SEQ ID NO: 13800 - protein, 60 aa, Artificial Sequence; identical to SEQ ID NO: 13799
  Synthetic polypeptide

SEQ ID NO: 13801 - protein, 14 aa, Artificial Sequence
  Synthetic polypeptide
APFLCAPGKVLQTQ

SEQ ID NO: 13802 - protein, 14 aa, Artificial Sequence
  Synthetic polypeptide
APFLCAPGKVLQTQ

SEQ ID NO: 13803 - protein, 53 aa, Artificial Sequence
  Synthetic polypeptide
IKICILTRFPGFFLETGPFGGSMSLVTTARLQPRFTSSPLLVRLVQAALLDTA

SEQ ID NO: 13804 - protein, 16 aa, Artificial Sequence
  Synthetic polypeptide
QGSQVSFWRQALLVGP

SEQ ID NO: 13805 - protein, 16 aa, Artificial Sequence
  Synthetic polypeptide
QGSQVSFWRQALLVGP

SEQ ID NO: 13806 - protein, 296 aa, Artificial Sequence
  Synthetic polypeptide
KRRLSGPGPELLNQNLHFNKVPRFLFGDRPFWWVHESGYYSQAPAQVHQFPSSCETGPGSPSGHCMITGAALWPIMTALSSQVATRARSRWVRVMPSLAYCTFLLAVGLSRIFILAHFPHQVLAGLITGAVLGWLMTPRVPMERELSFYGLTALALMLGTSLIYWTLFTLGLDLSWSISLAFKWCERPEWIHVDSRPFASLSRDSGAALGLGIALHSPCYAQVRRAQLGNGQKIACLVLAMGLLGPLDWLGHPPQISLFYIFNFLKYTLWPCLVLALVPWAVHMFSAQEAPPIHSS

SEQ ID NO: 13807 - protein, 43 aa, Artificial Sequence
  Synthetic polypeptide
IKICILTRFPGFFLETGPFGGSMSLVTTARLQPRWPLGPAAAG

SEQ ID NO: 13808 - protein, 193 aa, Artificial Sequence
  Synthetic polypeptide
KRRLSGPGPELLNQNLHFNKVPRFLFGDRPFWWVHESGYYSQAPAQVATRARSRWVRVMPSLAYCTFLLAVGLSRIFILAHFPHQVLAGLITGAVLGWLMTPRVPMERELSFYGLTALALMLGTSLIYWTLFTLGLDLSWSISLAFKWCERPEWIHVDSRPFASLSRDSGAALGLGIALHSPCYAQVRRAQLG

SEQ ID NO: 13809 - protein, 20 aa, Artificial Sequence
  Synthetic polypeptide
NGDESNTKRTYLSGLSMGSL

SEQ ID NO: 13810 - protein, 20 aa, Artificial Sequence
  Synthetic polypeptide
NGDESNTKRTYLSGLSMGSL

SEQ ID NO: 13811 - protein, 20 aa, Artificial Sequence
  Synthetic polypeptide
NGDESNTKRTYLSGLSMGSL

SEQ ID NO: 13812 - protein, 18 aa, Artificial Sequence
  Synthetic polypeptide
AWVLCENAAGEVHSGAHR

SEQ ID NO: 13813 - protein, 18 aa, Artificial Sequence
  Synthetic polypeptide
AWVLCENAAGEVHSGAHR

SEQ ID NO: 13814 - protein, 18 aa, Artificial Sequence
  Synthetic polypeptide
AWVLCENAAGEVHSGAHR

SEQ ID NO: 13815 - protein, 420 aa, Artificial Sequence
  Synthetic polypeptide
EDLPFRAEHGFSVKTLLEKYTAEPIDDSSEEFVNFAAILEQILSHRFKACAPAGPVSWFSSDGQRGFWDYIRLACSKVPNNCVSSIENMENISTARAKGRAWIRVALMEKRMSEYITTALRDTRTTRRFYDSGAIMLRDEATILTGMLIGLSAIDFSFCLKGEVLDGKTPVVIDYTPYLKFTQSYDYLTDEEERHSAESSTSEDNSPEHPYLPLVTDEDSWYSKWHKMEQKFRIVYAQKGYLEELVRLRESQLKDLEAENRRLQLQLEEAAAQNQREKRELEGVILELQEQLTGLIPSDHAPLAQGSKELTTPLVNQWPSLGTLNGAEGASNSKLYRRHSFMSTEPLSAEASLSSDSQRLGEGTRDEEPWGPIGKDPTPSMLGLCGSLASIPSCKSLASFKSNECLVSDSPEGSPALSPS

SEQ ID NO: 13816 - protein, 374 aa, Artificial Sequence
  Synthetic polypeptide
EDLPFRAEHGFSVKTLLEKYTAEPIDDSSEEFVNFAAILEQILSHRFKGPVSWFSSDGQRGFWDYIRLACSKVPNNCVSSIENMENISTARAKGRAWIRVALMEKRMSEYITTALRDTRTTRRFYDSGAIMLRDEATILTGMLIGLSAIDFSFCLKGEVLDGKTPVVIDYTPYLKFTQSYDYLTDEEERHSAESSTSEDNSPEHPYLPLVTDEDSWYSKWHKMEQKFRIVYAQKGYLEELVRLRESQLKDLEAENRRLQLQLEEAAAQNQREKRELEGVILELQEQLTGLIPSDHAPLAQGSKELTTPLVNQWPSLGTLNGAEGASNSKLYRRHSFMSTEPLSAEASLSSDSQRLGEGTRDEEPWGPIGSSEPN

SEQ ID NO: 13817 - protein, 379 aa, Artificial Sequence
  Synthetic polypeptide
EDLPFRAEHGFSVKTLLEKYTAEPIDDSSEEFVNFAAILEQILSHRFKACAPAGPVSWFSSDGQRGFWDYIRLACSKVPNNCVSSIENMENISTARAKGRAWIRVALMEKRMSEYITTALRDTRTTRRFYDSGAIMLRDEATILTGMLIGLSAIDFSFCLKGEVLDGKTPVVIDYTPYLKFTQSYDYLTDEEERHSAESSTSEDNSPEHPYLPLVTDEDSWYSKWHKMEQKFRIVYAQKGYLEELVRLRESQLKDLEAENRRLQLQLEEAAAQNQREKRELEGVILELQEQLTGLIPSDHAPLAQGSKELTTPLVNQWPSLGTLNGAEGASNSKLYRRHSFMSTEPLSAEASLSSDSQRLGEGTRDEEPWGPIGSSEPN

SEQ ID NO: 13818 - protein, 60 aa, Artificial Sequence
  Synthetic polypeptide
QYSVPSTVPGTGREGPHALHAGPLRLPGLHSQLQVPGELQIQRVPGERQSRGQPSTEPQL

SEQ ID NO: 13819 - protein, 59 aa, Artificial Sequence
  Synthetic polypeptide
NTVSPARCLAQAGKDPTPSMLGLCGSLASIPSCKSLASFKSNECLVSDSPEGSPALSPS

SEQ ID NO: 13820 - protein, 45 aa, Artificial Sequence
  Synthetic polypeptide
IQCPQHGAWHRQGRTPRPPCWASAAPWPPFPAASPWRASNPTSAW

SEQ ID NO: 13821 - protein, 18 aa, Artificial Sequence
  Synthetic polypeptide
GWPWFLIPVIPALWEAES

SEQ ID NO: 13822 - protein, 18 aa, Artificial Sequence
  Synthetic polypeptide
GWPWFLIPVIPALWEAES

SEQ ID NO: 13823 - protein, 18 aa, Artificial Sequence
  Synthetic polypeptide
GWPWFLIPVIPALWEAES

SEQ ID NO: 13824 - protein, 18 aa, Artificial Sequence
  Synthetic polypeptide
GWPWFLIPVIPALWEAES

SEQ ID NO: 13825 - protein, 18 aa, Artificial Sequence
  Synthetic polypeptide
GWPWFLIPVIPALWEAES

SEQ ID NO: 13826 - protein, 18 aa, Artificial Sequence
  Synthetic polypeptide
GWPWFLIPVIPALWEAES

SEQ ID NO: 13827 - protein, 18 aa, Artificial Sequence
  Synthetic polypeptide
GWPWFLIPVIPALWEAES

SEQ ID NO: 13828 - protein, 96 aa, Artificial Sequence
  Synthetic polypeptide
SQRFGRLRADAFLQTVEPLLYQMEVPPVLQWCPGASVPVPKWCPLCHLVSRPYPLHWHHGCLREDREARGHQDPLERPPRHPGDDCASYRHLLHCL

SEQ ID NO: 13829 - protein, 96 aa, Artificial Sequence; identical to SEQ ID NO: 13828
  Synthetic polypeptide

SEQ ID NO: 13830 - protein, 96 aa, Artificial Sequence; identical to SEQ ID NO: 13828
  Synthetic polypeptide

SEQ ID NO: 13831 - protein, 104 aa, Artificial Sequence
  Synthetic polypeptide
SQRFGRLRADAFLQTVEPLLYQIALLSPIHREVPPVLQWCPGASVPVPKWCPLCHLVSRPYPLHWHHGCLREDREARGHQDPLERPPRHPGDDCASYRHLLHCL

SEQ ID NO: 13832 - protein, 58 aa, Artificial Sequence
  Synthetic polypeptide
SQRFGRLRADAFLQTVEPLLYQMEVPPVLQWCPGASVPVPKWCPLCHLVSRPYPLHWH

SEQ ID NO: 13833 - protein, 52 aa, Artificial Sequence
  Synthetic polypeptide
SQRFGRLRADAFLQTVEPLLYQMEVPPVLQWCPGASVPVPKWCPLCHLVSRP

SEQ ID NO: 13834 - protein, 31 aa, Artificial Sequence
  Synthetic polypeptide
SQRFGRLRADAFLQTVEPLLYQIALLSPIHR

SEQ ID NO: 13835 - protein, 42 aa, Artificial Sequence
  Synthetic polypeptide
FAAAGHPLAEDGPARSPLHQLAGGEEGTRQLHQDRCQRHDPG

SEQ ID NO: 13836 - protein, 138 aa, Artificial Sequence
  Synthetic polypeptide
MLLLDTHSLKMVLLDLPSISSQVVRKAPASYTKIVVKGMTRAEMILKVVMAPHEPLVVFVDNYIKLLTDCNTETFQKILDMKGLKRSEQSSMLELLRQRLPAPPSGAESSGSLSLTAPTPEQESSRIRKLEKLIKKRL

SEQ ID NO: 13837 - protein, 195 aa, Artificial Sequence
  Synthetic polypeptide
GQARWLTPVIPALWEAEACGSPEFADLTDAAARNAELLRQAKHEANDYRRQLQSLTCDLESLRGTNESLERQMREQEERHVREAASYQEALARLEEEGQSLKDEMARHLQEYQDLLNVKLALDIEIATYRKLLEGEENRITIPVQTFSNLQIRETSLDTKSVSEGHLKRNIVVKTVEMRDGEVIKESKQEHKDVM

SEQ ID NO: 13838 - protein, 17 aa, Artificial Sequence
  Synthetic polypeptide
SQHFGRPRHADHLSLQT

SEQ ID NO: 13839 - protein, 17 aa, Artificial Sequence
  Synthetic polypeptide
SQHFGRPRHADHLSLQT

SEQ ID NO: 13840 - protein, 17 aa, Artificial Sequence
  Synthetic polypeptide
SQHFGRPRHADHLSLQT

SEQ ID NO: 13841 - protein, 17 aa, Artificial Sequence
  Synthetic polypeptide
SQHFGRPRHADHLSLQT

SEQ ID NO: 13842 - protein, 17 aa, Artificial Sequence
  Synthetic polypeptide
SQHFGRPRHADHLSLQT

SEQ ID NO: 13843 - protein, 17 aa, Artificial Sequence
  Synthetic polypeptide
SQHFGRPRHADHLSLQT

SEQ ID NO: 13844 - protein, 194 aa, Artificial Sequence
  Synthetic polypeptide
GQARWLTPVIPALWEAEACGSPEFADLTDAAARNAELLRQAKHEANDYRRQLQSLTCDLESLRGTNESLERQMREQEERHVREAASYQEALARLEEEGQSLKDEMARHLQEYQDLLNVKLALDIEIATYRKLLEGEENRITIPVQTFSNLQIRGGKSTKDGENHKVTRYLKSLTIRVIPIQAHQIVNGTPPARG

SEQ ID NO: 13845 - protein, 201 aa, Artificial Sequence
  Synthetic polypeptide
GQARWLTPVIPALWEAEACGSPEFADLTDAAARNAELLRQAKHEANDYRRQLQSLTCDLESLRGTNESLERQMREQEERHVREAASYQEALARLEEEGQSLKDEMARHLQEYQDLLNVKLALDIEIATYRKLLEGEENRITIPVQTFSNLQIRGQYSRASWEGHWSPAPSSRACRLLQTGTEDQGKGIQLSLGAFVTLQRS

SEQ ID NO: 13846 - protein, 128 aa, Artificial Sequence
  Synthetic polypeptide
GQARWLTPVIPALWEAEACGSPEFADLTDAAARNAELLRQAKHEANDYRRQLQSLTCDLESLRGTNESLERQMREQEERHVREAASYQEALARLEEEGQSLKDEMARHLQEYQDLLNVKLALDIEIAT

SEQ ID NO: 13847 - protein, 64 aa, Artificial Sequence
  Synthetic polypeptide
GQARWLTPVIPALWEAEACGSPEFADLTDAAARNAELLRQAKHEANDYRRQLQSLTCDLESLRG

SEQ ID NO: 13848 - protein, 56 aa, Artificial Sequence
  Synthetic polypeptide
GQARWLTPVIPALWEAEACGSPEFADLTDAAARNAELLRQAKHEANDYRRQLQSLT

SEQ ID NO: 13849 - protein, 281 aa, Artificial Sequence
  Synthetic polypeptide
NSFQKDETNLRLEAENNLAAYRQEADEATLARLDLERKIESLEEEIRFLRKIHEEEVRELQEQLARQQVHVELDVAKPDLTAALKEIRTQYEAMASSNMHEAEEWYRSKFADLTDAAARNAELLRQAKHEANDYRRQLQSLTCDLESLRGTNESLERQMREQEERHVREAASYQEALARLEEEGQSLKDEMARHLQEYQDLLNVKLALDIEIATYRKLLEGEENRITIPVQTFSNLQIRETSLDTKSVSEGHLKRNIVVKTVEMRDGEVIKESKQEHKDVM

SEQ ID NO: 13850 - protein, 15 aa, Artificial Sequence
  Synthetic polypeptide
SGGHNKIHFKRMKPT

SEQ ID NO: 13851 - protein, 15 aa, Artificial Sequence
  Synthetic polypeptide
SGGHNKIHFKRMKPT

SEQ ID NO: 13852 - protein, 15 aa, Artificial Sequence
  Synthetic polypeptide
SGGHNKIHFKRMKPT

SEQ ID NO: 13853 - protein, 15 aa, Artificial Sequence
  Synthetic polypeptide
SGGHNKIHFKRMKPT

SEQ ID NO: 13854 - protein, 15 aa, Artificial Sequence
  Synthetic polypeptide
SGGHNKIHFKRMKPT

SEQ ID NO: 13855 - protein, 15 aa, Artificial Sequence
  Synthetic polypeptide
SGGHNKIHFKRMKPT

SEQ ID NO: 13856 - protein, 23 aa, Artificial Sequence
  Synthetic polypeptide
PPSSYFDLHSCEAVVIIKFISKG

SEQ ID NO: 13857 - protein, 23 aa, Artificial Sequence
  Synthetic polypeptide
PPSSYFDLHSCEAVVIIKFISKG

SEQ ID NO: 13858 - protein, 23 aa, Artificial Sequence
  Synthetic polypeptide
PPSSYFDLHSCEAVVIIKFISKG

SEQ ID NO: 13859 - protein, 23 aa, Artificial Sequence
  Synthetic polypeptide
PPSSYFDLHSCEAVVIIKFISKG

SEQ ID NO: 13860 - protein, 23 aa, Artificial Sequence
  Synthetic polypeptide
PPSSYFDLHSCEAVVIIKFISKG

SEQ ID NO: 13861 - protein, 23 aa, Artificial Sequence
  Synthetic polypeptide
PPSSYFDLHSCEAVVIIKFISKG

SEQ ID NO: 13862 - protein, 280 aa, Artificial Sequence
  Synthetic polypeptide
NSFQKDETNLRLEAENNLAAYRQEADEATLARLDLERKIESLEEEIRFLRKIHEEEVRELQEQLARQQVHVELDVAKPDLTAALKEIRTQYEAMASSNMHEAEEWYRSKFADLTDAAARNAELLRQAKHEANDYRRQLQSLTCDLESLRGTNESLERQMREQEERHVREAASYQEALARLEEEGQSLKDEMARHLQEYQDLLNVKLALDIEIATYRKLLEGEENRITIPVQTFSNLQIRGGKSTKDGENHKVTRYLKSLTIRVIPIQAHQIVNGTPPARG

SEQ ID NO: 13863 - protein, 287 aa, Artificial Sequence
  Synthetic polypeptide
NSFQKDETNLRLEAENNLAAYRQEADEATLARLDLERKIESLEEEIRFLRKIHEEEVRELQEQLARQQVHVELDVAKPDLTAALKEIRTQYEAMASSNMHEAEEWYRSKFADLTDAAARNAELLRQAKHEANDYRRQLQSLTCDLESLRGTNESLERQMREQEERHVREAASYQEALARLEEEGQSLKDEMARHLQEYQDLLNVKLALDIEIATYRKLLEGEENRITIPVQTFSNLQIRGQYSRASWEGHWSPAPSSRACRLLQTGTEDQGKGIQLSLGAFVTLQRS

SEQ ID NO: 13864 - protein, 97 aa, Artificial Sequence
  Synthetic polypeptide
NSFQKDETNLRLEAENNLAAYRQEADEATLARLDLERKIESLEEEIRFLRKIHEEEYQDLLNVKLALDIEIATYRKLLEGEENRITIPVQTFSNLQI

SEQ ID NO: 13865 - protein, 110 aa, Artificial Sequence
  Synthetic polypeptide
NSFQKDETNLRLEAENNLAAYRQEVRELQEQLARQQVHVELDVAKPDLTAALKEIRTQYEAMASSNMHEAEEWYRSKFADLTDAAARNAELLRQAKHEANDYRRQLQSLT

SEQ ID NO: 13866 - protein, 31 aa, Artificial Sequence
  Synthetic polypeptide
NSFQKDETNLRLEAENNLAAYRQEADEATLA

SEQ ID NO: 13867 - protein, 8 aa, Artificial Sequence
  Synthetic polypeptide
NSFQKAPG

SEQ ID NO: 13868 - protein, 8 aa, Artificial Sequence
  Synthetic polypeptide
NSFQKAPG

SEQ ID NO: 13869 - protein, 8 aa, Artificial Sequence
  Synthetic polypeptide
NSFQKAPG

SEQ ID NO: 13870 - protein, 8 aa, Artificial Sequence
  Synthetic polypeptide
NSFQKAPG

SEQ ID NO: 13871 - protein, 8 aa, Artificial Sequence
  Synthetic polypeptide
NSFQKAPG

SEQ ID NO: 13872 - protein, 8 aa, Artificial Sequence
  Synthetic polypeptide
NSFQKAPG

SEQ ID NO: 13873 - protein, 289 aa, Artificial Sequence
  Synthetic polypeptide
SGGHNKIHFKRLQDETNLRLEAENNLAAYRQEADEATLARLDLERKIESLEEEIRFLRKIHEEEVRELQEQLARQQVHVELDVAKPDLTAALKEIRTQYEAMASSNMHEAEEWYRSKFADLTDAAARNAELLRQAKHEANDYRRQLQSLTCDLESLRGTNESLERQMREQEERHVREAASYQEALARLEEEGQSLKDEMARHLQEYQDLLNVKLALDIEIATYRKLLEGEENRITIPVQTFSNLQIRETSLDTKSVSEGHLKRNIVVKTVEMRDGEVIKESKQEHKDVM

SEQ ID NO: 13874 - protein, 29 aa, Artificial Sequence
  Synthetic polypeptide
PPSSYFDLHSCEAVVIIKFISKGSRMKPT

SEQ ID NO: 13875 - protein, 29 aa, Artificial Sequence
  Synthetic polypeptide
PPSSYFDLHSCEAVVIIKFISKGSRMKPT

SEQ ID NO: 13876 - protein, 29 aa, Artificial Sequence
  Synthetic polypeptide
PPSSYFDLHSCEAVVIIKFISKGSRMKPT

SEQ ID NO: 13877 - protein, 29 aa, Artificial Sequence
  Synthetic polypeptide
PPSSYFDLHSCEAVVIIKFISKGSRMKPT

SEQ ID NO: 13878 - protein, 29 aa, Artificial Sequence
  Synthetic polypeptide
PPSSYFDLHSCEAVVIIKFISKGSRMKPT

SEQ ID NO: 13879 - protein, 29 aa, Artificial Sequence
  Synthetic polypeptide
PPSSYFDLHSCEAVVIIKFISKGSRMKPT

SEQ ID NO: 13880 - protein, 288 aa, Artificial Sequence
  Synthetic polypeptide
SGGHNKIHFKRLQDETNLRLEAENNLAAYRQEADEATLARLDLERKIESLEEEIRFLRKIHEEEVRELQEQLARQQVHVELDVAKPDLTAALKEIRTQYEAMASSNMHEAEEWYRSKFADLTDAAARNAELLRQAKHEANDYRRQLQSLTCDLESLRGTNESLERQMREQEERHVREAASYQEALARLEEEGQSLKDEMARHLQEYQDLLNVKLALDIEIATYRKLLEGEENRITIPVQTFSNLQIRGGKSTKDGENHKVTRYLKSLTIRVIPIQAHQIVNGTPPARG

SEQ ID NO: 13881 - protein, 295 aa, Artificial Sequence
  Synthetic polypeptide
SGGHNKIHFKRLQDETNLRLEAENNLAAYRQEADEATLARLDLERKIESLEEEIRFLRKIHEEEVRELQEQLARQQVHVELDVAKPDLTAALKEIRTQYEAMASSNMHEAEEWYRSKFADLTDAAARNAELLRQAKHEANDYRRQLQSLTCDLESLRGTNESLERQMREQEERHVREAASYQEALARLEEEGQSLKDEMARHLQEYQDLLNVKLALDIEIATYRKLLEGEENRITIPVQTFSNLQIRGQYSRASWEGHWSPAPSSRACRLLQTGTEDQGKGIQLSLGAFVTLQRS

SEQ ID NO: 13882 - protein, 105 aa, Artificial Sequence
  Synthetic polypeptide
SGGHNKIHFKRLQDETNLRLEAENNLAAYRQEADEATLARLDLERKIESLEEEIRFLRKIHEEEYQDLLNVKLALDIEIATYRKLLEGEENRITIPVQTFSNLQI

SEQ ID NO: 13883 - protein, 118 aa, Artificial Sequence
  Synthetic polypeptide
SGGHNKIHFKRLQDETNLRLEAENNLAAYRQEVRELQEQLARQQVHVELDVAKPDLTAALKEIRTQYEAMASSNMHEAEEWYRSKFADLTDAAARNAELLRQAKHEANDYRRQLQSLT

SEQ ID NO: 13884 - protein, 39 aa, Artificial Sequence
  Synthetic polypeptide
SGGHNKIHFKRLQDETNLRLEAENNLAAYRQEADEATLA

SEQ ID NO: 13885 - protein, 13 aa, Artificial Sequence
  Synthetic polypeptide
VWAQSTGSRMKPT

SEQ ID NO: 13886 - protein, 13 aa, Artificial Sequence
  Synthetic polypeptide
VWAQSTGSRMKPT

SEQ ID NO: 13887 - protein, 13 aa, Artificial Sequence
  Synthetic polypeptide
VWAQSTGSRMKPT

SEQ ID NO: 13888 - protein, 13 aa, Artificial Sequence
  Synthetic polypeptide
VWAQSTGSRMKPT

SEQ ID NO: 13889 - protein, 13 aa, Artificial Sequence
  Synthetic polypeptide
VWAQSTGSRMKPT

SEQ ID NO: 13890 - protein, 13 aa, Artificial Sequence
  Synthetic polypeptide
VWAQSTGSRMKPT

SEQ ID NO: 13891 - protein, 9 aa, Artificial Sequence
  Synthetic polypeptide
SGRKAQAPG

SEQ ID NO: 13892 - protein, 9 aa, Artificial Sequence
  Synthetic polypeptide
SGRKAQAPG

SEQ ID NO: 13893 - protein, 9 aa, Artificial Sequence
  Synthetic polypeptide
SGRKAQAPG

SEQ ID NO: 13894 - protein, 9 aa, Artificial Sequence
  Synthetic polypeptide
SGRKAQAPG

SEQ ID NO: 13895 - protein, 9 aa, Artificial Sequence
  Synthetic polypeptide
SGRKAQAPG

SEQ ID NO: 13896 - protein, 9 aa, Artificial Sequence
  Synthetic polypeptide
SGRKAQAPG

SEQ ID NO: 13897 - protein, 284 aa, Artificial Sequence
  Synthetic polypeptide
MGAKHRLQDETNLRLEAENNLAAYRQEADEATLARLDLERKIESLEEEIRFLRKIHEEEVRELQEQLARQQVHVELDVAKPDLTAALKEIRTQYEAMASSNMHEAEEWYRSKFADLTDAAARNAELLRQAKHEANDYRRQLQSLTCDLESLRGTNESLERQMREQEERHVREAASYQEALARLEEEGQSLKDEMARHLQEYQDLLNVKLALDIEIATYRKLLEGEENRITIPVQTFSNLQIRETSLDTKSVSEGHLKRNIVVKTVEMRDGEVIKESKQEHKDVM

SEQ ID NO: 13898 - protein, 283 aa, Artificial Sequence
  Synthetic polypeptide
MGAKHRLQDETNLRLEAENNLAAYRQEADEATLARLDLERKIESLEEEIRFLRKIHEEEVRELQEQLARQQVHVELDVAKPDLTAALKEIRTQYEAMASSNMHEAEEWYRSKFADLTDAAARNAELLRQAKHEANDYRRQLQSLTCDLESLRGTNESLERQMREQEERHVREAASYQEALARLEEEGQSLKDEMARHLQEYQDLLNVKLALDIEIATYRKLLEGEENRITIPVQTFSNLQIRGGKSTKDGENHKVTRYLKSLTIRVIPIQAHQIVNGTPPARG

SEQ ID NO: 13899 - protein, 290 aa, Artificial Sequence
  Synthetic polypeptide
MGAKHRLQDETNLRLEAENNLAAYRQEADEATLARLDLERKIESLEEEIRFLRKIHEEEVRELQEQLARQQVHVELDVAKPDLTAALKEIRTQYEAMASSNMHEAEEWYRSKFADLTDAAARNAELLRQAKHEANDYRRQLQSLTCDLESLRGTNESLERQMREQEERHVREAASYQEALARLEEEGQSLKDEMARHLQEYQDLLNVKLALDIEIATYRKLLEGEENRITIPVQTFSNLQIRGQYSRASWEGHWSPAPSSRACRLLQTGTEDQGKGIQLSLGAFVTLQRS

SEQ ID NO: 13900 - protein, 100 aa, Artificial Sequence
  Synthetic polypeptide
MGAKHRLQDETNLRLEAENNLAAYRQEADEATLARLDLERKIESLEEEIRFLRKIHEEEYQDLLNVKLALDIEIATYRKLLEGEENRITIPVQTFSNLQI

SEQ ID NO: 13901 - protein, 113 aa, Artificial Sequence
  Synthetic polypeptide
MGAKHRLQDETNLRLEAENNLAAYRQEVRELQEQLARQQVHVELDVAKPDLTAALKEIRTQYEAMASSNMHEAEEWYRSKFADLTDAAARNAELLRQAKHEANDYRRQLQSLT

SEQ ID NO: 13902 - protein, 34 aa, Artificial Sequence
  Synthetic polypeptide
MGAKHRLQDETNLRLEAENNLAAYRQEADEATLA

SEQ ID NO: 13903 - protein, 88 aa, Artificial Sequence
  Synthetic polypeptide
VPALPGKDLCPFLPCCIPRASNSAWHRAGGRPTGARVREHREAAPGHFTGRRCSPPSQPGVGDAHGRGHRAPLLLQPRHGSYHLGVAL

SEQ ID NO: 13904 - protein, 88 aa, Artificial Sequence; identical to SEQ ID NO: 13903
  Synthetic polypeptide

SEQ ID NO: 13905 - protein, 88 aa, Artificial Sequence; identical to SEQ ID NO: 13903
  Synthetic polypeptide

SEQ ID NO: 13906 - protein, 88 aa, Artificial Sequence; identical to SEQ ID NO: 13903
  Synthetic polypeptide

SEQ ID NO: 13907 - protein, 88 aa, Artificial Sequence; identical to SEQ ID NO: 13903
  Synthetic polypeptide

SEQ ID NO: 13908 - protein, 697 aa, Artificial Sequence
  Synthetic polypeptide
SALTCCPFTHHPHHLHTGALECQLCQGRICVPFFPAVFPVPQTVPGTEQVDDPPEPVYANIERQPRATSPGAAAAPLPSPVWETHTDAGTGRPYYYNPDTGVTTWESPFEAAEGAASPATSPASVDSHVSLETEWGQYWDEESRRVFFYNPLTGETAWEDEAENEPEEELEMQPGLSPGSPGDPRPPTPETDYPESLTSYPEEDYSPVGSFGEPGPTSPLTTPPGWSCHVSQDKQMLYTNHFTQEQWVRLEDPHGKPYFYNPEDSSVRWELPQVPVPAPRSIHKSSQDGDTPAQASPPEEKTKTLDKAGVLHRTKTADKGKRLRKKHWSASWTVLEGGVLTFFKDSKTSAAGGLRQPSKFSTPEYTVELRGATLSWAPKDKSSRKNVLELRSRDGSEYLIQHDSEAIISTWHKAIAQGIQELSAELPPEESESSRVDFGSSERLGSWQEKEEDARPNAAAPALGPVGLESDLSKVRHKLRKFLQRRPTLQSLREKGYIKDQVFGCALAALCERERSRVPRFVQQCIRAVEARGLDIDGLYRISGNLATIQKLRYKVDHDERLDLDDGRWEDVHVITGALKLFFRELPEPLFPFSHFRQFIAAIKLQDQARRSRCVRDLVRSLPAPNHDTLRMLFQHLCRVIEHGEQNRMSVQSVAIVFGPTLLRPEVEETSMPMTMVFQNQVVELILQQCADIFPPH

SEQ ID NO: 13909 - protein, 697 aa, Artificial Sequence; identical to SEQ ID NO: 13908
  Synthetic polypeptide

SEQ ID NO: 13910 - protein, 57 aa, Artificial Sequence
  Synthetic polypeptide
HAVHLLITPTIYTQVHLSASSAREGFVSLSSLLYSPCLKQCLAQSRWTTHRSPCTRT

SEQ ID NO: 13911 - protein, 57 aa, Artificial Sequence; identical to SEQ ID NO: 13910
  Synthetic polypeptide

SEQ ID NO: 13912 - protein, 57 aa, Artificial Sequence; identical to SEQ ID NO: 13910
  Synthetic polypeptide

SEQ ID NO: 13913 - protein, 57 aa, Artificial Sequence; identical to SEQ ID NO: 13910
  Synthetic polypeptide

SEQ ID NO: 13914 - protein, 57 aa, Artificial Sequence; identical to SEQ ID NO: 13910
  Synthetic polypeptide

SEQ ID NO: 13915 - protein, 719 aa, Artificial Sequence
  Synthetic polypeptide
SALTCCPFTHHPHHLHTGALECQLCQGRICVPFFPAVFPVPQTVPGTEQVDDPPEPVYANIERQPRATSPGAAAAPLPSPVWETHTDAGTGRPYYYNPDTGVTTWESPFEAAEGAASPATSPASVDSHVSLETEWGQYWDEESRRVFFYNPLTGETAWEDEAENEPEEELEMQPGLSPGSPGDPRPPTPETDYPESLTSYPEEDYSPVGSFGEPGPTSPLTTPPGWSCHVSQDKQMLYTNHFTQEQWVRLEDPHGKPYFYNPEDSSVRWELPQVPVPAPRSIHKSSQDGDTPAQASPPEEKVPAELDEVGSWEEVSPATAAVRTKTLDKAGVLHRTKTADKGKRLRKKHWSASWTVLEGGVLTFFKDSKTSAAGGLRQPSKFSTPEYTVELRGATLSWAPKDKSSRKNVLELRSRDGSEYLIQHDSEAIISTWHKAIAQGIQELSAELPPEESESSRVDFGSSERLGSWQEKEEDARPNAAAPALGPVGLESDLSKVRHKLRKFLQRRPTLQSLREKGYIKDQVFGCALAALCERERSRVPRFVQQCIRAVEARGLDIDGLYRISGNLATIQKLRYKVDHDERLDLDDGRWEDVHVITGALKLFFRELPEPLFPFSHFRQFIAAIKLQDQARRSRCVRDLVRSLPAPNHDTLRMLFQHLCRVIEHGEQNRMSVQSVAIVFGPTLLRPEVEETSMPMTMVFQNQVVELILQQCADIFPPH

SEQ ID NO: 13916 - protein, 692 aa, Artificial Sequence
  Synthetic polypeptide
SALTCCPFTHHPHHLHTGALECQLCQGRICVPFFPAVFPVPQTVPGTEQVDDPPEPVYANIERQPRATSPGAAAAPLPSPVWETHTDAGTGRPYYYNPDTGVTTWESPFEAAEGAASPATSPASVDSHVSLETEWGQYWDEESRRVFFYNPLTGETAWEDEAENEPEEELEMQPGLSPGSPGDPRPPTPETDYPESLTSYPEEDYSPVGSFGEPGPTSPLTTPPGWSCHVSQDKQMLYTNHFTQEQVPVPAPRSIHKSSQDGDTPAQASPPEEKVPAELDEVGSWEEVSPATAAVRTKTLDKAGVLHRTKTADKGKRLRKKHWSASWTVLEGGVLTFFKDSKTSAAGGLRQPSKFSTPEYTVELRGATLSWAPKDKSSRKNVLELRSRDGSEYLIQHDSEAIISTWHKAIAQGIQELSAELPPEESESSRVDFGSSERLGSWQEKEEDARPNAAAPALGPVGLESDLSKVRHKLRKFLQRRPTLQSLREKGYIKDQVFGCALAALCERERSRVPRFVQQCIRAVEARGLDIDGLYRISGNLATIQKLRYKVDHDERLDLDDGRWEDVHVITGALKLFFRELPEPLFPFSHFRQFIAAIKLQDQARRSRCVRDLVRSLPAPNHDTLRMLFQHLCRVIEHGEQNRMSVQSVAIVFGPTLLRPEVEETSMPMTMVFQNQVVELILQQCADIFPPH

SEQ ID NO: 13917 - protein, 244 aa, Artificial Sequence
  Synthetic polypeptide
SALTCCPFTHHPHHLHTGALECQLCQGRICVPFFPAVFPVPQTVPGTEQVDDPPEPVYANIERQPRATSPGAAAAPLPSPVWETHTDAGTGRPYYYNPDTGVTTWESPFEAAEGAASPATSPASVDSHPPTPETDYPESLTSYPEEDYSPVGSFGEPGPTSPLTTPPGWSCHVSQDKQMLYTNHFTQEQWVRLEDPHGKPYFYNPEDSSVRWELPQVPVPAPRSIHKSSQDGDTPAQASPPEEK

SEQ ID NO: 13918 - protein, 537 aa, Artificial Sequence
  Synthetic polypeptide
EKEAGTKGLSNPFRGLMKLGTVERRGAMGIWKELFCELSPLEFRLYLSNEEHTCVENCSLLRCESVGPAHSDGRFELVFSGKKLALRASSQDEAEDWLDRVREALQKVRPQQEDEWVNVQYPDQPEEPPEAPQGCLSPSDLLSEPAALQGTQFDWSSAQVPEPDAIKESLLYLYMDRTWMPYIFSLSLEALKCFRIRNNEKMLSDSHGVETIRDILPDTSLGGPSFFKIITAKAVLKLQAGNAEEAALWRDLVRKVLASYLETAEEAVTLGGSLDENCQEVLKFATRENGFLLQYLVAIPMEKGLDSQGCFCAGCSRQIGFSFVRPKLCAFSGLYYCDICHQDDASVIPARIIHNWDLTKRPICRQALKFLTQIRAQPLINLQMVNASLYEHVERMHLIGRRREQLKLLGDYLGLCRSGALKELSKRLNHRNYLLESPHRFSVADLQQIADGVYEGFLKALIEFASQHVYHCDLCTQRGFICQICQHHDIIFPFEFDTTVRCAECKTVFHQSCQAVVKKGCPRCARRRKYQEQNIFA

SEQ ID NO: 13919 - protein, 537 aa, Artificial Sequence; identical to SEQ ID NO: 13918
  Synthetic polypeptide

SEQ ID NO: 13920 - protein, 31 aa, Artificial Sequence
  Synthetic polypeptide
TCLYNMDAPGKPPTKRKKQAQKDCPTHSGVS

SEQ ID NO: 13921 - protein, 31 aa, Artificial Sequence; identical to SEQ ID NO: 13920
  Synthetic polypeptide

SEQ ID NO: 13922 - protein, 80 aa, Artificial Sequence
  Synthetic polypeptide
TLKHAYITWMHLENLPLRERSRHKRTVQPIPGSHEAGHRGAAGGNGHLEGALLRALPAGVPPLPEQRGAHLCGELLAASL

SEQ ID NO: 13923 - protein, 80 aa, Artificial Sequence; identical to SEQ ID NO: 13922
  Synthetic polypeptide

SEQ ID NO: 13924 - protein, 50 aa, Artificial Sequence
  Synthetic polypeptide
PVIPAFWEAEVGGLLEFKSSRPVWATWLSSRVTQLLQLSVPSSSVVKIFC

SEQ ID NO: 13925 - protein, 50 aa, Artificial Sequence; identical to SEQ ID NO: 13924
  Synthetic polypeptide

SEQ ID NO: 13926 - protein, 50 aa, Artificial Sequence; identical to SEQ ID NO: 13924
  Synthetic polypeptide

SEQ ID NO: 13927 - protein, 50 aa, Artificial Sequence; identical to SEQ ID NO: 13924
  Synthetic polypeptide

SEQ ID NO: 13928 - protein, 35 aa, Artificial Sequence
  Synthetic polypeptide
FQHFGRLRWEDCLSSRVQDQSGQHGFLRESPSSFS

SEQ ID NO: 13929 - protein, 35 aa, Artificial Sequence; identical to SEQ ID NO: 13928
  Synthetic polypeptide

SEQ ID NO: 13930 - protein, 35 aa, Artificial Sequence; identical to SEQ ID NO: 13928
  Synthetic polypeptide

SEQ ID NO: 13931 - protein, 35 aa, Artificial Sequence; identical to SEQ ID NO: 13928
  Synthetic polypeptide

SEQ ID NO: 13932 - protein, 61 aa, Artificial Sequence
  Synthetic polypeptide
VQEFKTSLGNMAFFESHPAPSAERTIQQCCENILLNAAWLKRDAESIHQYLLQRKASPPTV

SEQ ID NO: 13933 - protein, 61 aa, Artificial Sequence; identical to SEQ ID NO: 13932
  Synthetic polypeptide

SEQ ID NO: 13934 - protein, 61 aa, Artificial Sequence; identical to SEQ ID NO: 13932
  Synthetic polypeptide

SEQ ID NO: 13935 - protein, 61 aa, Artificial Sequence; identical to SEQ ID NO: 13932
  Synthetic polypeptide

SEQ ID NO: 13936 - protein, 39 aa, Artificial Sequence
  Synthetic polypeptide
PQLDRWPPYPVQFLVTRLAGCLPSRLSAMAPRLLPATVV

SEQ ID NO: 13937 - protein, 39 aa, Artificial Sequence; identical to SEQ ID NO: 13936
  Synthetic polypeptide

SEQ ID NO: 13938 - protein, 39 aa, Artificial Sequence; identical to SEQ ID NO: 13936
  Synthetic polypeptide

SEQ ID NO: 13939 - protein, 36 aa, Artificial Sequence
  Synthetic polypeptide
LDWPAAYPPDCPLWLQGCYPPPSCDALSAAEADGCD

SEQ ID NO: 13940 - protein, 36 aa, Artificial Sequence; identical to SEQ ID NO: 13939
  Synthetic polypeptide

SEQ ID NO: 13941 - protein, 36 aa, Artificial Sequence; identical to SEQ ID NO: 13939
  Synthetic polypeptide

SEQ ID NO: 13942 - protein, 264 aa, Artificial Sequence
  Synthetic polypeptide
SLTPARSLASLPRPVPCDSTGRLPTLQTVRYGSKAVTRHRRVMHFQRQKLMAVTEYIPPKPAIHPSCLPSPPSPPQEEIGLIRLLRREIAAVFQDNRMIAVCQNVALSAEDKLLMRHQLRKHKILMKVFPNQVLKPFLEDSKYQNLLPLFVGHNMLLVSEEPKVKEMVRILRTVPFLPLLGGCIDDTILSRQGFINYSKLPSLPLVQGELVGGLTCLTAQTHSLLQHQPLQLTTLLDQYIREQREKDSVMSANGKPDPDTVPDS

SEQ ID NO: 13943 - protein, 264 aa, Artificial Sequence; identical to SEQ ID NO: 13942
  Synthetic polypeptide

SEQ ID NO: 13944 - protein, 264 aa, Artificial Sequence; identical to SEQ ID NO: 13942
  Synthetic polypeptide

SEQ ID NO: 13945 - protein, 12 aa, Artificial Sequence
  Synthetic polypeptide
PCVAVLHRQSSD

SEQ ID NO: 13946 - protein, 12 aa, Artificial Sequence
  Synthetic polypeptide
PCVAVLHRQSSD

SEQ ID NO: 13947 - protein, 223 aa, Artificial Sequence
  Synthetic polypeptide
SQYFGRPRRVDHLRSGVRDQPGQHGETPSLLKNTKISRAWRSYIANRVTDKLTPIHDRIFCCRSGSAADTQAVADAVTYQLGFHSIELNEPPLVHTAASLFKEMCYRYREDLMAGIIIAGWDPQEGGQVYSVPMGGMMVRQSFAIGGSGSSYIYGYVDATYREGMTKEECLQFTANALALAMERDGSSGGVIRLAAIAESGVERQVLLGDQIPKFAVATLPPA

SEQ ID NO: 13948 - protein, 16 aa, Artificial Sequence
  Synthetic polypeptide
KIQKLAVRGGPTSPIE

SEQ ID NO: 13949 - protein, 16 aa, Artificial Sequence
  Synthetic polypeptide
KIQKLAVRGGPTSPIE

SEQ ID NO: 13950 - protein, 89 aa, Artificial Sequence
  Synthetic polypeptide
SQYFGRPRRVDHLRSGVRDQPGQHGETPSLLKNTKISRAWRSYIANRVTDKLTPIHDRIFCCRSGSAADTQAVADAVTYQLGFHSSQPL

SEQ ID NO: 13951 - protein, 85 aa, Artificial Sequence
  Synthetic polypeptide
TWEAELVFSVDIDSELVEELPAEIELWLVLVAVGAGLLLLGLIILLLWKCGFFKRARTRALYEAKRQKAEMKSQPSETERLTDDY

SEQ ID NO: 13952 - protein, 60 aa, Artificial Sequence
  Synthetic polypeptide
WCVPVIPATREAEAGESLEPGRQSWCSLWTLTRSWWRSCRPKSSCGWCWWPWVQGCCCWG

SEQ ID NO: 13953 - protein, 60 aa, Artificial Sequence; identical to SEQ ID NO: 13952
  Synthetic polypeptide

SEQ ID NO: 13954 - protein, 25 aa, Artificial Sequence
  Synthetic polypeptide
SQLLGRLRQENRLNLGGRAGVLCGH

SEQ ID NO: 13955 - protein, 25 aa, Artificial Sequence
  Synthetic polypeptide
SQLLGRLRQENRLNLGGRAGVLCGH

SEQ ID NO: 13956 - protein, 100 aa, Artificial Sequence
  Synthetic polypeptide
TWEAELVFSVDIDSELVEELPAEIELWLVLVAVGAGLLLLGLIILLLWKCDFFKRTRYYQIMPKYHAVRIREEERYPPPGSTLPTKKHWVTSWQTRDQYY

SEQ ID NO: 13957 - protein, 12 aa, Artificial Sequence
  Synthetic polypeptide
AKIAPLHSSLGH

SEQ ID NO: 13958 - protein, 12 aa, Artificial Sequence
  Synthetic polypeptide
AKIAPLHSSLGH

SEQ ID NO: 13959 - protein, 810 aa, Artificial Sequence
  Synthetic polypeptide
LLGRLRHENCSNARGRGCSEPRSHHCTPAWGINLSGGQRQRVSLARAVYSDADIFLLDDPLSAVDSHVAKHIFDHVIGPEGVLAGKTRVLVTHGISFLPQTDFIIVLADGQVSEMGPYPALLQRNGSFANFLCNYAPDEDQGHLEDSWTALEGAEDKEALLIEDTLSNHTDLTDNDPVTYVVQKQFMRQLSALSSDGEGQGRPVPRRHLGPSEKVQVTEAKADGALTQEEKAAIGTVELSVFWDYAKAVGLCTTLAICLLYVGQSAAAIGANVWLSAWTNDAMADSRQNNTSLRLGVYAALGILQGFLVMLAAMAMAAGGIQAARVLHQALLHNKIRSPQSFFDTTPSGRILNCFSKDIYVVDEVLAPVILMLLNSFFNAISTLVVIMASTPLFTVVILPLAVLYTLVQRFYAATSRQLKRLESVSRSPIYSHFSETVTGASVIRAYNRSRDFEIISDTKVDANQRSCYPYIISNRWLSIGVEFVGNCVVLFAALFAVIGRSSLNPGLVGLSVSYSLQVTFALNWMIRMMSDLESNIVAVERVKEYSKTETEAPWVVEGSRPPEGWPPRGEVEFRNYSVRYRPGLDLVLRDLSLHVHGGEKVGIVGRTGAGKSSMTLCLFRILEAAKGEIRIDGLNVADIGLHDLRSQLTIIPQDPILFSGTLRMNLDPFGSYSEEDIWWALELSHLHTFVSSQPAGLDFQCSEGGENLSVGQRQLVCLARALLRKSRILVLDEATAAIDLETDNLIQATIRTQFDTCTVLTIAHRLNTIMDYTRVLVLDKGVVAEFDSPANLIAARGIFYGMARDAGLA

SEQ ID NO: 13960 - protein, 85 aa, Artificial Sequence
  Synthetic polypeptide
GMRIAQTREAEVAVSQDRTTALQPGALTCLGASGSGSVWLELFTVMPIFSCWMTHCPRWTLMWPSTSLTTSSGQKACWQARRECW

SEQ ID NO: 13961 - protein, 85 aa, Artificial Sequence; identical to SEQ ID NO: 13960
  Synthetic polypeptide

SEQ ID NO: 13962 - protein, 521 aa, Artificial Sequence
  Synthetic polypeptide
LLGRLRHENCSNARGRGCSEPRSHHCTPAWGINLSGGQRQRVSLARAVYSDADIFLLDDPLSAVDSHVAKHIFDHVIGPEGVLAGKTRVLVTHGISFLPQTDFIIVLADGQVSEMGPYPALLQRNGSFANFLCNYAPDEDQGHLEDSWTALEGAEDKEALLIEDTLSNHTDLTDNDPVTYVVQKQFMRQLSALSSDGEGQGRPVPRRHLGPSEKVQVTEAKADGALTQEEKAAIGTVELSVFWDYAKAVGLCTTLAICLLYVGQSAAAIGANVWLSAWTNDAMADSRQNNTSLRLGVYAALGILQGFLVMLAAMAMAAGGIQAARVLHQALLHNKIRSPQSFFDTTPSGRILNCFSKDIYVVDEVLAPVILMLLNSFFNAISTLVVIMASTPLFTVVILPLAVLYTLVQRFYAATSRQLKRLESVSRSPIYSHFSETVTGASVIRAYNRSRDFEIISDTKVDANQRSCYPYIISNRSEAASLAPCSSRNSQQALWCSGSLSLLSPKQKTGPALPLPHFLLI

SEQ ID NO: 13963 - protein, 295 aa, Artificial Sequence
  Synthetic polypeptide
NTHQQIEELGSEGKVEEAQGMMKLVEQLKEERELLRSTTSTIESFAAQEKQMEVCEVCGAFLIVGDAQSRVDDHLMGKQHMGYAKIKATVEELKEKLRKRTEEPDRDERLKKEKQEREEREKEREREREERERKRRREEEEREKERARDRERRKRSRSRSRHSSRTSDRRCSRSRDHKRSRSRERRRSRSRDRRRSRSHDRSERKHRSRSRDRRRSKSRDRKSYKHRSKSRDREQDRKSKEKEKRGSDDKKSSVKSGSREKQSEDTNTESKESDTKNEVNGTSEDIKSEGDTQSN

SEQ ID NO: 13964 - protein, 295 aa, Artificial Sequence; identical to SEQ ID NO: 13963
  Synthetic polypeptide

SEQ ID NO: 13965 - protein, 57 aa, Artificial Sequence
  Synthetic polypeptide
KCTICHSTPKYLSKRNENICLHKDLHSSVHECYIHNGTKKIKPRLESIKIPISRLKN

SEQ ID NO: 13966 - protein, 57 aa, Artificial Sequence; identical to SEQ ID NO: 13965
  Synthetic polypeptide

SEQ ID NO: 13967 - protein, 57 aa, Artificial Sequence; identical to SEQ ID NO: 13965
  Synthetic polypeptide

SEQ ID NO: 13968 - protein, 57 aa, Artificial Sequence; identical to SEQ ID NO: 13965
  Synthetic polypeptide

SEQ ID NO: 13969 - protein, 13 aa, Artificial Sequence
  Synthetic polypeptide
NPDWNQLKYPSAD

SEQ ID NO: 13970 - protein, 13 aa, Artificial Sequence
  Synthetic polypeptide
NPDWNQLKYPSAD

SEQ ID NO: 13971 - protein, 13 aa, Artificial Sequence
  Synthetic polypeptide
NPDWNQLKYPSAD

SEQ ID NO: 13972 - protein, 13 aa, Artificial Sequence
  Synthetic polypeptide
NPDWNQLKYPSAD

SEQ ID NO: 13973 - protein, 352 aa, Artificial Sequence
  Synthetic polypeptide
NTHQQIEELGSEGKVEEAQGMMKLVEQLKEERELLRSTTSTIESFAAQEKQMEVCEVCGAFLIVGDAQSRVDDHLMGKQHMGYAKIKATVEELKEKLRKRTEEPDRDERLKKEKQEREEREKEREREREERERKRRREEEEREKERARDRERRKRSRSRSRHSSRTSDRRCSRSRDHKRSRSRERRRSRSRDRRRSRSHDRSERKHRSRSRDRRRSKSRDRKSYKHRSKSRDREQDRKSKEKEKRGSDDKKSSVKSGSREKQSEDTNTESKESDTKNEVNGTSEDIKSEVQRKYAQMKMELSRVRRHTKASSEGKDSVVLQNILRYIVLSQLFCSRLVPPLVCLFGNYRPHL

SEQ ID NO: 13974 - protein, 295 aa, Artificial Sequence
  Synthetic polypeptide
NTHQQIEELGSEGKVEEAQGMMKLVEQLKEERELLRSTTSTIESFAAQEKQMEVCEVCGAFLIVGDAQSRVDDHLMGKQHMGYAKIKATVEELKEKLRKRTEEPDRDERLKKEKQEREEREKEREREREERERKRRREEEEREKERARDRERRKRSRSRSRHSSRTSDRRCSRSRDHKRSRSRERRRSRSRDRRRSRSHDRSERKHRSRSRDRRRSKSRDRKSYKHRSKSRDREQDRKSKEKEKRGSDDKKSSVKSGSREKQSEDTNTESKESDTKNEVNGTSEDIKSEGLFVTV

SEQ ID NO: 13975 - protein, 9 aa, Artificial Sequence
  Synthetic polypeptide
QISVECFLA

SEQ ID NO: 13976 - protein, 40 aa, Artificial Sequence
  Synthetic polypeptide
PNRSQWSAFWPEDGRRECQRRPASCVISPSSSFTLITHHT

SEQ ID NO: 13977 - protein, 738 aa, Artificial Sequence
  Synthetic polypeptide
QKFLQNVRVEVDHSLTDLSGVLSGLKTEEGSVRGALPAVSSPPAPVSPSSPTTHNGELEPSFSPNTESQIGPEEAMERLQETEKIIAELNETWEEKLRKTEALRMEREALLAEMGVAVREDGGTVGVFSPKKTPHLVNLNEDPLMSECLLYHIKDGVTRVGQVDMDIKLTGQFIREQHCLFRSIPQPDGEVVVTLEPCEGAETYVNGKLVTEPLVLKSGNRIVMGKNHVFRFNHPEQARLERERGVPPPPGPPSEPVDWNFAQKELLEQQGIDIKLEMEKRLQDLENQYRKEKEEADLLLEQQRLYADSDSGDDSDKRSCEESWRLISSLREQLPPTTVQTIVKRCGLPSSGKRRAPRRVYQIPQRRRLQGKDPRWATMADLKMQAVKEICYEVALADFRHGRAEIEALAALKMRELCRTYGKPDGPGDAWRAVARDVWDTVGEEEGGGAGSGGGSEEGARGAEVEDLRAHIDKLTGILQEVKLQNSSKDRELQALRDRMLRMERVIPLAQDHEDENEEGGEVPWAPPEGSEAAEEAAPSDRMPSARPPSPPLSSWERVSRLMEEDPAFRRGRLRWLKQEQLRLQGLQGSGGRGGGLRRPPARFVPPHDCKLRFPFKSNPQHRESWPGMGSGEAPTPLQPPEEVTPHPATPARRPPSPRRSHHPRRNSLDGGGRSRGAGSAQPEPQHFQPKKHNSYPQPPQPYPAQRPPGPRYPPYTTPPRMRRQRSAPDLKESGAAV

SEQ ID NO: 13978 - protein, 366 aa, Artificial Sequence
  Synthetic polypeptide
HGETPSLQKIQKLARPGDESEEDEDDLLQRTGNFISTSTSLPRGILKMKNCQHANAERPTVARISSVQFHPGAQIVMVAGLDNAVSLFQVDGKTNPKIQSIYLERFPIFKACFSANGEEVLATSTHSKVLYVYDMLAGKLIPVHQVRGLKEKIVRSFEVSPDGSFLLINGIAGYLHLLAMKTKELIGSMKINGRVAASTFSSDSKKVYASSGDGEVYVWDVNSRKCLNRFVDEGSLYGLSIATSRNGQYVACGSNCGVVNIYNQDSCLQETNPKPIKAIMNLVTGVTSLTFNPTTEILAIASEKMKEAVRLVHLPSCTVFSNFPVIKNKNISHVHTMDFSPRSGYFALGNEKGKALMYRLHHYSDF

SEQ ID NO: 13979 - protein, 32 aa, Artificial Sequence
  Synthetic polypeptide
PGLVMKVKRMKMICCKGLGISYPHQLLFQEES

SEQ ID NO: 13980 - protein, 12 aa, Artificial Sequence
  Synthetic polypeptide
LLPLLVHRDKRR

SEQ ID NO: 13981 - protein, 12 aa, Artificial Sequence
  Synthetic polypeptide
LLPLLVHRDKRR

SEQ ID NO: 13982 - protein, 12 aa, Artificial Sequence
  Synthetic polypeptide
LLPLLVHRDKRR

SEQ ID NO: 13983 - protein, 64 aa, Artificial Sequence
  Synthetic polypeptide
KATYAPRWPPSPWQWKRTAELHRTRLEIVPPPTQRQSIFDFFLYWYTGTREDDDDGTKGRGTVL

SEQ ID NO: 13984 - protein, 64 aa, Artificial Sequence; identical to SEQ ID NO: 13983
  Synthetic polypeptide

SEQ ID NO: 13985 - protein, 64 aa, Artificial Sequence; identical to SEQ ID NO: 13983
  Synthetic polypeptide

SEQ ID NO: 13986 - protein, 412 aa, Artificial Sequence
  Synthetic polypeptide
KSFLHPPRDKAYLTSSSTGTQGQEKMMMMGPKEEEQSCEYETRLPGNHSTSQEIFRQRFRHLRYQETPGPREALSQLRVLCCEWLRPEKHTKEQILEFLVLEQFLTILPEELQSWVRGHHPKSGEEAVTVLEDLEKGLEPEPQVPGPAHGPAQEEPWEKKESLGAAQEALSIQLQPKETQPFPKSVVTEDGPEPKDKGSLPQPPITEVESQVFSEKLATDTSTFEATSEGTLELQQRNPKAERLRWSPAQEESFRQMVVIHKEIPTGKKDHECSECGKTFIYNSHLVVHQRVHSGEKPYKCSDCGKTFKQSSNLGQHQRIHTGEKPFECNECGKAFRWGAHLVQHQRIHSGEKPYECNECGKAFSQSSYLSQHRRIHSGEKPFICKECGKAYGWCSELIRHRRVHARKEPSH

SEQ ID NO: 13987 - protein, 421 aa, Artificial Sequence
  Synthetic polypeptide
KSFLHPPRDKAYLTSSSTGTQGQEKMMMMGPKEEEQSCEYETRLPGNHSTSQEIFRQRFRHLRYQETPGPREALSQLRVLCCEWLRPEKHTKEQILEFLVLEQFLTILPEELQSWVRGHHPKSGEEAVTVLEDLEKGLEPEPQVPGPAHGPAQEEPWEKKESLGAAQEALSIQLQPKETQPFPKSEQVYLHFLSVVTEDGPEPKDKGSLPQPPITEVESQVFSEKLATDTSTFEATSEGTLELQQRNPKAERLRWSPAQEESFRQMVVIHKEIPTGKKDHECSECGKTFIYNSHLVVHQRVHSGEKPYKCSDCGKTFKQSSNLGQHQRIHTGEKPFECNECGKAFRWGAHLVQHQRIHSGEKPYECNECGKAFSQSSYLSQHRRIHSGEKPFICKECGKAYGWCSELIRHRRVHARKEPSH

SEQ ID NO: 13988 - protein, 196 aa, Artificial Sequence
  Synthetic polypeptide
KSFLHPPRDKAYLTSSSTGTQGQEKMMMMGPKEEEQSCEYETRLPGNHSTSQEIFRQRFRHLRYQETPGPREALSQLRVLCCEWLRPEKHTKEQILEFLVLEQFLTILPEELQSWVRGHHPKSGEEAVTVLEDLEKGLEPEPQVGRGIWSVMGARLMTFRLDRGAAVGGGAKFKPLLGQVEQLVCVSVSVFSALEP

SEQ ID NO: 13989 - protein, 27 aa, Artificial Sequence
  Synthetic polypeptide
LVVDFGNTCTTCSPWSIALRSSSWSTG

SEQ ID NO: 13990 - protein, 27 aa, Artificial Sequence
  Synthetic polypeptide
LVVDFGNTCTTCSPWSIALRSSSWSTG

SEQ ID NO: 13991 - protein, 27 aa, Artificial Sequence
  Synthetic polypeptide
LVVDFGNTCTTCSPWSIALRSSSWSTG

SEQ ID NO: 13992 - protein, 17 aa, Artificial Sequence
  Synthetic polypeptide
LWTLGIHAPPARPGASR

SEQ ID NO: 13993 - protein, 17 aa, Artificial Sequence
  Synthetic polypeptide
LWTLGIHAPPARPGASR

SEQ ID NO: 13994 - protein, 17 aa, Artificial Sequence
  Synthetic polypeptide
LWTLGIHAPPARPGASR

SEQ ID NO: 13995 - protein, 51 aa, Artificial Sequence
  Synthetic polypeptide
PVHILPLTSCGLWEYMHHLLALEHRAEEQFLEHWLNPHCKPHCDRNRIHPV

SEQ ID NO: 13996 - protein, 51 aa, Artificial Sequence; identical to SEQ ID NO: 13995
  Synthetic polypeptide

SEQ ID NO: 13997 - protein, 51 aa, Artificial Sequence; identical to SEQ ID NO: 13995
  Synthetic polypeptide

SEQ ID NO: 13998 - protein, 36 aa, Artificial Sequence
  Synthetic polypeptide
LWGQTGFESPCLLTGNTCTTCSPWSIALRSSSWSTG

SEQ ID NO: 13999 - protein, 36 aa, Artificial Sequence; identical to SEQ ID NO: 13998
  Synthetic polypeptide

SEQ ID NO: 14000 - protein, 36 aa, Artificial Sequence; identical to SEQ ID NO: 13998
  Synthetic polypeptide

SEQ ID NO: 14001 - protein, 14 aa, Artificial Sequence
  Synthetic polypeptide
LGIHAPPARPGASR

SEQ ID NO: 14002 - protein, 14 aa, Artificial Sequence
  Synthetic polypeptide
LGIHAPPARPGASR

SEQ ID NO: 14003 - protein, 14 aa, Artificial Sequence
  Synthetic polypeptide
LGIHAPPARPGASR

SEQ ID NO: 14004 - protein, 45 aa, Artificial Sequence
  Synthetic polypeptide
ISLFTNWEYMHHLLALEHRAEEQFLEHWLNPHCKPHCDRNRIHPV

SEQ ID NO: 14005 - protein, 45 aa, Artificial Sequence; identical to SEQ ID NO: 14004
  Synthetic polypeptide

SEQ ID NO: 14006 - protein, 45 aa, Artificial Sequence; identical to SEQ ID NO: 14004
  Synthetic polypeptide

SEQ ID NO: 14007 - protein, 725 aa, Artificial Sequence
  Synthetic polypeptide
KQGFLSPLFKAVSLRMAPKYTYSLGMSHPLYLCNASDDDNLEPGFISIVKLESPRRAPRPCLSLASKARMAGERGASAVLFDITEDRAAAEQLQQPLGLTWPVVLIWGNDAEKLMEFVYKNQKAHVRIELKEPPAWPDYDVWILMTVVGTIFVIILASVLRIRCRPRHSRPDPLQQRTAWAISQLATRRYQASCRQARGEWPDSGSSCSSAPVCAICLEEFSEGQELRVISCLHEFHRNCVDPWLHQHRTCPLCMFNITEGDSFSQSLGPSRSYQEPGRRLHLIRQHPGHAHYHLPAAYLLGPSRSAVARPPRPGPFLPSQEPGMGPRHHRFPRAAHPRAPGEQQRLAGAQHPYAQGWGLSHLQSTSQHPAACPVPLRRARPPDSSGSGESYCTERSGYLADGPASDSSSGPCHGSSSDSVVNCTDISLQGVHGSSSTFCSSLSSDFDPLVYCSPKGDPQRVDMQPSVTSRPRSLDSVVPTGETQVSSHVHYHRHRHHHYKKRFQWHGRKPGPETGVPQSRPPIPRTQPQPEPPSPDQQVTRSNSAAPSGRLSNPQCPRALPEPAPGPVDASSICPSTSSLFNLQKSSLSARHPQRKRRGGPSEPTPGSRPQDATVHPACQIFPHYTPSVAYPWSPEAHPLICGPPGLDKRLLPETPGPCYSNSQPVWLCLTPRQPLEPHPPGEGPSEWSSDTAEGRPCPYPHCQVLSAQPGSEEELEELCEQAV

SEQ ID NO: 14008 - protein, 725 aa, Artificial Sequence; identical to SEQ ID NO: 14007
  Synthetic polypeptide

SEQ ID NO: 14009 - protein, 725 aa, Artificial Sequence; identical to SEQ ID NO: 14007
  Synthetic polypeptide

SEQ ID NO: 14010 - protein, 84 aa, Artificial Sequence
  Synthetic polypeptide
EWHLSILTPWACPTRCTCAMPVMTTIWSLDSSASSSWRVLDGPPAPACHWLARLGWRVSEEPVLSSLTSLRIELLLSSCSSRWG

SEQ ID NO: 14011 - protein, 84 aa, Artificial Sequence; identical to SEQ ID NO: 14010
  Synthetic polypeptide

SEQ ID NO: 14012 - protein, 84 aa, Artificial Sequence; identical to SEQ ID NO: 14010
  Synthetic polypeptide

SEQ ID NO: 14013 - protein, 17 aa, Artificial Sequence
  Synthetic polypeptide
VYLLLGHVPPAVPVQCQ

SEQ ID NO: 14014 - protein, 17 aa, Artificial Sequence
  Synthetic polypeptide
VYLLLGHVPPAVPVQCQ

SEQ ID NO: 14015 - protein, 17 aa, Artificial Sequence
  Synthetic polypeptide
VYLLLGHVPPAVPVQCQ

SEQ ID NO: 14016 - protein, 389 aa, Artificial Sequence
  Synthetic polypeptide
RAVVRISEFLAIGGMYSSRGWEGRGAFRHLDDKEYVGFATLPNQVHRKSVKKGFDFTLMVAGESGLGKSTLVNSLFLTDLYRDRKLLGAEERIMQTVEITKHAVDIEEKGVRLRLTIVDTPGFGDAVNNTECWKPVAEYIDQQFEQYFRDESGLNRKNIQDNRVHCCLYFISPFGHGLRPLDVEFMKALHQRVNIVPILAKADTLTPPEVDHKKRKIREEIEHFGIKIYQFPDCDSDEDEDFKLQDQALKESIPFAVIGSNTVVEARGRRVRGRLYPWGIVEVENPGHCDFVKLRTMLVRTHMQDLKDVTRETHYENYRAQCIQSMTRLVVKERNRNKLTRESGTDFPIPAVPPGTDPETEKLIREKDEELRRMQEMLHKIQKQMKENY

SEQ ID NO: 14017 - protein, 389 aa, Artificial Sequence; identical to SEQ ID NO: 14016
  Synthetic polypeptide

SEQ ID NO: 14018 - protein, 389 aa, Artificial Sequence; identical to SEQ ID NO: 14016
  Synthetic polypeptide

SEQ ID NO: 14019 - protein, 389 aa, Artificial Sequence; identical to SEQ ID NO: 14016
  Synthetic polypeptide

SEQ ID NO: 14020 - protein, 389 aa, Artificial Sequence; identical to SEQ ID NO: 14016
  Synthetic polypeptide

SEQ ID NO: 14021 - protein, 389 aa, Artificial Sequence; identical to SEQ ID NO: 14016
  Synthetic polypeptide

SEQ ID NO: 14022 - protein, 56 aa, Artificial Sequence
  Synthetic polypeptide
LGSPKVEGQLLESVNFWPSEVCIRAEAGKAGEPSDIWMTRSMWALQPSPTKSTESP

SEQ ID NO: 14023 - protein, 56 aa, Artificial Sequence; identical to SEQ ID NO: 14022
  Synthetic polypeptide

SEQ ID NO: 14024 - protein, 56 aa, Artificial Sequence; identical to SEQ ID NO: 14022
  Synthetic polypeptide

SEQ ID NO: 14025 - protein, 56 aa, Artificial Sequence; identical to SEQ ID NO: 14022
  Synthetic polypeptide

SEQ ID NO: 14026 - protein, 56 aa, Artificial Sequence; identical to SEQ ID NO: 14022
  Synthetic polypeptide

SEQ ID NO: 14027 - protein, 56 aa, Artificial Sequence; identical to SEQ ID NO: 14022
  Synthetic polypeptide

SEQ ID NO: 14028 - protein, 56 aa, Artificial Sequence; identical to SEQ ID NO: 14022
  Synthetic polypeptide

SEQ ID NO: 14029 - protein, 56 aa, Artificial Sequence; identical to SEQ ID NO: 14022
  Synthetic polypeptide

SEQ ID NO: 14030 - protein, 56 aa, Artificial Sequence; identical to SEQ ID NO: 14022
  Synthetic polypeptide

SEQ ID NO: 14031 - protein, 56 aa, Artificial Sequence; identical to SEQ ID NO: 14022
  Synthetic polypeptide

SEQ ID NO: 14032 - protein, 56 aa, Artificial Sequence; identical to SEQ ID NO: 14022
  Synthetic polypeptide

SEQ ID NO: 14033 - protein, 56 aa, Artificial Sequence; identical to SEQ ID NO: 14022
  Synthetic polypeptide

SEQ ID NO: 14034 - protein, 56 aa, Artificial Sequence; identical to SEQ ID NO: 14022
  Synthetic polypeptide

SEQ ID NO: 14035 - protein, 23 aa, Artificial Sequence
  Synthetic polypeptide
IFGHRRYVFEQRLGRQGSLQTSG

SEQ ID NO: 14036 - protein, 23 aa, Artificial Sequence
  Synthetic polypeptide
IFGHRRYVFEQRLGRQGSLQTSG

SEQ ID NO: 14037 - protein, 23 aa, Artificial Sequence
  Synthetic polypeptide
IFGHRRYVFEQRLGRQGSLQTSG

SEQ ID NO: 14038 - protein, 23 aa, Artificial Sequence
  Synthetic polypeptide
IFGHRRYVFEQRLGRQGSLQTSG

SEQ ID NO: 14039 - protein, 23 aa, Artificial Sequence
  Synthetic polypeptide
IFGHRRYVFEQRLGRQGSLQTSG

SEQ ID NO: 14040 - protein, 23 aa, Artificial Sequence
  Synthetic polypeptide
IFGHRRYVFEQRLGRQGSLQTSG

SEQ ID NO: 14041 - protein, 23 aa, Artificial Sequence
  Synthetic polypeptide
IFGHRRYVFEQRLGRQGSLQTSG

SEQ ID NO: 14042 - protein, 23 aa, Artificial Sequence
  Synthetic polypeptide
IFGHRRYVFEQRLGRQGSLQTSG

SEQ ID NO: 14043 - protein, 23 aa, Artificial Sequence
  Synthetic polypeptide
IFGHRRYVFEQRLGRQGSLQTSG

SEQ ID NO: 14044 - protein, 23 aa, Artificial Sequence
  Synthetic polypeptide
IFGHRRYVFEQRLGRQGSLQTSG

SEQ ID NO: 14045 - protein, 23 aa, Artificial Sequence
  Synthetic polypeptide
IFGHRRYVFEQRLGRQGSLQTSG

SEQ ID NO: 14046 - protein, 23 aa, Artificial Sequence
  Synthetic polypeptide
IFGHRRYVFEQRLGRQGSLQTSG

SEQ ID NO: 14047 - protein, 23 aa, Artificial Sequence
  Synthetic polypeptide
IFGHRRYVFEQRLGRQGSLQTSG

SEQ ID NO: 14048 - protein, 204 aa, Artificial Sequence
  Synthetic polypeptide
RAVVRISEFLAIGGMYSSRGWEGRGAFRHLDDKEYVGFATLPNQVHRKSVKKGFDFTLMVAGESGLGKSTLVNSLFLTDLYRDRKLLGAEERIMQTVEITKHAVDIEEKGVRLRLTIVDTPGFGDAVNNTECWKPVAEYIDQQFEQYFRDESGLNRKNIQDNRVHCCLYFISPFGHGYGPSLRLLAPPGAVKGTGQEHQGQGCH

SEQ ID NO: 14049 - protein, 204 aa, Artificial Sequence; identical to SEQ ID NO: 14048
  Synthetic polypeptide

SEQ ID NO: 14050 - protein, 342 aa, Artificial Sequence
  Synthetic polypeptide
RAVVRISEFLAIGGMYSSRGWEGRGAFRHLDDKEYVGFATLPNQVHRKSVKKGFDFTLMVAGESGLGKSTLVNSLFLTDLYRDRKLLGAEERIMQTVEITKHAVDIEEKGVRLRLTIVDTPGFGDAVNNTECWKPVAEYIDQQFEQYFRDESGLNRKNIQDNRVHCCLYFISPFGHGLRPLDVEFMKALHQRVNIVPILAKADTLTPPEVDHKKRKIREEIEHFGIKIYQFPDCDSDEDEDFKLQDQALKESIPFAVIGSNTVVEARGRRVRGRLYPWGIVEVENPGHCDFVKLRTMLVRTHMQDLKDVTRETHYENYRAQCIQSMTRLVVKERNRKDRSRN

SEQ ID NO: 14051 - protein, 212 aa, Artificial Sequence
  Synthetic polypeptide
RAVVRISEFLAIGGMYSSRGWEGRGAFRHLDDKEYVGFATLPNQVHRKSVKKGFDFTLMVAGESGLGKSTLVNSLFLTDLYRDRKLLGAEERIMQTVEITKHAVDIEEKGVRLRLTIVDTPGFGDAVNNTECWKPVAEYIDQQFEQYFRDESGLNRKNIQDNRVHCCLYFISPFGHGLRPLDVEFMKALHQRVNIVPILAKADTLTPPEVDH

SEQ ID NO: 14052 - protein, 50 aa, Artificial Sequence
  Synthetic polypeptide
RAVVRISEFLAIGGMYSSRGWEGRGAFRHLDDKEYVGFATLPNQVHRKSV

SEQ ID NO: 14053 - protein, 50 aa, Artificial Sequence; identical to SEQ ID NO: 14052
  Synthetic polypeptide

SEQ ID NO: 14054 - protein, 131 aa, Artificial Sequence
  Synthetic polypeptide
RAVVRISEFLAIGGMYSSRGWEGRGAFRHLDDKEYVGFATLPNQVHRKSVKKGFDFTLMVAGESGLGKSTLVNSLFLTDLYRDRKLLGAEERIMQTVEITKHAVDIEEKGVRLRLTIVDTPGFGDAVNNTE

SEQ ID NO: 14055 - protein, 488 aa, Artificial Sequence
  Synthetic polypeptide
RAVVRISEFLAIGGMYSSRGWEGRGAFRHLIKRFLEDTTDDGELSKFVKDFSGNASCHPPEAKTWASRPQVPEPRPQAPDLYDDDLEFRPPSRPQSSDNQQYFCAPAPLSPSARPRSPWGKLDPYDSSEDDKEYVGFATLPNQVHRKSVKKGFDFTLMVAGESGLGKSTLVNSLFLTDLYRDRKLLGAEERIMQTVEITKHAVDIEEKGVRLRLTIVDTPGFGDAVNNTECWKPVAEYIDQQFEQYFRDESGLNRKNIQDNRVHCCLYFISPFGHGLRPLDVEFMKALHQRVNIVPILAKADTLTPPEVDHKKRKIREEIEHFGIKIYQFPDCDSDEDEDFKLQDQALKESIPFAVIGSNTVVEARGRRVRGRLYPWGIVEVENPGHCDFVKLRTMLVRTHMQDLKDVTRETHYENYRAQCIQSMTRLVVKERNRNKLTRESGTDFPIPAVPPGTDPETEKLIREKDEELRRMQEMLHKIQKQMKENY

SEQ ID NO: 14056 - protein, 488 aa, Artificial Sequence; identical to SEQ ID NO: 14055
  Synthetic polypeptide

SEQ ID NO: 14057 - protein, 488 aa, Artificial Sequence; identical to SEQ ID NO: 14055
  Synthetic polypeptide

SEQ ID NO: 14058 - protein, 488 aa, Artificial Sequence; identical to SEQ ID NO: 14055
  Synthetic polypeptide

SEQ ID NO: 14059 - protein, 488 aa, Artificial Sequence; identical to SEQ ID NO: 14055
  Synthetic polypeptide

SEQ ID NO: 14060 - protein, 32 aa, Artificial Sequence
  Synthetic polypeptide
IFGHRRYVFEQRLGRQGSLQTSDQAFPGGHHG

SEQ ID NO: 14061 - protein, 32 aa, Artificial Sequence; identical to SEQ ID NO: 14060
  Synthetic polypeptide

SEQ ID NO: 14062 - protein, 32 aa, Artificial Sequence; identical to SEQ ID NO: 14060
  Synthetic polypeptide

SEQ ID NO: 14063 - protein, 32 aa, Artificial Sequence; identical to SEQ ID NO: 14060
  Synthetic polypeptide

SEQ ID NO: 14064 - protein, 32 aa, Artificial Sequence; identical to SEQ ID NO: 14060
  Synthetic polypeptide

SEQ ID NO: 14065 - protein, 32 aa, Artificial Sequence; identical to SEQ ID NO: 14060
  Synthetic polypeptide

SEQ ID NO: 14066 - protein, 32 aa, Artificial Sequence; identical to SEQ ID NO: 14060
  Synthetic polypeptide

SEQ ID NO: 14067 - protein, 32 aa, Artificial Sequence; identical to SEQ ID NO: 14060
  Synthetic polypeptide

SEQ ID NO: 14068 - protein, 32 aa, Artificial Sequence; identical to SEQ ID NO: 14060
  Synthetic polypeptide

SEQ ID NO: 14069 - protein, 32 aa, Artificial Sequence; identical to SEQ ID NO: 14060
  Synthetic polypeptide

SEQ ID NO: 14070 - protein, 303 aa, Artificial Sequence
  Synthetic polypeptide
RAVVRISEFLAIGGMYSSRGWEGRGAFRHLIKRFLEDTTDDGELSKFVKDFSGNASCHPPEAKTWASRPQVPEPRPQAPDLYDDDLEFRPPSRPQSSDNQQYFCAPAPLSPSARPRSPWGKLDPYDSSEDDKEYVGFATLPNQVHRKSVKKGFDFTLMVAGESGLGKSTLVNSLFLTDLYRDRKLLGAEERIMQTVEITKHAVDIEEKGVRLRLTIVDTPGFGDAVNNTECWKPVAEYIDQQFEQYFRDESGLNRKNIQDNRVHCCLYFISPFGHGYGPSLRLLAPPGAVKGTGQEHQGQGCH

SEQ ID NO: 14071 - protein, 65 aa, Artificial Sequence
  Synthetic polypeptide
RAVVRISEFLAIGGMYSSRGWEGRGAFRHLIKRFLEDTTDDGELSKMTRSMWALQPSPTKSTESP

SEQ ID NO: 14072 - protein, 65 aa, Artificial Sequence; identical to SEQ ID NO: 14071
  Synthetic polypeptide

SEQ ID NO: 14073 - protein, 230 aa, Artificial Sequence
  Synthetic polypeptide
RAVVRISEFLAIGGMYSSRGWEGRGAFRHLIKRFLEDTTDDGELSKFVKDFSGNASCHPPEAKTWASRPQVPEPRPQAPDLYDDDLEFRPPSRPQSSDNQQYFCAPAPLSPSARPRSPWGKLDPYDSSEDDKEYVGFATLPNQVHRKSVKKGFDFTLMVAGESGLGKSTLVNSLFLTDLYRDRKLLGAEERIMQTVEITKHAVDIEEKGVRLRLTIVDTPGFGDAVNNTE

SEQ ID NO: 14074 - protein, 101 aa, Artificial Sequence
  Synthetic polypeptide
RAVVRISEFLAIGGMYSSRGWEGRGAFRHLIKRFLEDTTDDGELSKFVKDFSGNASCHPPEAKTWASRPQVPEPRPQAPDLYDDDLEFRPPSRPQSSDNQQ

SEQ ID NO: 14075 - protein, 1633 aa, Artificial Sequence
  Synthetic polypeptide
NKLRILTELQNLGINPANIGFSTLTMESDKFICIREKVGEQAQVVIIDMNDPSNPIRRPISADSAIMNPASKVIALKAGKTLQIFNIEMKSKMKAHTMTDDVTFWKWISLNTVALVTDNAVYHWSMEGESQPVKMFDRHSSLAGCQIINYRTDAKQKWLLLTGISAQQNRVVGAMQLYSVDRKVSQPIEGHAASFAQFKMEGNAEESTLFCFAVRGQAGGKLHIIEVGTPPTGNQPFPKKAVDVFFPPEAQNDFPVAMQISEKHDVVFLITKYGYIHLYDLETGTCIYMNRISGETIFVTAPHEATAGIIGVNRKGQVLSVCVEEENIIPYITNVLQNPDLALRMAVRNNLAGAEELFARKFNALFAQGNYSEAAKVAANAPKGILRTPDTIRRFQSVPAQPGQTSPLLQYFGILLDQGQLNKYESLELCRPVLQQGRKQLLEKWLKEDKLECSEELGDLVKSVDPTLALSVYLRANVPNKVIQCFAETGQVQKIVLYAKKVGYTPDWIFLLRNVMRISPDQGQQFAQMLVQDEEPLADITQIVDVFMEYNLIQQCTAFLLDALKNNRPSEGPLQTRLLEMNLMHAPQVADAILGNQMFTHYDRAHIAQLCEKAGLLQRALEHFTDLYDIKRAVVHTHLLNPEWLVNYFGSLSVEDSLECLRAMLSANIRQNLQICVQVASKYHEQLSTQSLIELFESFKSFEGLFYFLGSIVNFSQDPDVHFKYIQAACKTGQIKEVERICRESNCYDPERVKNFLKEAKLTDQLPLIIVCDRFDFVHDLVLYLYRNNLQKYIEIYVQKVNPSRLPVVIGGLLDVDCSEDVIKNLILVVRGQFSTDELVAEVEKRNRLKLLLPWLEARIHEGCEEPATHNALAKIYIDSNNNPERFLRENPYYDSRVVGKYCEKRDPHLACVAYERGQCDLELINVCNENSLFKSLSRYLVRRKDPELWGSVLLESNPYRRPLIDQVVQTALSETQDPEEVSVTVKAFMTADLPNELIELLEKIVLDNSVFSEHRNLQNLLILTAIKADRTRVMEYINRLDNYDAPDIANIAISNELFEEAFAIFRKFDVNTSAVQVLIEHIGNLDRAYEFAERCNEPAVWSQLAKAQLQKGMVKEAIDSYIKADDPSSYMEVVQAANTSGNWEELVKYLQMARKKARESYVETELIFALAKTNRLAELEEFINGPNNAHIQQVGDRCYDEKMYDAAKLLYNNVSNFGRLASTLVHLGEYQAAVDGARKANSTRTWKEVCFACVDGKEFRLAQMCGLHIVVHADELEELINYYQDRGYFEELITMLEAALGLERAHMGMFTELAILYSKFKPQKMREHLELFWSRVNIPKVLRAAEQAHLWAELVFLYDKYEEYDNAIITMMNHPTDAWKEGQFKDIITKVANVELYYRAIQFYLEFKPLLLNDLLMVLSPRLDHTRAVNYFSKVKQLPLVKPYLRSVQNHNNKSVNESLNNLFITEEDYQALRTSIDAYDNFDNISLAQRLEKHELIEFRRIAAYLFKGNNRWKQSVELCKKDSLYKDAMQYASESKDTELAEELLQWFLQEEKRECFGACLFTCYDLLRPDVVLETAWRHNIMDFAMPYFIQVMKEYLTKVDKLDASESLRKEEEQATETQPIVYGNLSL

SEQ ID NO: 14076 - protein, 30 aa, Artificial Sequence
  Synthetic polypeptide
VAPFACRINSGFLLSSRTWVSTQQTLASVP

SEQ ID NO: 14077 - protein, 30 aa, Artificial Sequence; identical to SEQ ID NO: 14076
  Synthetic polypeptide

SEQ ID NO: 14078 - protein, 30 aa, Artificial Sequence; identical to SEQ ID NO: 14076
  Synthetic polypeptide

SEQ ID NO: 14079 - protein, 30 aa, Artificial Sequence; identical to SEQ ID NO: 14076
  Synthetic polypeptide

SEQ ID NO: 14080 - protein, 30 aa, Artificial Sequence; identical to SEQ ID NO: 14076
  Synthetic polypeptide

SEQ ID NO: 14081 - protein, 1669 aa, Artificial Sequence
  Synthetic polypeptide
NKLRILTELQNLGINPANIGFSTLTMESDKFICIREKVGEQAQVVIIDMNDPSNPIRRPISADSAIMNPASKVIALKAGKTLQIFNIEMKSKMKAHTMTDDVTFWKWISLNTVALVTDNAVYHWSMEGESQPVKMFDRHSSLAGCQIINYRTDAKQKWLLLTGISAQQNRVVGAMQLYSVDRKVSQPIEGHAASFAQFKMEGNAEESTLFCFAVRGQAGGKLHIIEVGTPPTGNQPFPKKAVDVFFPPEAQNDFPVAMQISEKHDVVFLITKYGYIHLYDLETGTCIYMNRISGETIFVTAPHEATAGIIGVNRKGQVLSVCVEEENIIPYITNVLQNPDLALRMAVRNNLAGAEELFARKFNALFAQGNYSEAAKVAANAPKGILRTPDTIRRFQSVPAQPGQTSPLLQYFGILLDQGQLNKYESLELCRPVLQQGRKQLLEKWLKEDKLECSEELGDLVKSVDPTLALSVYLRANVPNKVIQCFAETGQVQKIVLYAKKVGYTPDWIFLLRNVMRISPDQGQQFAQMLVQDEEPLADITQIVDVFMEYNLIQQCTAFLLDALKNNRPSEGPLQTRLLEMNLMHAPQVADAILGNQMFTHYDRAHIAQLCEKAGLLQRALEHFTDLYDIKRAVVHTHLLNPEWLVNYFGSLSVEDSLECLRAMLSANIRQNLQICVQVASKYHEQLSTQSLIELFESFKSFEGLFYFLGSIVNFSQDPDVHFKYIQAACKTGQIKEVERICRESNCYDPERVKNFLKEAKLTDQLPLIIVCDRFDFVHDLVLYLYRNNLQKYIEIYVQKVNPSRLPVVIGGLLDVDCSEDVIKNLILVVRGQFSTDELVAEVEKRNRLKLLLPWLEARIHEGCEEPATHNALAKIYIDSNNNPERFLRENPYYDSRVVGKYCEKRDPHLACVAYERGQCDLELINVCNENSLFKSLSRYLVRRKDPELWGSVLLESNPYRRPLIDQVVQTALSETQDPEEVSVTVKAFMTADLPNELIELLEKIVLDNSVFSEHRNLQNLLILTAIKADRTRVMEYINRLDNYDAPDIANIAISNELFEEAFAIFRKFDVNTSAVQVLIEHIGNLDRAYEFAERCNEPAVWSQLAKAQLQKGMVKEAIDSYIKADDPSSYMEVVQAANTSGNWEELVKYLQMARKKARESYVETELIFALAKTNRLAELEEFINGPNNAHIQQVGDRCYDEKMYDAAKLLYNNVSNFGRLASTLVHLGEYQAAVDGARKANSTRTWKEVCFACVDGKEFRLAQMCGLHIVVHADELEELINYYQDRGYFEELITMLEAALGLERAHMGMFTELAILYSKFKPQKMREHLELFWSRVNIPKVLRAAEQAHLWAELVFLYDKYEEYDNAIITMMNHPTDAWKEGQFKDIITKVANVELYYRAIQFYLEFKPLLLNDLLMVLSPRLDHTRAVNYFSKVKQLPLVKPYLRSVQNHNNKSVNESLNNLFITEEDYQALRTSIDAYDNFDNISLAQRLEKHELIEFRRIAAYLFKGNNRWKQSVELCKKDSLYKDAMQYASESKDTELAEELLQWFLQEEKRECFGACLFTCYDLLRPDVVLETAWRHNIMDFAMPYFIQVMKEYLTKVDKLDASESLRKEEEQATETQPIVYGQPQLMLTAGPSVAVPPQAPFGYGYTAPPYGQPQPGFGYSM

SEQ ID NO: 14082 - protein, 116 aa, Artificial Sequence
  Synthetic polypeptide
NKLRILTELQNLGINPANIGFSTLTMESDKFICIREKVGEQAQVVIIDMNDPSNPIRRPISADSAIMNPASKVIALKGIKESGKTLQIFNIEMKSKMKAHTMTDDVTFWKWISLNT

SEQ ID NO: 14083 - protein, 606 aa, Artificial Sequence
  Synthetic polypeptide
NKLRILTELQNLGINPANIGFSTLTMESDKFICIREKVGEQAQVVIIDMNDPSNPIRRPISADSAIMNPASKVIALKAGKTLQIFNIEMKSKMKARESYVETELIFALAKTNRLAELEEFINGPNNAHIQQVGDRCYDEKMYDAAKLLYNNVSNFGRLASTLVHLGEYQAAVDGARKANSTRTWKEVCFACVDGKEFRLAQMCGLHIVVHADELEELINYYQDRGYFEELITMLEAALGLERAHMGMFTELAILYSKFKPQKMREHLELFWSRVNIPKVLRAAEQAHLWAELVFLYDKYEEYDNAIITMMNHPTDAWKEGQFKDIITKVANVELYYRAIQFYLEFKPLLLNDLLMVLSPRLDHTRAVNYFSKVKQLPLVKPYLRSVQNHNNKSVNESLNNLFITEEDYQALRTSIDAYDNFDNISLAQRLEKHELIEFRRIAAYLFKGNNRWKQSVELCKKDSLYKDAMQYASESKDTELAEELLQWFLQEEKRECFGACLFTCYDLLRPDVVLETAWRHNIMDFAMPYFIQVMKEYLTKVDKLDASESLRKEEEQATETQPIVYGQPQLMLTAGPSVAVPPQAPFGYGYTAPPYGQPQPGFGYSM

SEQ ID NO: 14084 - protein, 91 aa, Artificial Sequence
  Synthetic polypeptide
NKLRILTELQNLGINPANIGFSTLTMESDKFICIREKVGEQAQVVIIDMNDPSNPIRRPISADSAIMNPASKVIALKAKSCGGSYAAIFCR

SEQ ID NO: 14085 - protein, 35 aa, Artificial Sequence
  Synthetic polypeptide
NHGLCLPGQTGSSKTSTESWIFWNFGLCFNSKSFI

SEQ ID NO: 14086 - protein, 35 aa, Artificial Sequence; identical to SEQ ID NO: 14085
  Synthetic polypeptide

SEQ ID NO: 14087 - protein, 35 aa, Artificial Sequence; identical to SEQ ID NO: 14085
  Synthetic polypeptide

SEQ ID NO: 14088 - protein, 35 aa, Artificial Sequence; identical to SEQ ID NO: 14085
  Synthetic polypeptide

SEQ ID NO: 14089 - protein, 35 aa, Artificial Sequence; identical to SEQ ID NO: 14085
  Synthetic polypeptide

SEQ ID NO: 14090 - protein, 35 aa, Artificial Sequence; identical to SEQ ID NO: 14085
  Synthetic polypeptide

SEQ ID NO: 14091 - protein, 184 aa, Artificial Sequence
  Synthetic polypeptide
YPLYLHTRIEGSNKIMDFASRAKLAVQKLVQKVGFFGILACASIPNPLFDLAGITCGHFLVPFWTFFGATLIGKAIIKMHIQKIFVIITFSKHIVEQMVAFIGAVPGIGPSLQKPFQEYLEAQRQKLHHKSEMGTPQGENWLSWMFEKLVVVMVCYFILSIINSMAQSYAKRIQQRLNSEEKTK

SEQ ID NO: 14092 - protein, 184 aa, Artificial Sequence; identical to SEQ ID NO: 14091
  Synthetic polypeptide

SEQ ID NO: 14093 - protein, 184 aa, Artificial Sequence; identical to SEQ ID NO: 14091
  Synthetic polypeptide

SEQ ID NO: 14094 - protein, 184 aa, Artificial Sequence; identical to SEQ ID NO: 14091
  Synthetic polypeptide

SEQ ID NO: 14095 - protein, 184 aa, Artificial Sequence; identical to SEQ ID NO: 14091
  Synthetic polypeptide

SEQ ID NO: 14096 - protein, 33 aa, Artificial Sequence
  Synthetic polypeptide
IGYNNIHYTYIPESKAQIKSWTLPPGPNWQFKN

SEQ ID NO: 14097 - protein, 33 aa, Artificial Sequence; identical to SEQ ID NO: 14096
  Synthetic polypeptide

SEQ ID NO: 14098 - protein, 33 aa, Artificial Sequence; identical to SEQ ID NO: 14096
  Synthetic polypeptide

SEQ ID NO: 14099 - protein, 33 aa, Artificial Sequence; identical to SEQ ID NO: 14096
  Synthetic polypeptide

SEQ ID NO: 14100 - protein, 33 aa, Artificial Sequence; identical to SEQ ID NO: 14096
  Synthetic polypeptide

SEQ ID NO: 14101 - protein, 33 aa, Artificial Sequence; identical to SEQ ID NO: 14096
  Synthetic polypeptide

SEQ ID NO: 14102 - protein, 33 aa, Artificial Sequence; identical to SEQ ID NO: 14096
  Synthetic polypeptide

SEQ ID NO: 14103 - protein, 15 aa, Artificial Sequence
  Synthetic polypeptide
NHGLCLPGQTGSSKT

SEQ ID NO: 14104 - protein, 29 aa, Artificial Sequence
  Synthetic polypeptide
YPLYLHTRIEGSNKIMDFASRAKLAVQKL

SEQ ID NO: 14105 - protein, 197 aa, Artificial Sequence
  Synthetic polypeptide
YPLYLHTRIEGSNKIMDFASRAKLAVQKLVQKVGFFGILACASIPNPLFDLAGITCGHFLVPFWTFFGATLIGKAIIKMHIQKIFVIITFSKHIVEQMVAFIGLEDNGALQPPPPSAVPGIGPSLQKPFQEYLEAQRQKLHHKSEMGTPQGENWLSWMFEKLVVVMVCYFILSIINSMAQSYAKRIQQRLNSEEKTK

SEQ ID NO: 14106 - protein, 511 aa, Artificial Sequence
  Synthetic polypeptide
RKRSCEKRKARGKVEEKEIRTILNSMHKYQPRFHIVRANDILKLPYSTFRTYVFPETDFIAVTAYQNDKITQLKIDNNPFAKGFRDTGNGRREKRKQLTLPSLRLYEEHCKPERDGAESDASSCDPPPAREPPTSPGAAPSPLRLHRARAEEKSCAADSDPEPERLSEERAGAPLGRSPAPDSASPTRLTEPERARERRSPERGKEPAESGGDGPFGLRSLEKERAEARRKDEGRKEAAEGKEQGLAPLVVQTDSASPLGAGHLPGLAFSSHLHGQQFFGPLGAGQPLFLHPGQFTMGPGAFSAMGMGHLLASVAGGGNGGGGGPGTAAGLDAGGLGPAASAASTAAPFPFHLSQHMLASQGIPMPTFGGLFPYPYTYMAAAAAAASALPATSAAAAAAAAAGSLSRSPFLGSARPRLRFSPYQIPVTIPPSTSLLTTGLASEGSKAAGGNSREPSPLPELALRKVGAPSRGALSPSGSAKEAANELQSIQRLVSGLESQRALSPGRESPK

SEQ ID NO: 14107 - protein, 61 aa, Artificial Sequence
  Synthetic polypeptide
KEKSERKSRRKRNKDHPKLHAQVPAALPHSASQRHPEAALQHLPHLRVPGDRLHRRHCLPE

SEQ ID NO: 14108 - protein, 97 aa, Artificial Sequence
  Synthetic polypeptide
SCFYKRMHMCFRKKRLPQHGGRGRGSHPHSTALLRGLLPAAGPDLGGHDRRVARAVPRRHCLGERPAVQRAPPLHGHRPDLPAGKCPAGLPCLQERS

SEQ ID NO: 14109 - protein, 97 aa, Artificial Sequence; identical to SEQ ID NO: 14108
  Synthetic polypeptide

SEQ ID NO: 14110 - protein, 97 aa, Artificial Sequence; identical to SEQ ID NO: 14108
  Synthetic polypeptide

SEQ ID NO: 14111 - protein, 290 aa, Artificial Sequence
  Synthetic polypeptide
HKHPCVLRPQLKSRLENGINDPASIKGCICVLGRSVCLSMEGGAAAATPTALPYYVAFSQLLGLTLVAMTGAWLGLYRGGIAWESDLQFNAHPLCMVIGLIFLQGNALLVYRVFRNEAKRTTKVLHGLLHIFALVIALVGLVAVFDYHRKKGYADLYSLHSWCGILVFVLYFVQWLVGFSFFLFPGASFSLRSRYRPQHIFFGATIFLLSVGTALLGLKEALLFNLGGKYSAFEPEGVLANVLGLLLACFGGAVLYILTRADWKRPSQAEEQALSMDFKTLTEGDSPGSQ

SEQ ID NO: 14112 - protein, 290 aa, Artificial Sequence; identical to SEQ ID NO: 14111
  Synthetic polypeptide

SEQ ID NO: 14113 - protein, 290 aa, Artificial Sequence; identical to SEQ ID NO: 14111
  Synthetic polypeptide

SEQ ID NO: 14114 - protein, 31 aa, Artificial Sequence
  Synthetic polypeptide
EEAFASAWRAGPRQPPPQHCLTTWPSPSCWA

SEQ ID NO: 14115 - protein, 31 aa, Artificial Sequence; identical to SEQ ID NO: 14114
  Synthetic polypeptide

SEQ ID NO: 14116 - protein, 31 aa, Artificial Sequence; identical to SEQ ID NO: 14114
  Synthetic polypeptide

SEQ ID NO: 14117 - protein, 31 aa, Artificial Sequence; identical to SEQ ID NO: 14114
  Synthetic polypeptide

SEQ ID NO: 14118 - protein, 77 aa, Artificial Sequence
  Synthetic polypeptide
SCFYKRMHMCFRKKRLPQHGGRGRGSHPHSTALLRGLLPAAGPDLGGHDRRVARAVPRRHCLGERPAVQRAPPLHGH

SEQ ID NO: 14119 - protein, 97 aa, Artificial Sequence
  Synthetic polypeptide
HKHPCVLRPQLKSRLENGINDPASIKGCICVLGRSVCLSMEGGAAAATPTALPYYVAFSQLLGLTLVAMTGAWLGLYRGGIAWESDLQFNAHPLCMV

SEQ ID NO: 14120 - protein, 109 aa, Artificial Sequence
  Synthetic polypeptide
GYENDDVGAYPLTQTSMCATPSVKKQRLPQHGGRGRGSHPHSTALLRGLLPAAGPDLGGHDRRVARAVPRRHCLGERPAVQRAPPLHGHRPDLPAGKCPAGLPCLQERS

SEQ ID NO: 14121 - protein, 109 aa, Artificial Sequence; identical to SEQ ID NO: 14120
  Synthetic polypeptide

SEQ ID NO: 14122 - protein, 109 aa, Artificial Sequence; identical to SEQ ID NO: 14120
  Synthetic polypeptide

SEQ ID NO: 14123 - protein, 269 aa, Artificial Sequence
  Synthetic polypeptide
HKHPCVLRPQLKSSVCLSMEGGAAAATPTALPYYVAFSQLLGLTLVAMTGAWLGLYRGGIAWESDLQFNAHPLCMVIGLIFLQGNALLVYRVFRNEAKRTTKVLHGLLHIFALVIALVGLVAVFDYHRKKGYADLYSLHSWCGILVFVLYFVQWLVGFSFFLFPGASFSLRSRYRPQHIFFGATIFLLSVGTALLGLKEALLFNLGGKYSAFEPEGVLANVLGLLLACFGGAVLYILTRADWKRPSQAEEQALSMDFKTLTEGDSPGSQ

SEQ ID NO: 14124 - protein, 269 aa, Artificial Sequence; identical to SEQ ID NO: 14123
  Synthetic polypeptide

SEQ ID NO: 14125 - protein, 269 aa, Artificial Sequence; identical to SEQ ID NO: 14123
  Synthetic polypeptide

SEQ ID NO: 14126 - protein, 31 aa, Artificial Sequence
  Synthetic polypeptide
KAAFASAWRAGPRQPPPQHCLTTWPSPSCWA

SEQ ID NO: 14127 - protein, 31 aa, Artificial Sequence; identical to SEQ ID NO: 14126
  Synthetic polypeptide

SEQ ID NO: 14128 - protein, 31 aa, Artificial Sequence; identical to SEQ ID NO: 14126
  Synthetic polypeptide

SEQ ID NO: 14129 - protein, 31 aa, Artificial Sequence; identical to SEQ ID NO: 14126
  Synthetic polypeptide

SEQ ID NO: 14130 - protein, 89 aa, Artificial Sequence
  Synthetic polypeptide
GYENDDVGAYPLTQTSMCATPSVKKQRLPQHGGRGRGSHPHSTALLRGLLPAAGPDLGGHDRRVARAVPRRHCLGERPAVQRAPPLHGH

SEQ ID NO: 14131 - protein, 76 aa, Artificial Sequence
  Synthetic polypeptide
HKHPCVLRPQLKSSVCLSMEGGAAAATPTALPYYVAFSQLLGLTLVAMTGAWLGLYRGGIAWESDLQFNAHPLCMV

SEQ ID NO: 14132 - protein, 272 aa, Artificial Sequence
  Synthetic polypeptide
PRLAPGLNLYHPYLKIGVCLSMEGGAAAATPTALPYYVAFSQLLGLTLVAMTGAWLGLYRGGIAWESDLQFNAHPLCMVIGLIFLQGNALLVYRVFRNEAKRTTKVLHGLLHIFALVIALVGLVAVFDYHRKKGYADLYSLHSWCGILVFVLYFVQWLVGFSFFLFPGASFSLRSRYRPQHIFFGATIFLLSVGTALLGLKEALLFNLGGKYSAFEPEGVLANVLGLLLACFGGAVLYILTRADWKRPSQAEEQALSMDFKTLTEGDSPGSQ

SEQ ID NO: 14133 - protein, 272 aa, Artificial Sequence; identical to SEQ ID NO: 14132
  Synthetic polypeptide

SEQ ID NO: 14134 - protein, 272 aa, Artificial Sequence; identical to SEQ ID NO: 14132
  Synthetic polypeptide

SEQ ID NO: 14135 - protein, 31 aa, Artificial Sequence
  Synthetic polypeptide
KLAFASAWRAGPRQPPPQHCLTTWPSPSCWA

SEQ ID NO: 14136 - protein, 31 aa, Artificial Sequence; identical to SEQ ID NO: 14135
  Synthetic polypeptide

SEQ ID NO: 14137 - protein, 31 aa, Artificial Sequence; identical to SEQ ID NO: 14135
  Synthetic polypeptide

SEQ ID NO: 14138 - protein, 31 aa, Artificial Sequence; identical to SEQ ID NO: 14135
  Synthetic polypeptide

SEQ ID NO: 14139 - protein, 99 aa, Artificial Sequence
  Synthetic polypeptide
QISSWLELVPPLPENWRLPQHGGRGRGSHPHSTALLRGLLPAAGPDLGGHDRRVARAVPRRHCLGERPAVQRAPPLHGHRPDLPAGKCPAGLPCLQERS

SEQ ID NO: 14140 - protein, 99 aa, Artificial Sequence; identical to SEQ ID NO: 14139
  Synthetic polypeptide

SEQ ID NO: 14141 - protein, 99 aa, Artificial Sequence; identical to SEQ ID NO: 14139
  Synthetic polypeptide

SEQ ID NO: 14142 - protein, 79 aa, Artificial Sequence
  Synthetic polypeptide
PRLAPGLNLYHPYLKIGVCLSMEGGAAAATPTALPYYVAFSQLLGLTLVAMTGAWLGLYRGGIAWESDLQFNAHPLCMV

SEQ ID NO: 14143 - protein, 79 aa, Artificial Sequence
  Synthetic polypeptide
QISSWLELVPPLPENWRLPQHGGRGRGSHPHSTALLRGLLPAAGPDLGGHDRRVARAVPRRHCLGERPAVQRAPPLHGH

SEQ ID NO: 14144 - protein, 349 aa, Artificial Sequence
  Synthetic polypeptide
AVIALLHPSLRDRYNALLSNMSRIYSTAKVCLPNKTATCWSLDPDLTNILASSRSYAMLLFAWEGWHNAAGIPLKPLYEDFTALSNEAYKQDGFTDTGAYWRSWYNSPTFEDDLEHLYQQLEPLYLNLHAFVRRALHRRYGDRYINLRGPIPAHLLGDMWAQSWENIYDMVVPFPDKPNLDVTSTMLQQGWNATHMFRVAEEFFTSLELSPMPPEFWEGSMLEKPADGREVVCHASAWDFYNRKDFRIKQCTRVTMDQLSTVHHEMGHIQYYLQYKDLPVSLRRGANPGFHEAIGDVLALSVSTPEHLHKIGLLDRVTNDTEPSIRGSVLLLPETKPTLMLELSFMFQM

SEQ ID NO: 14145 - protein, 15 aa, Artificial Sequence
  Synthetic polypeptide
LHYCTPACVTDTTPC

SEQ ID NO: 14146 - protein, 15 aa, Artificial Sequence
  Synthetic polypeptide
LHYCTPACVTDTTPC

SEQ ID NO: 14147 - protein, 15 aa, Artificial Sequence
  Synthetic polypeptide
LHYCTPACVTDTTPC

SEQ ID NO: 14148 - protein, 15 aa, Artificial Sequence
  Synthetic polypeptide
LHYCTPACVTDTTPC

SEQ ID NO: 14149 - protein, 74 aa, Artificial Sequence
  Synthetic polypeptide
QIQRPAKQHEQDLLHRQGLPPQQDCHLLVPGPRSHQHPGFLAKLRHAPVCLGGLAQRCGHPAETAVRGFHCPQQ

SEQ ID NO: 14150 - protein, 74 aa, Artificial Sequence; identical to SEQ ID NO: 14149
  Synthetic polypeptide

SEQ ID NO: 14151 - protein, 74 aa, Artificial Sequence; identical to SEQ ID NO: 14149
  Synthetic polypeptide

SEQ ID NO: 14152 - protein, 74 aa, Artificial Sequence; identical to SEQ ID NO: 14149
  Synthetic polypeptide

SEQ ID NO: 14153 - protein, 1180 aa, Artificial Sequence
  Synthetic polypeptide
AVIALLHPSLRDRYNALLSNMSRIYSTAKVCLPNKTATCWSLDPDLTNILASSRSYAMLLFAWEGWHNAAGIPLKPLYEDFTALSNEAYKQDGFTDTGAYWRSWYNSPTFEDDLEHLYQQLEPLYLNLHAFVRRALHRRYGDRYINLRGPIPAHLLGDMWAQSWENIYDMVVPFPDKPNLDVTSTMLQQGWNATHMFRVAEEFFTSLELSPMPPEFWEGSMLEKPADGREVVCHASAWDFYNRKDFRIKQCTRVTMDQLSTVHHEMGHIQYYLQYKDLPVSLRRGANPGFHEAIGDVLALSVSTPEHLHKIGLLDRVTNDTESDINYLLKMALEKIAFLPFGYLVDQWRWGVFSGRTPPSRYNFDWWYLRTKYQGICPPVTRNETHFDAGAKFHVPNVTPYIRYFVSFVLQFQFHEALCKEAGYEGPLHQCDIYRSTKAGAKLRKVLQAGSSRPWQEVLKDMVGLDALDAQPLLKYFQPVTQWLQEQNQQNGEVLGWPEYQWHPPLPDNYPEGIDLVTDEAEASKFVEEYDRTSQVVWNEYAEANWNYNTNITTETSKILLQKNMQIANHTLKYGTQARKFDVNQLQNTTIKRIIKKVQDLERAALPAQELEEYNKILLDMETTYSVATVCHPNGSCLQLEPDLTNVMATSRKYEDLLWAWEGWRDKAGRAILQFYPKYVELINQAARLNGYVDAGDSWRSMYETPSLEQDLERLFQELQPLYLNLHAYVRRALHRHYGAQHINLEGPIPAHLLGNMWAQTWSNIYDLVVPFPSAPSMDTTEAMLKQGWTPRRMFKEADDFFTSLGLLPVPPEFWNKSMLEKPTDGREVVCHASAWDFYNGKDFRIKQCTTVNLEDLVVAHHEMGHIQYFMQYKDLPVALREGANPGFHEAIGDVLALSVSTPKHLHSLNLLSSEGGSDEHDINFLMKMALDKIAFIPFSYLVDQWRWRVFDGSITKENYNQEWWSLRLKYQGLCPPVPRTQGDFDPGAKFHIPSSVPYIRYFVSFIIQFQFHEALCQAAGHTGPLHKCDIYQSKEAGQRLATAMKLGFSRPWPEAMQLITGQPNMSASAMLSYFKPLLDWLRTENELHGEKLGWPQYNWTPNSARSEGPLPDSGRVSFLGLDLDAQQARVGQWLLLFLGIALLVATLGLSQRLFSIRHRSLHRHSHGPQFGSEVELRHS

SEQ ID NO: 14154 - protein, 1019 aa, Artificial Sequence
  Synthetic polypeptide
AVIALLHPSLRDRYNALLSNMSRIYSTAKVCLPNKTATCWSLDPDLTNILASSRSYAMLLFAWEGWHNAAGIPLKPLYEDFTALSNEAYKQDGFTDTGAYWRSWYNSPTFEDDLEHLYQQLEPLYLNLHAFVRRALHRRYGDRYINLRGPIPAHLLGDMWAQSWENIYDMVVPFPDKPNLDVTSTMLQQGWNATHMFRVAEEFFTSLELSPMPPEFWEGSMLEKPADGREVVCHASAWDFYNRKDFRIKQCTRVTMDQLSTVHHEMGHIQYYLQYKDLPVSLRRGANPGFHEAIGDVLALSVSTPEHLHKIGLLDRVTNDTESDINYLLKMALEKIAFLPFGYLVDQWRWGVFSGRTPPSRYNFDWWYLRTKYQGICPPVTRNETHFDAGAKFHVPNVTPYIRYFVSFVLQFQFHEALCKEAGYEGPLHQCDIYRSTKAGAKLRKVLQAGSSRPWQEVLKDMVGLDALDAQPLLKYFQPVTQWLQEQNQQNGEVLGWPEYQWHPPLPDNYPEGIDLVTDEAEASKFVEEYDRTSQVVWNEYAEANWNYNTNITTETSKILLQKNMQIANHTLKYGTQARKFDVNQLQNTTIKRIIKKVQDLERAALPAQELEEYNKILLDMETTYSVATVCHPNGSCLQLEPDLTNVMATSRKYEDLLWAWEGWRDKAGRAILQFYPKYVELINQAARLNGYVDAGDSWRSMYETPSLEQDLERLFQELQPLYLNLHAYVRRALHRHYGAQHINLEGPIPAHLLGNMWAQTWSNIYDLVVPFPSAPSMDTTEAMLKQGWTPRRMFKEADDFFTSLGLLPVPPEFWNKSMLEKPTDGREVVCHASAWDFYNGKDFRIKQCTTVNLEDLVVAHHEMGHIQYFMQYKDLPVALREGANPGFHEAIGDVLALSVSTPKHLHSLNLLSSEGGSDEHDINFLMKMALDKIAFIPFSYLVDQWRWRVFDGSITKENYNQEWWSLRLKYQGLCPPVPRTQGDFDPGAKFHIPSSVPYIRYFVSFIIQFHPFSQHTAA

SEQ ID NO: 14155 - protein, 188 aa, Artificial Sequence
  Synthetic polypeptide
AVIALLHPSLRDRYNALLSNMSRIYSTAKVCLPNKTATCWSLDPDLTNILASSRSYAMLLFAWEGWHNAAGIPLKPLYEDFTALSNEAYKQDGFTDTGAYWRSWYNSPTFEDDLEHLYQQLEPLYLNLHAFVRRALHRRYGDRYINLRGPIPAHLLGDMWAQSWENIYDMVVPFPDKPNLDVTSTMLQ

SEQ ID NO: 14156 - protein, 132 aa, Artificial Sequence
  Synthetic polypeptide
GWAEWLTPIIPALWEAKVLKLHPCLAPIKVALDVGRGPTLELRQVCQGLFNELLENGISVWPGYLETMQSSLEQLYSKYDEMSILFTVLVTETTLENGLIHLRSRDTTMKEMMHISKLKDFLIKYISSAKNV

SEQ ID NO: 14157 - protein, 15 aa, Artificial Sequence
  Synthetic polypeptide
SQHFGKPRYLNFTLV

SEQ ID NO: 14158 - protein, 15 aa, Artificial Sequence
  Synthetic polypeptide
SQHFGKPRYLNFTLV

SEQ ID NO: 14159 - protein, 15 aa, Artificial Sequence
  Synthetic polypeptide
MAHAYNPSTLGSQGT

SEQ ID NO: 14160 - protein, 15 aa, Artificial Sequence
  Synthetic polypeptide
MAHAYNPSTLGSQGT

SEQ ID NO: 14161 - protein, 45 aa, Artificial Sequence
  Synthetic polypeptide
GWAEWLTPIIPALWEAKVLKLHPCLAPIKVALDVGRGPTLELRQV

SEQ ID NO: 14162 - protein, 143 aa, Artificial Sequence
  Synthetic polypeptide
PPNSLCPSLKTHSKGSIKGTASGSITSQRTMTTTTTARSTSSASCEPPASSPSSAPSCSCWVACASVLAGSTAARTTSSSVPASSSWLQASVTSSVSSSTFPATQVTRVTSGTKTKRTITTTAGLFTLELCLSLWLRPWASWL

SEQ ID NO: 14163 - protein, 16 aa, Artificial Sequence
  Synthetic polypeptide
HPTHSVHPSRLTQRDL

SEQ ID NO: 14164 - protein, 267 aa, Artificial Sequence
  Synthetic polypeptide
TQLTLSIPQDSLKGIYKGHCFRINHFPEDNDYDHDSSEYLLRIVRASSVFPILSTILLLLGGLCIGAGRIYSRKNNIVLSAGILFVAAGLSNIIGIIVYISSNTGDPSDKRDEDKKNHYNYGWSFYFGALSFIVAETVGVLAVNIYIEKNKELRFKTKREFLKASSSSPYARMPSYRYRRRRSRSSSRSTEASPSRDVSPMGLKITGAIPMGELSMYTLSREPLKVTTAASYSPDQEASFLQVHDFFQQDLKEGFHVSMLNRRTTPV

SEQ ID NO: 14165 - protein, 19 aa, Artificial Sequence
  Synthetic polypeptide
VEERKPFDHLIRCQEGYTG

SEQ ID NO: 14166 - protein, 19 aa, Artificial Sequence
  Synthetic polypeptide
VEERKPFDHLIRCQEGYTG

SEQ ID NO: 14167 - protein, 19 aa, Artificial Sequence
  Synthetic polypeptide
VEERKPFDHLIRCQEGYTG

SEQ ID NO: 14168 - protein, 19 aa, Artificial Sequence
  Synthetic polypeptide
VEERKPFDHLIRCQEGYTG

SEQ ID NO: 14169 - protein, 19 aa, Artificial Sequence
  Synthetic polypeptide
VEERKPFDHLIRCQEGYTG

SEQ ID NO: 14170 - protein, 22 aa, Artificial Sequence
  Synthetic polypeptide
MKKGNLLIISLDAKKVTPDDIN

SEQ ID NO: 14171 - protein, 22 aa, Artificial Sequence
  Synthetic polypeptide
MKKGNLLIISLDAKKVTPDDIN

SEQ ID NO: 14172 - protein, 22 aa, Artificial Sequence
  Synthetic polypeptide
MKKGNLLIISLDAKKVTPDDIN

SEQ ID NO: 14173 - protein, 22 aa, Artificial Sequence
  Synthetic polypeptide
MKKGNLLIISLDAKKVTPDDIN

SEQ ID NO: 14174 - protein, 22 aa, Artificial Sequence
  Synthetic polypeptide
MKKGNLLIISLDAKKVTPDDIN

SEQ ID NO: 14175 - protein, 1550 aa, Artificial Sequence
  Synthetic polypeptide
MPRRLHRMTSIEREEKEKVKKKEKKQEEEETMQQATWVKYTFPVKHQVWKQKGEEYRVTGYGGWSWISKTHVYRFVPKLPGNTNVNYRKSLEGTKNNMDENMDESDKRKCSRSPKKIKIEPDSEKDEVKGSDAAKGADQNEMDISKITEKKDQDVKELLDSDSDKPCKEEPMEVDDDMKTESHVNCQESSQVDVVNVSEGFHLRTSYKKKTKSSKLDGLLERRIKQFTLEEKQRLEKIKLEGGIKGIGKTSTNSSKNLSESPVITKAKEGCQSDSMRQEQSPNANNDQPEDLIQGCSESDSSVLRMSDPSHTTNKLYPKDRVLDDVSIRSPETKCPKQNSIENDIEEKVSDLASRGQEPSKSKTKGNDFFIDDSKLASADDIGTLICKNKKPLIQEESDTIVSSSKSALHSSVPKSTNDRDATPLSRAMDFEGKLGCDSESNSTLENSSDTVSIQDSSEEDMIVQNSNESISEQFRTREQDVEVLEPLKCELVSGESTGNCEDRLPVKGTEANGKKPSQQKKLEERPVNKCSDQIKLKNTTDKKNNENRESEKKGQRTSTFQINGKDNKPKIYLKGECLKEISESRVVSGNVEPKVNNINKIIPENDIKSLTVKESAIRPFINGDVIMEDFNERNSSETKSHLLSSSDAEGNYRDSLETLPSTKESDSTQTTTPSASCPESNSVNQVEDMEIETSEVKKVTSSPITSEEESNLSNDFIDENGLPINKNENVNGESKRKTVITEVTTMTSTVATESKTVIKVEKGDKQTVVSSTENCAKSTVTTTTTTVTKLSTPSTGGSVDIISVKEQSKTVVTTTVTDSLTTTGGTLVTSMTVSKEYSTRDKVKLMKFSRPKKTRSGTALPSYRKFVTKSSKKSIFVLPNDDLKKLARKGGIREVPYFNYNAKPALDIWPYPSPRPTFGITWRYRLQTVKSLAGVSLMLRLLWASLRWDDMAAKAPPGGGTTRTETSETEITTTEIIKRRDVGPYGIRSEYCIRKIICPIGVPETPKETPTPQRKGLRSSALRPKRPETPKQTGPVIIETWVAEEELELWEIRAFAERVEKEKAQAVEQQAKKRLEQQKPTVIATSTTSPTSSTTSTISPAQKVMVAPISGSVTTGTKMVLTTKVGSPATVTFQQNKNFHQTFATWVKQGQSNSGVVQVQQKVLGIIPSSTGTSQQTFTSFQPRTATVTIRPNTSGSGGTTSNSQVITGPQIRPGMTVIRTPLQQSTLGKAIIRTPVMVQPGAPQQVMTQIIRGQPVSTAVSAPNTVSSTPGQKSLTSATSTSNIQSSASQPPRPQQGQVKLTMAQLTQLTQGHGGNQGLTVVIQGQGQTTGQLQLIPQGVTVLPGPGQQLMQAAMPNGTVQRFLFTPLATTATTASTTTTTVSTTAAGTGEQRQSKLSPQMQVHQDKTLPPAQSSSVGPAEAQPQTAQPSAQPQPQTQPQSPAQPEVQTQPEVQTQTTVSSHVPSEAQPTHAQSSKPQVAAQSQPQSNVQGQSPVRVQSPSQTRIRPSTPSQLSPGQQSQVQTTTSQPIPIQPHTSLQIPSQGQPQSQ

SEQ ID NO: 14176 - protein, 2076 aa, Artificial Sequence
  Synthetic polypeptide
MPRRLHRMTSIEREEKEKVKKKEKKQEEEETMQQATWVKYTFPVKHQVWKQKGEEYRVTGYGGWSWISKTHVYRFVPKLPGNTNVNYRKSLEGTKNNMDENMDESDKRKCSRSPKKIKIEPDSEKDEVKGSDAAKGADQNEMDISKITEKKDQDVKELLDSDSDKPCKEEPMEVDDDMKTESHVNCQESSQVDVVNVSEGFHLRTSYKKKTKSSKLDGLLERRIKQFTLEEKQRLEKIKLEGGIKGIGKTSTNSSKNLSESPVITKAKEGCQSDSMRQEQSPNANNDQPEDLIQGCSESDSSVLRMSDPSHTTNKLYPKDRVLDDVSIRSPETKCPKQNSIENDIEEKVSDLASRGQEPSKSKTKGNDFFIDDSKLASADDIGTLICKNKKPLIQEESDTIVSSSKSALHSSVPKSTNDRDATPLSRAMDFEGKLGCDSESNSTLENSSDTVSIQDSSEEDMIVQNSNESISEQFRTREQDVEVLEPLKCELVSGESTGNCEDRLPVKGTEANGKKPSQQKKLEERPVNKCSDQIKLKNTTDKKNNENRESEKKGQRTSTFQINGKDNKPKIYLKGECLKEISESRVVSGNVEPKVNNINKIIPENDIKSLTVKESAIRPFINGDVIMEDFNERNSSETKSHLLSSSDAEGNYRDSLETLPSTKESDSTQTTTPSASCPESNSVNQVEDMEIETSEVKKVTSSPITSEEESNLSNDFIDENGLPINKNENVNGESKRKTVITEVTTMTSTVATESKTVIKVEKGDKQTVVSSTENCAKSTVTTTTTTVTKLSTPSTGGSVDIISVKEQSKTVVTTTVTDSLTTTGGTLVTSMTVSKEYSTRDKVKLMKFSRPKKTRSGTALPSYRKFVTKSSKKSIFVLPNDDLKKLARKGGIREVPYFNYNAKPALDIWPYPSPRPTFGITWRYRLQTVKSLAGVSLMLRLLWASLRWDDMAAKAPPGGGTTRTETSETEITTTEIIKRRDVGPYGIRSEYCIRKIICPIGVPETPKETPTPQRKGLRSSALRPKRPETPKQTGPVIIETWVAEEELELWEIRAFAERVEKEKAQAVEQQAKKRLEQQKPTVIATSTTSPTSSTTSTISPAQKVMVAPISGSVTTGTKMVLTTKVGSPATVTFQQNKNFHQTFATWVKQGQSNSGVVQVQQKVLGIIPSSTGTSQQTFTSFQPRTATVTIRPNTSGSGGTTSNSQVITGPQIRPGMTVIRTPLQQSTLGKAIIRTPVMVQPGAPQQVMTQIIRGQPVSTAVSAPNTVSSTPGQKSLTSATSTSNIQSSASQPPRPQQGQVKLTMAQLTQLTQGHGGNQGLTVVIQGQGQTTGQLQLIPQGVTVLPGPGQQLMQAAMPNGTVQRFLFTPLATTATTASTTTTTVSTTAAGTGEQRQSKLSPQMQVHQDKTLPPAQSSSVGPAEAQPQTAQPSAQPQPQTQPQSPAQPEVQTQPEVQTQTTVSSHVPSEAQPTHAQSSKPQVAAQSQPQSNVQGQSPVRVQSPSQTRIRPSTPSQLSPGQQSQVQTTTSQPIPIQPHTSLQIPSQGQPQSQPQVQSSTQTLSSGQTLNQVTVSSPSRPQLQIQQPQPQVIAVPQLQQQVQVLSQIQSQVVAQIQAQQSGVPQQIKLQLPIQIQQSSAVQTHQIQNVVTVQAASVQEQLQRVQQLRDQQQKKKQQQIEIKREHTLQASNQSEIIQKQVVMKHNAVIEHLKQKKSMTPAEREENQRMIVCNQVMKYILDKIDKEEKQAAKKRKREESVEQKRSKQNATKLSALLFKHKEQLRAEILKKRALLDKDLQIEVQEELKRDLKIKKEKDLMQLAQATAVAAPCPPVTPAPPAPPAPPPSPPPPPAVQHTGLLSTPTLPAASQKRKREEEKDSSSKSKKKKMISTTSKETKKDTKLYCICKTPYDESKFYIGCDRCQNWYHGRCVGILQSEAELIDEYVCPQCQSTEDAMTVLTPLTEKDYEGLKRVLRSLQAHKMAWPFLEPVDPNDAPDYYGVIKEPMDLATMEERVQRRYYEKLTEFVADMTKIFDNCRYYNPSDSPFYQCAEVLESFFVQKLKGFKASRSHNNKLQSTAS

SEQ ID NO: 14177 - protein, 2076 aa, Artificial Sequence; identical to SEQ ID NO: 14176
  Synthetic polypeptide

SEQ ID NO: 14178 - protein, 1933 aa, Artificial Sequence
  Synthetic polypeptide
MPRRLHRMTSIEREEKEKVKKKEKKQEEEETMQQATWVKYTFPVKHQVWKQKGEEYRVTGYGGWSWISKTHVYRFVPKLPGNTNVNYRKSLEGTKNNMDENMDESDKRKCSRSPKKIKIEPDSEKDEVKGSDAAKGADQNEMDISKITEKKDQDVKELLDSDSDKPCKEEPMEVDDDMKTESHVNCQESSQVDVVNVSEGFHLRTSYKKKTKSSKLDGLLERRIKQFTLEEKQRLEKIKLEGGIKGIGKTSTNSSKNLSESPVITKAKEGCQSDSMRQEQSPNANNDQPEDLIQGCSESDSSVLRMSDPSHTTNKLYPKDRVLDDVSIRSPETKCPKQNSIENDIEEKVSDLASRGQEPSKSKTKGNDFFIDDSKLASADDIGTLICKNKKPLIQEESDTIVSSSKSALHSSVPKSTNDRDATPLSRAMDFEGKLGCDSESNSTLENSSDTVSIQDSSEEDMIVQNSNESISEQFRTREQDVEVLEPLKCELVSGESTGNCEDRLPVKGTEANGKKPSQQKKLEERPVNKCSDQIKLKNTTDKKNNENRESEKKGQRTSTFQINGKDNKPKIYLKGECLKEISESRVVSGNVEPKVNNINKIIPENDIKSLTVKESAIRPFINGDVIMEDFNERNSSETKSHLLSSSDAEGNYRDSLETLPSTKESDSTQTTTPSASCPESNSVNQVEDMEIETSEVKKVTSSPITSEEESNLSNDFIDENGLPINKNENVNGESKRKTVITEVTTMTSTVATESKTVIKVEKGDKQTVVSSTENCAKSTVTTTTTTVTKLSTPSTGGSVDIISVKEQSKTVVTTTVTDSLTTTGGTLVTSMTVSKEYSTRDKVKLMKFSRPKKTRSGTALPSYRKFVTKSSKKSIFVLPNDDLKKLARKGGIREVPYFNYNAKPALDIWPYPSPRPTFGITWRYRLQTVKSLAGVSLMLRLLWASLRWDDMAAKAPPGGGTTRTETSETEITTTEIIKRRDVGPYGIRSEYCIRKIICPIGVPETPKETPTPQRKGLRSSALRPKRPETPKQTGPVIIETWVAEEELELWEIRAFAERVEKEKAQAVEQQAKKRLEQQKPTVIATSTTSPTSSTTSTISPAQKVMVAPISGSVTTGTKMVLTTKVGSPATVTFQQNKNFHQTFATWVKQGQSNSGVVQVQQKVLGIIPSSTGTSQQTFTSFQPRTATVTIRPNTSGSGGTTSNSQVITGPQIRPGMTVIRTPLQQSTLGKAIIRTPVMVQPGAPQQVMTQIIRGQPVSTAVSAPNTVSSTPGQKSLTSATSTSNIQSSASQPPRPQQGQVKLTMAQLTQLTQGHGGNQGLTVVIQGQGQTTGQLQLIPQGVTVLPGPGQQLMQAAMPNGTVQRFLFTPLATTATTASTTTTTVSTTAAGTGEQRQSKLSPQMQVHQDKTLPPAQSSSVGPAEAQPQTAQPSAQPQPQTQPQSPAQPEVQTQPEVQTQTTVSSHVPSEAQPTHAQSSKPQVAAQSQPQSNVQGQSPVRVQSPSQTRIRPSTPSQLSPGQQSQVQTTTSQPIPIQPHTSLQIPSQGQPQSQPQVVMKHNAVIEHLKQKKSMTPAEREENQRMIVCNQVMKYILDKIDKEEKQAAKKRKREESVEQKRSKQNATKLSALLFKHKEQLRAEILKKRALLDKDLQIEVQEELKRDLKIKKEKDLMQLAQATAVAAPCPPVTPAPPAPPAPPPSPPPPPAVQHTGLLSTPTLPAASQKRKREEEKDSSSKSKKKKMISTTSKETKKDTKLYCICKTPYDESKFYIGCDRCQNWYHGRCVGILQSEAELIDEYVCPQCQSTEDAMTVLTPLTEKDYEGLKRVLRSLQAHKMAWPFLEPVDPNDAPDYYGVIKEPMDLATMEERVQRRYYEKLTEFVADMTKIFDNCRYYNPSDSPFYQCAEVLESFFVQKLKGFKASRSHNNKLQSTAS

SEQ ID NO: 14179 - protein, 1933 aa, Artificial Sequence; identical to SEQ ID NO: 14178
  Synthetic polypeptide

SEQ ID NO: 14180 - protein, 35 aa, Artificial Sequence
  Synthetic polypeptide
ARRSGAARGVRGVAPVGVAWRSAKGRGPDMSVLVS

SEQ ID NO: 14181 - protein, 23 aa, Artificial Sequence
  Synthetic polypeptide
GAWRQWAWRGAVRRDAAQTCPSL

SEQ ID NO: 14182 - protein, 238 aa, Artificial Sequence
  Synthetic polypeptide
ATQRRGAWRKGRGASGRGVAQCEGTRPRHVRPCKLKASMGAFLPNQDWITSHPEAPQDFEQFFSDPYRKTPSPNKRSIYIQSIGSLGNTRIISEEYIKWLTGYCKAYFYGLRVKLLEPVPVSVTRCSFRVNENTHNLQIHAGDILKFLKKKKPEDAFCVVGITMIDLYPRDSWNFVFGQASLTDGVGIFSFARYGSDFYSMHYKGKVKKLKKTSSSDYSIFDNYYIPEITSVLLLRSC

SEQ ID NO: 14183 - protein, 59 aa, Artificial Sequence
  Synthetic polypeptide
THKEFGHWNRDPEFPRGPGCQPSLARGRLLHLESFLVWAAERHGGAPGRGLWCLCRGAG

SEQ ID NO: 14184 - protein, 59 aa, Artificial Sequence; identical to SEQ ID NO: 14183
  Synthetic polypeptide

SEQ ID NO: 14185 - protein, 125 aa, Artificial Sequence
  Synthetic polypeptide
RYTSKNMKLRRHTRNLAIGIGIQNFPEGLAVSLPLRGAGFSTWRAFWYGQLSGMVEPLAGVFGAFAVVLAEPILPYALAFAAGAMVYVVMDDIIPEAQISGNGKLASWASILGFVVMMSLDVGLG

SEQ ID NO: 14186 - protein, 125 aa, Artificial Sequence; identical to SEQ ID NO: 14185
  Synthetic polypeptide

SEQ ID NO: 14187 - protein, 43 aa, Artificial Sequence
  Synthetic polypeptide
NYVDTQGIWPLESGSRISPRAWLSAFPCEGQASPPGELSGMGS

SEQ ID NO: 14188 - protein, 43 aa, Artificial Sequence; identical to SEQ ID NO: 14187
  Synthetic polypeptide

SEQ ID NO: 14189 - protein, 43 aa, Artificial Sequence; identical to SEQ ID NO: 14187
  Synthetic polypeptide

SEQ ID NO: 14190 - protein, 49 aa, Artificial Sequence
  Synthetic polypeptide
THKEFGHWNRDPEFPRGPGCQPSLARGRLLHLESFLVWAAERHGGAPGR

SEQ ID NO: 14191 - protein, 59 aa, Artificial Sequence
  Synthetic polypeptide
RYTSKNMKLRRHTRNLAIGIGIQNFPEGLAVSLPLRGAGFSTWRAFWYGQLSGMVEPLA

SEQ ID NO: 14192 - protein, 40 aa, Artificial Sequence
  Synthetic polypeptide
PQKGIWPLESGSRISPRAWLSAFPCEGQASPPGELSGMGS

SEQ ID NO: 14193 - protein, 40 aa, Artificial Sequence; identical to SEQ ID NO: 14192
  Synthetic polypeptide

SEQ ID NO: 14194 - protein, 40 aa, Artificial Sequence; identical to SEQ ID NO: 14192
  Synthetic polypeptide

SEQ ID NO: 14195 - protein, 59 aa, Artificial Sequence
  Synthetic polypeptide
PRKEFGHWNRDPEFPRGPGCQPSLARGRLLHLESFLVWAAERHGGAPGRGLWCLCRGAG

SEQ ID NO: 14196 - protein, 59 aa, Artificial Sequence; identical to SEQ ID NO: 14195
  Synthetic polypeptide

SEQ ID NO: 14197 - protein, 114 aa, Artificial Sequence
  Synthetic polypeptide
PERNLAIGIGIQNFPEGLAVSLPLRGAGFSTWRAFWYGQLSGMVEPLAGVFGAFAVVLAEPILPYALAFAAGAMVYVVMDDIIPEAQISGNGKLASWASILGFVVMMSLDVGLG

SEQ ID NO: 14198 - protein, 114 aa, Artificial Sequence; identical to SEQ ID NO: 14197
  Synthetic polypeptide

SEQ ID NO: 14199 - protein, 49 aa, Artificial Sequence
  Synthetic polypeptide
PRKEFGHWNRDPEFPRGPGCQPSLARGRLLHLESFLVWAAERHGGAPGR

SEQ ID NO: 14200 - protein, 48 aa, Artificial Sequence
  Synthetic polypeptide
PERNLAIGIGIQNFPEGLAVSLPLRGAGFSTWRAFWYGQLSGMVEPLA

SEQ ID NO: 14201 - protein, 5 aa, Artificial Sequence
  Synthetic polypeptide
PQKGS

SEQ ID NO: 14202 - protein, 13 aa, Artificial Sequence
  Synthetic polypeptide
PRKGLELGFLPWT

SEQ ID NO: 14203 - protein, 17 aa, Artificial Sequence
  Synthetic polypeptide
PERVLNLVSCPGLNLPS

SEQ ID NO: 14204 - protein, 234 aa, Artificial Sequence
  Synthetic polypeptide
RPPMCCWTSHVPDLVNLSLNDNDGSSGASDQDTLAPLPGATPWPLLPTFSYQYPAPHPYSPQPPPYHELSSYTYGGGSASSQHSEGSRSSGSTRSDGGAGRTGRPEERAPESKSGSGSESEPSSRGGSLRRGGEASGTSDGGPPPSRGSTGGAPNLRAHPGLHPYGPPPGMALPYNPMMVVMMPPPPPPVPPAVQPPGAPPVRDLGSVPPELTASRQSFHMAMGNPSEFFVDVM

SEQ ID NO: 14205 - protein, 234 aa, Artificial Sequence; identical to SEQ ID NO: 14204
  Synthetic polypeptide

SEQ ID NO: 14206 - protein, 23 aa, Artificial Sequence
  Synthetic polypeptide
VLHWPRMGADVHPCAAGQAMCQT

SEQ ID NO: 14207 - protein, 23 aa, Artificial Sequence
  Synthetic polypeptide
VLHWPRMGADVHPCAAGQAMCQT

SEQ ID NO: 14208 - protein, 23 aa, Artificial Sequence
  Synthetic polypeptide
VLHWPRMGADVHPCAAGQAMCQT

SEQ ID NO: 14209 - protein, 43 aa, Artificial Sequence
  Synthetic polypeptide
GPPWMVEQCVSRTRSCTGRGWGLTSTHVLLDKPCARPSQPVSQ

SEQ ID NO: 14210 - protein, 43 aa, Artificial Sequence; identical to SEQ ID NO: 14209
  Synthetic polypeptide

SEQ ID NO: 14211 - protein, 43 aa, Artificial Sequence; identical to SEQ ID NO: 14209
  Synthetic polypeptide

SEQ ID NO: 14212 - protein, 144 aa, Artificial Sequence
  Synthetic polypeptide
RPPMCCWTSHVPDLVNLSLNDNDGSSGASDQDTLAPLPGATPWPLLPTFSYQYPAPHPYSPQPPPYHELSSYTYGGGSASSQHSEGSRSSGSTRSDGGAGRTGRPEERAPESKSGSGSESEPSSRGGSLRRGGEASGTSDGGPP

SEQ ID NO: 14213 - protein, 47 aa, Artificial Sequence
  Synthetic polypeptide
SSVPSSVRQLQPGLRHHPQAQHLPPAGQPAHGPAHHSQGPAAAPADT

SEQ ID NO: 14214 - protein, 106 aa, Artificial Sequence
  Synthetic polypeptide
QALPLVSPVTRARHLTSLILSSLICKATPTWSTPSSASAASSTSWPTCPRTRPPFTRPCSGAGGHLSPCLAPAPRRAPPWRAPAPLPLQSQAPSRPVWWLLQALTS

SEQ ID NO: 14215 - protein, 38 aa, Artificial Sequence
  Synthetic polypeptide
LGVVAHASSLSYPRGHLSVQGQGCHAVLHDAILSHERL

SEQ ID NO: 14216 - protein, 38 aa, Artificial Sequence; identical to SEQ ID NO: 14215
  Synthetic polypeptide

SEQ ID NO: 14217 - protein, 38 aa, Artificial Sequence; identical to SEQ ID NO: 14215
  Synthetic polypeptide

SEQ ID NO: 14218 - protein, 38 aa, Artificial Sequence; identical to SEQ ID NO: 14215
  Synthetic polypeptide

SEQ ID NO: 14219 - protein, 38 aa, Artificial Sequence; identical to SEQ ID NO: 14215
  Synthetic polypeptide

SEQ ID NO: 14220 - protein, 38 aa, Artificial Sequence; identical to SEQ ID NO: 14215
  Synthetic polypeptide

SEQ ID NO: 14221 - protein, 38 aa, Artificial Sequence; identical to SEQ ID NO: 14215
  Synthetic polypeptide

SEQ ID NO: 14222 - protein, 38 aa, Artificial Sequence; identical to SEQ ID NO: 14215
  Synthetic polypeptide

SEQ ID NO: 14223 - protein, 263 aa, Artificial Sequence
  Synthetic polypeptide
VRRLMPVIPALWEAKVGRPLELRSSRPAWATWQNPISTKNTKISWVWWHMPLVSATREVIFLSKGKDAMQSFMMPFYLMKDCEIKQPVFGANYIKGTVKAEAGGGWEGSASYKLTFTAGGAIEFGQRMLQVASQASRGEVPSGAYGYSYMPSGAYVYPPPVANGMYPCPPGYPYPPPPPEFYPGPPMMDGAMGYVQPPPPPYPGPMEPPVSGPDVPSTPAAEAKAAEAAASAYYNPGNPHNVYMPTSQPPPPPYYPPEDKKTQ

SEQ ID NO: 14224 - protein, 263 aa, Artificial Sequence; identical to SEQ ID NO: 14223
  Synthetic polypeptide

SEQ ID NO: 14225 - protein, 263 aa, Artificial Sequence; identical to SEQ ID NO: 14223
  Synthetic polypeptide

SEQ ID NO: 14226 - protein, 263 aa, Artificial Sequence; identical to SEQ ID NO: 14223
  Synthetic polypeptide

SEQ ID NO: 14227 - protein, 20 aa, Artificial Sequence
  Synthetic polypeptide
SQLPERSSFCPRARMPCSPS

SEQ ID NO: 14228 - protein, 20 aa, Artificial Sequence
  Synthetic polypeptide
SQLPERSSFCPRARMPCSPS

SEQ ID NO: 14229 - protein, 20 aa, Artificial Sequence
  Synthetic polypeptide
SQLPERSSFCPRARMPCSPS

SEQ ID NO: 14230 - protein, 20 aa, Artificial Sequence
  Synthetic polypeptide
SQLPERSSFCPRARMPCSPS

SEQ ID NO: 14231 - protein, 20 aa, Artificial Sequence
  Synthetic polypeptide
SQLPERSSFCPRARMPCSPS

SEQ ID NO: 14232 - protein, 20 aa, Artificial Sequence
  Synthetic polypeptide
SQLPERSSFCPRARMPCSPS

SEQ ID NO: 14233 - protein, 20 aa, Artificial Sequence
  Synthetic polypeptide
SQLPERSSFCPRARMPCSPS

SEQ ID NO: 14234 - protein, 20 aa, Artificial Sequence
  Synthetic polypeptide
SQLPERSSFCPRARMPCSPS

SEQ ID NO: 14235 - protein, 233 aa, Artificial Sequence
  Synthetic polypeptide
VRRLMPVIPALWEAKVGRPLELRSSRPAWATWQNPISTKNTKISWVWWHMPLVSATREVIFLSKGKDAMQSFMMPFYLMKDCEIKQPVFGANYIKGTVKAEAGGGWEGSASYKLTFTAGGAIEFGQRMLQVASQASRGEVPSGAYGYSYMPSGAYVYPPPVANGMYPCPPGYPYPPPPPEFYPGPPMMDGAMGYVQPPPPPYPGPMEPPVSGPDVPSTPAEPAAATSLLPTGR

SEQ ID NO: 14236 - protein, 259 aa, Artificial Sequence
  Synthetic polypeptide
VRRLMPVIPALWEAKVGRPLELRSSRPAWATWQNPISTKNTKISWVWWHMPLVSATREVIFLSKGKDAMQSFMMPFYLMKDCEIKQPVFGANYIKGTVKAEAGGGWEGSASYKLTFTAGGAIEFGQRMLQVASQASRGEVPSGAYGYSYMPSGAYVYPPPVANGMYPCPPGYPYPPPPPGPPMMDGAMGYVQPPPPPYPGPMEPPVSGPDVPSTPAAEAKAAEAAASAYYNPGNPHNVYMPTSQPPPPPYYPPEDKKTQ

SEQ ID NO: 14237 - protein, 218 aa, Artificial Sequence
  Synthetic polypeptide
VRRLMPVIPALWEAKVGRPLELRSSRPAWATWQNPISTKNTKISWVWWHMPLVSATREVIFLSKGKDAMQSFMMPFYLMKDCEIKQPVFGANYIKGTVKAEAGGGWEGSASYKLTFTAGGAIEFGQRMLQVASQEFYPGPPMMDGAMGYVQPPPPPYPGPMEPPVSGPDVPSTPAAEAKAAEAAASAYYNPGNPHNVYMPTSQPPPPPYYPPEDKKTQ

SEQ ID NO: 14238 - protein, 191 aa, Artificial Sequence
  Synthetic polypeptide
VRRLMPVIPALWEAKVGRPLELRSSRPAWATWQNPISTKNTKISWVWWHMPLVSATREVIFLSKGKDAMQSFMMPFYLMKDCEIKQPVFGANYIKGTVKAEAGGGWEGSASYKLTFTAGGAIEFGQRMLQVASQASRGEVPSGAYGYSYMPSGAYVYPPPVANGMYPCPPGYPYPPPPPEFYPGPPMMDGA

SEQ ID NO: 14239 - protein, 39 aa, Artificial Sequence
  Synthetic polypeptide
GAEAHACNPSTLGGQGHLSVQGQGCHAVLHDAILSHERL

SEQ ID NO: 14240 - protein, 39 aa, Artificial Sequence; identical to SEQ ID NO: 14239
  Synthetic polypeptide

SEQ ID NO: 14241 - protein, 39 aa, Artificial Sequence; identical to SEQ ID NO: 14239
  Synthetic polypeptide

SEQ ID NO: 14242 - protein, 39 aa, Artificial Sequence; identical to SEQ ID NO: 14239
  Synthetic polypeptide

SEQ ID NO: 14243 - protein, 39 aa, Artificial Sequence; identical to SEQ ID NO: 14239
  Synthetic polypeptide

SEQ ID NO: 14244 - protein, 39 aa, Artificial Sequence; identical to SEQ ID NO: 14239
  Synthetic polypeptide

SEQ ID NO: 14245 - protein, 39 aa, Artificial Sequence; identical to SEQ ID NO: 14239
  Synthetic polypeptide

SEQ ID NO: 14246 - protein, 39 aa, Artificial Sequence; identical to SEQ ID NO: 14239
  Synthetic polypeptide

SEQ ID NO: 14247 - protein, 220 aa, Artificial Sequence
  Synthetic polypeptide
VRRLMPVIPALWEAKVIFLSKGKDAMQSFMMPFYLMKDCEIKQPVFGANYIKGTVKAEAGGGWEGSASYKLTFTAGGAIEFGQRMLQVASQASRGEVPSGAYGYSYMPSGAYVYPPPVANGMYPCPPGYPYPPPPPEFYPGPPMMDGAMGYVQPPPPPYPGPMEPPVSGPDVPSTPAAEAKAAEAAASAYYNPGNPHNVYMPTSQPPPPPYYPPEDKKTQ

SEQ ID NO: 14248 - protein, 220 aa, Artificial Sequence; identical to SEQ ID NO: 14247
  Synthetic polypeptide

SEQ ID NO: 14249 - protein, 220 aa, Artificial Sequence; identical to SEQ ID NO: 14247
  Synthetic polypeptide

SEQ ID NO: 14250 - protein, 220 aa, Artificial Sequence; identical to SEQ ID NO: 14247
  Synthetic polypeptide

SEQ ID NO: 14251 - protein, 22 aa, Artificial Sequence
  Synthetic polypeptide
SQHSGRPRSSFCPRARMPCSPS

SEQ ID NO: 14252 - protein, 22 aa, Artificial Sequence
  Synthetic polypeptide
SQHSGRPRSSFCPRARMPCSPS

SEQ ID NO: 14253 - protein, 22 aa, Artificial Sequence
  Synthetic polypeptide
SQHSGRPRSSFCPRARMPCSPS

SEQ ID NO: 14254 - protein, 22 aa, Artificial Sequence
  Synthetic polypeptide
SQHSGRPRSSFCPRARMPCSPS

SEQ ID NO: 14255 - protein, 22 aa, Artificial Sequence
  Synthetic polypeptide
SQHSGRPRSSFCPRARMPCSPS

SEQ ID NO: 14256 - protein, 22 aa, Artificial Sequence
  Synthetic polypeptide
SQHSGRPRSSFCPRARMPCSPS

SEQ ID NO: 14257 - protein, 22 aa, Artificial Sequence
  Synthetic polypeptide
SQHSGRPRSSFCPRARMPCSPS

SEQ ID NO: 14258 - protein, 22 aa, Artificial Sequence
  Synthetic polypeptide
SQHSGRPRSSFCPRARMPCSPS

SEQ ID NO: 14259 - protein, 190 aa, Artificial Sequence
  Synthetic polypeptide
VRRLMPVIPALWEAKVIFLSKGKDAMQSFMMPFYLMKDCEIKQPVFGANYIKGTVKAEAGGGWEGSASYKLTFTAGGAIEFGQRMLQVASQASRGEVPSGAYGYSYMPSGAYVYPPPVANGMYPCPPGYPYPPPPPEFYPGPPMMDGAMGYVQPPPPPYPGPMEPPVSGPDVPSTPAEPAAATSLLPTGR

SEQ ID NO: 14260 - protein, 216 aa, Artificial Sequence
  Synthetic polypeptide
VRRLMPVIPALWEAKVIFLSKGKDAMQSFMMPFYLMKDCEIKQPVFGANYIKGTVKAEAGGGWEGSASYKLTFTAGGAIEFGQRMLQVASQASRGEVPSGAYGYSYMPSGAYVYPPPVANGMYPCPPGYPYPPPPPGPPMMDGAMGYVQPPPPPYPGPMEPPVSGPDVPSTPAAEAKAAEAAASAYYNPGNPHNVYMPTSQPPPPPYYPPEDKKTQ

SEQ ID NO: 14261 - protein, 175 aa, Artificial Sequence
  Synthetic polypeptide
VRRLMPVIPALWEAKVIFLSKGKDAMQSFMMPFYLMKDCEIKQPVFGANYIKGTVKAEAGGGWEGSASYKLTFTAGGAIEFGQRMLQVASQEFYPGPPMMDGAMGYVQPPPPPYPGPMEPPVSGPDVPSTPAAEAKAAEAAASAYYNPGNPHNVYMPTSQPPPPPYYPPEDKKTQ

SEQ ID NO: 14262 - protein, 148 aa, Artificial Sequence
  Synthetic polypeptide
VRRLMPVIPALWEAKVIFLSKGKDAMQSFMMPFYLMKDCEIKQPVFGANYIKGTVKAEAGGGWEGSASYKLTFTAGGAIEFGQRMLQVASQASRGEVPSGAYGYSYMPSGAYVYPPPVANGMYPCPPGYPYPPPPPEFYPGPPMMDGA

SEQ ID NO: 14263 - protein, 137 aa, Artificial Sequence
  Synthetic polypeptide
GGGGAGGGAAAAATALSTFFQETNIPNSHHHHQMMCTPSNTPATPPNFPDALAMFSKLRASEGLQSSNSPMTAAACSPPANFSPFWASSPPSHQAPWIPPSSPTTFHHLHRPQPTWPPGAQQGGAQQKAMAAMDGQR

SEQ ID NO: 14264 - protein, 15 aa, Artificial Sequence
  Synthetic polypeptide
AAAERAAERRQQRPR

SEQ ID NO: 14265 - protein, 137 aa, Artificial Sequence
  Synthetic polypeptide
RRRSGRRSGGSSDRAEHVLPRNQHSQQPPPPPDDVHSQQHPCHAAQLPRCAGHVLQAPRLRGPAEQQQPHDSRSLLPTCKLQPLLGLVPAQPPGALDPALLPHHLPPPPPPTAHVAPRSTAGGRPAESHGGHGRPEM

SEQ ID NO: 14266 - protein, 353 aa, Artificial Sequence
  Synthetic polypeptide
QGSPIPSLVRDLLGTGHRSRRDTTSFEAFFQSKASNSWTGKGQACRHLLHLAIQRHPHFRGLFNLSIPVLLWGDLFTPALWDRLSQHKAPYGWRGLSHQVIASTLSLLNGSESAKLFAPPRDTPPKCIRCAVVGNGGILNGSRQGPNIDAHDYVFRLNGAVIKGFERDVGTKTSFYGFTVNTMKNSLVSYWNLGFTSVPQGQDLQYIFIPSDIRDYVMLRSAILGVPVPEGLDKGDRPHAYFGPEASASKFKLLHPDFISYLTERFLKSKLINTHFGDLYMPSTGALMLLTALHTCDQVSAYGFITSNYWKFSDHYFERKMKPLIFYANHDLSLEAALWRDLHKAGILQLYQR

SEQ ID NO: 14267 - protein, 70 aa, Artificial Sequence
  Synthetic polypeptide
EQGIAAGGTPHHLKHSFNPRHRILGQERARPADTCFTWPFSGTPTSVACSISPFQCCCGGTSSPQRSGTA

SEQ ID NO: 14268 - protein, 25 aa, Artificial Sequence
  Synthetic polypeptide
GVPNPKPGPRPVRNRASQQEGHHII

SEQ ID NO: 14269 - protein, 25 aa, Artificial Sequence
  Synthetic polypeptide
GVPNPKPGPRPVRNRASQQEGHHII

SEQ ID NO: 14270 - protein, 26 aa, Artificial Sequence
  Synthetic polypeptide
QGSPIPSLVRDLLGTGHRSRRDTTSF

SEQ ID NO: 14271 - protein, 13 aa, Artificial Sequence
  Synthetic polypeptide
EQGIAAGGTPHHL

SEQ ID NO: 14272 - protein, 63 aa, Artificial Sequence
  Synthetic polypeptide
PLPVSQLNIQKVVMALGDYMGASCHACIGGTNVRAEVQKLQMEAPHIIVGTPGRVFDMLNRRY

SEQ ID NO: 14273 - protein, 43 aa, Artificial Sequence
  Synthetic polypeptide
QHDLKWILASACFSAEYTEGGHGTRRLHGRLLSRLYRGHQRAC

SEQ ID NO: 14274 - protein, 43 aa, Artificial Sequence; identical to SEQ ID NO: 14273
  Synthetic polypeptide

SEQ ID NO: 14275 - protein, 43 aa, Artificial Sequence; identical to SEQ ID NO: 14273
  Synthetic polypeptide

SEQ ID NO: 14276 - protein, 43 aa, Artificial Sequence; identical to SEQ ID NO: 14273
  Synthetic polypeptide

SEQ ID NO: 14277 - protein, 43 aa, Artificial Sequence; identical to SEQ ID NO: 14273
  Synthetic polypeptide

SEQ ID NO: 14278 - protein, 43 aa, Artificial Sequence; identical to SEQ ID NO: 14273
  Synthetic polypeptide

SEQ ID NO: 14279 - protein, 43 aa, Artificial Sequence; identical to SEQ ID NO: 14273
  Synthetic polypeptide

SEQ ID NO: 14280 - protein, 43 aa, Artificial Sequence; identical to SEQ ID NO: 14273
  Synthetic polypeptide

SEQ ID NO: 14281 - protein, 43 aa, Artificial Sequence; identical to SEQ ID NO: 14273
  Synthetic polypeptide

SEQ ID NO: 14282 - protein, 43 aa, Artificial Sequence; identical to SEQ ID NO: 14273
  Synthetic polypeptide

SEQ ID NO: 14283 - protein, 299 aa, Artificial Sequence
  Synthetic polypeptide
PLPVSQLNIQKVVMALGDYMGASCHACIGGTNVRAEVQKLQMEAPHIIVGTPGRVFDMLNRRYLSPKYIKMFVLDEADEMLSRGFKDQIYDIFQKLNSNTQVVLLSATMPSDVLEVTKKFMRDPIRILVKKEELTLEGIRQFYINVEREEWKLDTLCDLYETLTITQAVIFINTRRKVDWLTEKMHARDFTVSAMHGDMDQKERDVIMREFRSGSSRVLITTDLLARGIDVQQVSLVINYDLPTNRENYIHRIGRGGRFGRKGVAINMVTEEDKRTLRDIETFYNTSIEEMPLNVADLI

SEQ ID NO: 14284 - protein, 82 aa, Artificial Sequence
  Synthetic polypeptide
PLPVSQLNIQKVVMALGDYMGASCHACIGGTNVRAEVQKLQMEAPHIIVGTPGRVFDMLNRRYLSPKYIKMFVLDEADEMLS

SEQ ID NO: 14285 - protein, 92 aa, Artificial Sequence
  Synthetic polypeptide
PLPVSQLNIQKVVMALGDYMGASCHACIGGTNVRAEVQKLQMEAPHIIVGTPGRVFDMLNRRYLSPKYIKMFVLDEADEMLSRGFKDQIYDI

SEQ ID NO: 14286 - protein, 35 aa, Artificial Sequence
  Synthetic polypeptide
PLPVSQLNIQKVVMALGDYMGASCHACIGGTNVRA

SEQ ID NO: 14287 - protein, 240 aa, Artificial Sequence
  Synthetic polypeptide
PLPVSQLNIQKVVMALGDYMGASCHACIGGTNVRAEVQKLQMEAPHIIVGTPGRVFDMLNRRYLSPKYIKMFVLDEADEMLSRGFKDQIYDIFQKLNSNTQVVLLSATMPSDVLEVTKKFMRDPIRILVKKEELTLEGIRQFYINVEREEWKLDTLCDLYETLTITQAVIFINTRRKVDWLTEKMHARDFTVSAMHGDMDQKERDVIMREFRSGSSRVLITTDLLGKLYPQNRSRWTVWP

SEQ ID NO: 14288 - protein, 164 aa, Artificial Sequence
  Synthetic polypeptide
PLPVSQLNIQKVVMALGDYMGASCHACIGGTNVRAEVQKLQMEAPHIIVGTPGRVFDMLNRRYLSPKYIKMFVLDEADEMLSRGFKDQIYDIFQKLNSNTQEELTLEGIRQFYINVEREEWKLDTLCDLYETLTITQAVIFINTRRKVDWLTEKMHARDFTVSA

SEQ ID NO: 14289 - protein, 234 aa, Artificial Sequence
  Synthetic polypeptide
PLPVSQLNIQKVVMALGDYMGASCHACIGGTNVRAEVQKLQMEAPHIIVGTPGRVFDMLNRRYLSPKYIKMFVLDEADEMLSRGFKDQIYDIFQKLNSNTQVVLLSATMPSDVLEVTKKFMRDPIRILVKKEELTLEGIRQFYINVEREEWKLDTLCDLYETLTITQAVIFINTRRKVDWLTEKMHARDFTVSAMHGDMDQKERDVIMREFRSGSSRVLITTDLLNRSRWTVWP

SEQ ID NO: 14290 - protein, 166 aa, Artificial Sequence
  Synthetic polypeptide
PLPVSQLNIQKVVMALGDYMGASCHACIGGTNVRAEVQKLQMEAPHIIVGTPGRVFDMLNRRYLSPKYIKMFVLDEADEMLSRGFKDQIYDIFQKLNSNTQVVLLSATMPSDVLEVTKKFMRDPIRILVKKEELTLEGIRQFYINVEREEWKLDTLCDLYETLTIT

SEQ ID NO: 14291 - protein, 96 aa, Artificial Sequence
  Synthetic polypeptide
PLPVSQLNIQKVVMALGDYMGASCHACIGGTNVRAEVQKLQMEAPHIIVGTPGRVFDMLNRRYLSPKYIKMFVLDEADEMLSRGFKDQIYDIFQKL

SEQ ID NO: 14292 - protein, 158 aa, Artificial Sequence
  Synthetic polypeptide
EVNEIMQDFCRAPDPALPEAHAPQSPFVLAPNATHLEWARNTSLAPGAWPPAHALRAWLAVPGRACTDTCLDHGLICEPSFFPFLNSQDAFLKLQVPCDSTESEMNHLYPAFAQPGQECYLQKEPLLFSCAGSNTKYRRLCPCRDFRKGQVALCQGCL

SEQ ID NO: 14293 - protein, 158 aa, Artificial Sequence; identical to SEQ ID NO: 14292
  Synthetic polypeptide

SEQ ID NO: 14294 - protein, 158 aa, Artificial Sequence; identical to SEQ ID NO: 14292
  Synthetic polypeptide

SEQ ID NO: 14295 - protein, 69 aa, Artificial Sequence
  Synthetic polypeptide
CRTSAELQTLPYQRPTPRRAPLSWPPMPPTSSGLGTPAWLLGPGPPRTPCGPGWPCLGGPAPTPAWTTG

SEQ ID NO: 14296 - protein, 69 aa, Artificial Sequence; identical to SEQ ID NO: 14295
  Synthetic polypeptide

SEQ ID NO: 14297 - protein, 69 aa, Artificial Sequence; identical to SEQ ID NO: 14295
  Synthetic polypeptide

SEQ ID NO: 14298 - protein, 73 aa, Artificial Sequence
  Synthetic polypeptide
NNAGLLQSSRPCPTRGPRPAEPLCPGPQCHPPRVGSEHQLGSWGLAPRARPAGLAGRAWEGLHRHLPGPRANL

SEQ ID NO: 14299 - protein, 73 aa, Artificial Sequence; identical to SEQ ID NO: 14298
  Synthetic polypeptide

SEQ ID NO: 14300 - protein, 73 aa, Artificial Sequence; identical to SEQ ID NO: 14298
  Synthetic polypeptide

SEQ ID NO: 14301 - protein, 37 aa, Artificial Sequence
  Synthetic polypeptide
CLMICHRLPSPPDGTVWLQENKLRAPTDSTLCLEKIF

SEQ ID NO: 14302 - protein, 37 aa, Artificial Sequence; identical to SEQ ID NO: 14301
  Synthetic polypeptide

SEQ ID NO: 14303 - protein, 37 aa, Artificial Sequence; identical to SEQ ID NO: 14301
  Synthetic polypeptide

SEQ ID NO: 14304 - protein, 37 aa, Artificial Sequence; identical to SEQ ID NO: 14301
  Synthetic polypeptide

SEQ ID NO: 14305 - protein, 37 aa, Artificial Sequence; identical to SEQ ID NO: 14301
  Synthetic polypeptide

SEQ ID NO: 14306 - protein, 37 aa, Artificial Sequence; identical to SEQ ID NO: 14301
  Synthetic polypeptide

SEQ ID NO: 14307 - protein, 37 aa, Artificial Sequence; identical to SEQ ID NO: 14301
  Synthetic polypeptide

SEQ ID NO: 14308 - protein, 37 aa, Artificial Sequence; identical to SEQ ID NO: 14301
  Synthetic polypeptide

SEQ ID NO: 14309 - protein, 143 aa, Artificial Sequence
  Synthetic polypeptide
SVTVSHHHQMGPSGCRKISSGLQLILHYALKRSFEVEEVETPNSTPPRRVQTPLLRATVASSTQKFQDLGVKNSEPSARHVDSLSQRSPKASLRRVELSGPKAAEPVSRRTELSIDISSKQVENAGAIGPSRFGLKRAEVLGH

SEQ ID NO: 14310 - protein, 5 aa, Artificial Sequence
  Synthetic polypeptide
FYIMP

SEQ ID NO: 14311 - protein, 5 aa, Artificial Sequence
  Synthetic polypeptide
FYIMP

SEQ ID NO: 14312 - protein, 5 aa, Artificial Sequence
  Synthetic polypeptide
FYIMP

SEQ ID NO: 14313 - protein, 5 aa, Artificial Sequence
  Synthetic polypeptide
FYIMP

SEQ ID NO: 14314 - protein, 5 aa, Artificial Sequence
  Synthetic polypeptide
FYIMP

SEQ ID NO: 14315 - protein, 5 aa, Artificial Sequence
  Synthetic polypeptide
FYIMP

SEQ ID NO: 14316 - protein, 5 aa, Artificial Sequence
  Synthetic polypeptide
FYIMP

SEQ ID NO: 14317 - protein, 5 aa, Artificial Sequence
  Synthetic polypeptide
FYIMP

SEQ ID NO: 14318 - protein, 589 aa, Artificial Sequence
  Synthetic polypeptide
SVTVSHHHQMGPSGCRKISSGLQLILHYALKRSFEVEEVETPNSTPPRRVQTPLLRATVASSTQKFQDLGVKNSEPSARHVDSLSQRSPKASLRRVELSGPKAAEPVSRRTELSIDISSKQVENAGAIGPSRFGLKRAEVLGHKTPEPAPRRTEITIVKPQESAHRRMEPPASKVPEVPTAPATDAAPKRVEIQMPKPAEAPTAPSPAQTLENSEPAPVSQLQSRLEPKPQPPVAEATPRSQEATEAAPSCVGDMADTPRDAGLKQAPASRNEKAPVDFGYVGIDSILEQMRRKAMKQGFEFNIMVVGQSGLGKSTLINTLFKSKISRKSVQPTSEERIPKTIEIKSITHDIEEKGVRMKLTVIDTPGFGDHINNENCWQPIMKFINDQYEKYLQEEVNINRKKRIPDTRVHCCLYFIPATGHSLRPLDIEFMKRLSKVVNIVPVIAKADTLTLEERVHFKQRITADLLSNGIDVYPQKEFDEDSEDRLVNEKFREMIPFAVVGSDHEYQVNGKRILGRKTKWGTIEVENTTHCEFAYLRDLLIRTHMQNIKDITSSIHFEAYRVKRLNEGSSAMANGMEEKEPEAPEM

SEQ ID NO: 14319 - protein, 589 aa, Artificial Sequence; identical to SEQ ID NO: 14318
  Synthetic polypeptide

SEQ ID NO: 14320 - protein, 589 aa, Artificial Sequence; identical to SEQ ID NO: 14318
  Synthetic polypeptide

SEQ ID NO: 14321 - protein, 589 aa, Artificial Sequence; identical to SEQ ID NO: 14318
  Synthetic polypeptide

SEQ ID NO: 14322 - protein, 589 aa, Artificial Sequence; identical to SEQ ID NO: 14318
  Synthetic polypeptide

SEQ ID NO: 14323 - protein, 147 aa, Artificial Sequence
  Synthetic polypeptide
SVTVSHHHQMGPSGCRKISSGLQLILHYALKRSFEVEEVETPNSTPPRRVQTPLLRATVASSTQKFQDLGVKNSEPSARHVDSLSQRSPKASLRRVELSGPKAAEPVSRRTELSIDISSKQVENAGAIGPSRFGLKRAEVLGHKTPE

SEQ ID NO: 14324 - protein, 170 aa, Artificial Sequence
  Synthetic polypeptide
SVTVSHHHQMGPSGCRKISSGLQLILHYALKRSFEVEEVETPNSTPPRRVQTPLLRATVASSTQKFQDLGVKNSEPSARHVDSLSQRSPKASLRRVELSGPKAAEPVSRRTELSIDISSKQVENAGAIGPSRFGLKRAEVLGHKTPEPAPRRTEITIVKPQESAHRRMEP

SEQ ID NO: 14325 - protein, 16 aa, Artificial Sequence
  Synthetic polypeptide
ASHLAALGRSSVICKP

SEQ ID NO: 14326 - protein, 16 aa, Artificial Sequence
  Synthetic polypeptide
ASHLAALGRSSVICKP

SEQ ID NO: 14327 - protein, 16 aa, Artificial Sequence
  Synthetic polypeptide
ASHLAALGRSSVICKP

SEQ ID NO: 14328 - protein, 16 aa, Artificial Sequence
  Synthetic polypeptide
ASHLAALGRSSVICKP

SEQ ID NO: 14329 - protein, 16 aa, Artificial Sequence
  Synthetic polypeptide
ASHLAALGRSSVICKP

SEQ ID NO: 14330 - protein, 16 aa, Artificial Sequence
  Synthetic polypeptide
ASHLAALGRSSVICKP

SEQ ID NO: 14331 - protein, 16 aa, Artificial Sequence
  Synthetic polypeptide
ASHLAALGRSSVICKP

SEQ ID NO: 14332 - protein, 16 aa, Artificial Sequence
  Synthetic polypeptide
ASHLAALGRSSVICKP

SEQ ID NO: 14333 - protein, 25 aa, Artificial Sequence
  Synthetic polypeptide
MGGLEQATWQLWAAVPSSASLEKIF

SEQ ID NO: 14334 - protein, 25 aa, Artificial Sequence
  Synthetic polypeptide
MGGLEQATWQLWAAVPSSASLEKIF

SEQ ID NO: 14335 - protein, 25 aa, Artificial Sequence
  Synthetic polypeptide
MGGLEQATWQLWAAVPSSASLEKIF

SEQ ID NO: 14336 - protein, 25 aa, Artificial Sequence
  Synthetic polypeptide
MGGLEQATWQLWAAVPSSASLEKIF

SEQ ID NO: 14337 - protein, 25 aa, Artificial Sequence
  Synthetic polypeptide
MGGLEQATWQLWAAVPSSASLEKIF

SEQ ID NO: 14338 - protein, 25 aa, Artificial Sequence
  Synthetic polypeptide
MGGLEQATWQLWAAVPSSASLEKIF

SEQ ID NO: 14339 - protein, 25 aa, Artificial Sequence
  Synthetic polypeptide
MGGLEQATWQLWAAVPSSASLEKIF

SEQ ID NO: 14340 - protein, 25 aa, Artificial Sequence
  Synthetic polypeptide
MGGLEQATWQLWAAVPSSASLEKIF

SEQ ID NO: 14341 - protein, 134 aa, Artificial Sequence
  Synthetic polypeptide
WVALSKPLGSSGPQFRHLQALKRSFEVEEVETPNSTPPRRVQTPLLRATVASSTQKFQDLGVKNSEPSARHVDSLSQRSPKASLRRVELSGPKAAEPVSRRTELSIDISSKQVENAGAIGPSRFGLKRAEVLGH

SEQ ID NO: 14342 - protein, 580 aa, Artificial Sequence
  Synthetic polypeptide
WVALSKPLGSSGPQFRHLQALKRSFEVEEVETPNSTPPRRVQTPLLRATVASSTQKFQDLGVKNSEPSARHVDSLSQRSPKASLRRVELSGPKAAEPVSRRTELSIDISSKQVENAGAIGPSRFGLKRAEVLGHKTPEPAPRRTEITIVKPQESAHRRMEPPASKVPEVPTAPATDAAPKRVEIQMPKPAEAPTAPSPAQTLENSEPAPVSQLQSRLEPKPQPPVAEATPRSQEATEAAPSCVGDMADTPRDAGLKQAPASRNEKAPVDFGYVGIDSILEQMRRKAMKQGFEFNIMVVGQSGLGKSTLINTLFKSKISRKSVQPTSEERIPKTIEIKSITHDIEEKGVRMKLTVIDTPGFGDHINNENCWQPIMKFINDQYEKYLQEEVNINRKKRIPDTRVHCCLYFIPATGHSLRPLDIEFMKRLSKVVNIVPVIAKADTLTLEERVHFKQRITADLLSNGIDVYPQKEFDEDSEDRLVNEKFREMIPFAVVGSDHEYQVNGKRILGRKTKWGTIEVENTTHCEFAYLRDLLIRTHMQNIKDITSSIHFEAYRVKRLNEGSSAMANGMEEKEPEAPEM

SEQ ID NO: 14343 - protein, 580 aa, Artificial Sequence; identical to SEQ ID NO: 14342
  Synthetic polypeptide

SEQ ID NO: 14344 - protein, 580 aa, Artificial Sequence; identical to SEQ ID NO: 14342
  Synthetic polypeptide

SEQ ID NO: 14345 - protein, 580 aa, Artificial Sequence; identical to SEQ ID NO: 14342
  Synthetic polypeptide

SEQ ID NO: 14346 - protein, 580 aa, Artificial Sequence; identical to SEQ ID NO: 14342
  Synthetic polypeptide

SEQ ID NO: 14347 - protein, 138 aa, Artificial Sequence
  Synthetic polypeptide
WVALSKPLGSSGPQFRHLQALKRSFEVEEVETPNSTPPRRVQTPLLRATVASSTQKFQDLGVKNSEPSARHVDSLSQRSPKASLRRVELSGPKAAEPVSRRTELSIDISSKQVENAGAIGPSRFGLKRAEVLGHKTPE

SEQ ID NO: 14348 - protein, 161 aa, Artificial Sequence
  Synthetic polypeptide
WVALSKPLGSSGPQFRHLQALKRSFEVEEVETPNSTPPRRVQTPLLRATVASSTQKFQDLGVKNSEPSARHVDSLSQRSPKASLRRVELSGPKAAEPVSRRTELSIDISSKQVENAGAIGPSRFGLKRAEVLGHKTPEPAPRRTEITIVKPQESAHRRMEP

SEQ ID NO: 14349 - protein, 36 aa, Artificial Sequence
  Synthetic polypeptide
DQPGQHGETSCLPKIQKIILAWRCVPAVPATWEVEP

SEQ ID NO: 14350 - protein, 36 aa, Artificial Sequence; identical to SEQ ID NO: 14349
  Synthetic polypeptide

SEQ ID NO: 14351 - protein, 36 aa, Artificial Sequence; identical to SEQ ID NO: 14349
  Synthetic polypeptide

SEQ ID NO: 14352 - protein, 36 aa, Artificial Sequence; identical to SEQ ID NO: 14349
  Synthetic polypeptide

SEQ ID NO: 14353 - protein, 36 aa, Artificial Sequence; identical to SEQ ID NO: 14349
  Synthetic polypeptide

SEQ ID NO: 14354 - protein, 36 aa, Artificial Sequence; identical to SEQ ID NO: 14349
  Synthetic polypeptide

SEQ ID NO: 14355 - protein, 36 aa, Artificial Sequence; identical to SEQ ID NO: 14349
  Synthetic polypeptide

SEQ ID NO: 14356 - protein, 36 aa, Artificial Sequence; identical to SEQ ID NO: 14349
  Synthetic polypeptide

SEQ ID NO: 14357 - protein, 45 aa, Artificial Sequence
  Synthetic polypeptide
AQEFETSLGNMVKPHVYQKYKKLSWRGGVCLRFQLLGRLSLEKIF

SEQ ID NO: 14358 - protein, 45 aa, Artificial Sequence; identical to SEQ ID NO: 14357
  Synthetic polypeptide

SEQ ID NO: 14359 - protein, 45 aa, Artificial Sequence; identical to SEQ ID NO: 14357
  Synthetic polypeptide

SEQ ID NO: 14360 - protein, 45 aa, Artificial Sequence; identical to SEQ ID NO: 14357
  Synthetic polypeptide

SEQ ID NO: 14361 - protein, 45 aa, Artificial Sequence; identical to SEQ ID NO: 14357
  Synthetic polypeptide

SEQ ID NO: 14362 - protein, 45 aa, Artificial Sequence; identical to SEQ ID NO: 14357
  Synthetic polypeptide

SEQ ID NO: 14363 - protein, 45 aa, Artificial Sequence; identical to SEQ ID NO: 14357
  Synthetic polypeptide

SEQ ID NO: 14364 - protein, 45 aa, Artificial Sequence; identical to SEQ ID NO: 14357
  Synthetic polypeptide

SEQ ID NO: 14365 - protein, 49 aa, Artificial Sequence
  Synthetic polypeptide
VTSSGALAHACEQRRYVPFTQRSRCNMDTEFWGTYNVWEFSQTPDEYKA

SEQ ID NO: 14366 - protein, 54 aa, Artificial Sequence
  Synthetic polypeptide
HPVEHWRMRVSRGDTSHSHSVPDATWTQNSGEPTTCGSSARLQMSIRLDDSPQD

SEQ ID NO: 14367 - protein, 40 aa, Artificial Sequence
  Synthetic polypeptide
PKTIENSHHKGPGHQEEPAACPLWRRRRGESGHLLPRRVV

SEQ ID NO: 14368 - protein, 40 aa, Artificial Sequence; identical to SEQ ID NO: 14367
  Synthetic polypeptide

SEQ ID NO: 14369 - protein, 40 aa, Artificial Sequence; identical to SEQ ID NO: 14367
  Synthetic polypeptide

SEQ ID NO: 14370 - protein, 40 aa, Artificial Sequence; identical to SEQ ID NO: 14367
  Synthetic polypeptide

SEQ ID NO: 14371 - protein, 40 aa, Artificial Sequence; identical to SEQ ID NO: 14367
  Synthetic polypeptide

SEQ ID NO: 14372 - protein, 264 aa, Artificial Sequence
  Synthetic polypeptide
PEIISNPKQLKTATTRARATRKSLLHVPYGDGEGEKVDIYFPDESSEALPFFLFFHGGYWQSGSKDESAFMVHPLTAQGVAVVIVAYGIAPKGTLDHMVDQVTRSVAFVQKRYPSNKGIYLCGHSAGAHLAAMMLLADWTKHGVTPNLRGFFLVSGVFDLEPIVYTSQNVALQLTLEDAQRNSPQLKVAQAQPVDPTCRVLVVVGQFDSPEFHRQSWEFYQTLCQGEWKASFEELHDVDHFEIVENLTQKDNVLTQIILKTIFQ

SEQ ID NO: 14373 - protein, 64 aa, Artificial Sequence
  Synthetic polypeptide
KQPPQGPGPPGRACCMSPMETAKGRKWTFTSPTSRLKPCLSSCSFTEDTGRAEVRMSLPSWSTR

SEQ ID NO: 14374 - protein, 64 aa, Artificial Sequence; identical to SEQ ID NO: 14373
  Synthetic polypeptide

SEQ ID NO: 14375 - protein, 64 aa, Artificial Sequence; identical to SEQ ID NO: 14373
  Synthetic polypeptide

SEQ ID NO: 14376 - protein, 167 aa, Artificial Sequence
  Synthetic polypeptide
PEIISNPKQLKTATTRARATRKSLLHVPYGDGEGEKVDIYFPDESSEALPFFLFFHGGYWQSGSKDESAFMVHPLTAQGVAVVIVAYGIAPKGTLDHMVDQVTRSVAFVQKRYPSNKWVLPVDFLPVGPQWVGGQCNQYLGYSQAAPLACGAESKLGLFEGGLMLWG

SEQ ID NO: 14377 - protein, 72 aa, Artificial Sequence
  Synthetic polypeptide
PEIISNPKQLKTATTRARATRKSLLHVPYGDGEGEKVDIYFPDESSEALPFFLFFHGGYWQSGRLFPGEWGL

SEQ ID NO: 14378 - protein, 62 aa, Artificial Sequence
  Synthetic polypeptide
KQPPQGPGPPGRACCMSPMETAKGRKWTFTSPTSRLKPCLSSCSFTEDTGRAEGFFLVSGVF

SEQ ID NO: 14379 - protein, 269 aa, Artificial Sequence
  Synthetic polypeptide
PEIISNPKQLKTATTRARATRKSLLHVPYGDGEGEKVDIYFPDESSEALPFFLFFHGGYWQSGSKDESAFMVHPLTAQGVAVVIVAYGIAPKGTLDHMVDQVTRSVAFVQKRYPSNKGIYLCGHSAGAHLAAMMLLADWTKHGVTPNLRGFFLVSGVFDLEPIVYTSQNVALQLTLEDAQRNSPQLKVAQAQPVDPTCRVLVVVGQFDSPEFHRQSWEFYQVLPVQTLCQGEWKASFEELHDVDHFEIVENLTQKDNVLTQIILKTIFQ

SEQ ID NO: 14380 - protein, 148 aa, Artificial Sequence
  Synthetic polypeptide
PEIISNPKQLKTATTRARATRKSLLHVPYGDGEGEKVDIYFPDESSEALPFFLFFHGGYWQSGRHPGPHGRPGDPQRCVCPEAVSKQQVGVASRFSSCWTSVGGRTVQSVPRIQPSCPSGLWSRKQIGTLRRGPDVVGKLRANPALCS

SEQ ID NO: 14381 - protein, 138 aa, Artificial Sequence
  Synthetic polypeptide
KQPPQGPGPPGRACCMSPMETAKGRKWTFTSPTSRLKPCLSSCSFTEDTGRAEGTLDHMVDQVTRSVAFVQKRYPSNKWVLPVDFLPVGPQWVGGQCNQYLGYSQAAPLACGAESKLGLFEGGLMLWGNCVQIQLSAL

SEQ ID NO: 14382 - protein, 2028 aa, Artificial Sequence
  Synthetic polypeptide
EEEEEEEEEEEEEEDDDEGVLGRGPGHDRGRDRHSPPGCHLFPPPPPPPPPLPPPPPPPPPDKDDIRLLPSALGVKKRKRGPKKQKENKPGKPRKRKKRDSEEEFGSERDEYREKSESGGSEYGTGPGRKRRRKHREKKEKKTKRRKKGEGDGGQKQVEQKSSATLLLTWGLEDVEHVFSEEDYHTLTNYKAFSQFMRPLIAKKNPKIPMSKMMTILGAKWREFSANNPFKGSAAAVAAAAAAAAAAVAEQVSAAVSSATPIAPSGPPALPPPPAADIQPPPIRRAKTKEGKGPGHKRRSKSPRVPDGRKKLRGKKMAPLKIKLGLLGGKRKKGGSYVFQSDEGPEPEAEESDLDSGSVHSASGRPDGPVRTKKLKRGRPGRKKKKVLGCPAVAGEEEVDGYETDHQDYCEVCQQGGEIILCDTCPRAYHLVCLDPELDRAPEGKWSCPHCEKEGVQWEAKEEEEEYEEEGEEEGEKEEEDDHMEYCRVCKDGGELLCCDACISSYHIHCLNPPLPDIPNGEWLCPRCTCPVLKGRVQKILHWRWGEPPVAVPAPQQADGNPDVPPPRPLQGRSEREFFVKWVGLSYWHCSWAKELQLEIFHLVMYRNYQRKNDMDEPPPLDYGSGEDDGKSDKRKVKDPHYAEMEEKYYRFGIKPEWMTVHRIINHSVDKKGNYHYLVKWRDLPYDQSTWEEDEMNIPEYEEHKQSYWRHRELIMGEDPAQPRKYKKKKKELQGDGPPSSPTNDPTVKYETQPRFITATGGTLHMYQLEGLNWLRFSWAQGTDTILADEMGLGKTIQTIVFLYSLYKEGHTKGPFLVSAPLSTIINWEREFQMWAPKFYVVTYTGDKDSRAIIRENEFSFEDNAIKGGKKAFKMKREAQVKFHVLLTSYELITIDQAALGSIRWACLVVDEAHRLKNNQSKFFRVLNGYKIDHKLLLTGTPLQNNLEELFHLLNFLTPERFNNLEGFLEEFADISKEDQIKKLHDLLGPHMLRRLKADVFKNMPAKTELIVRVELSPMQKKYYKYILTRNFEALNSRGGGNQVSLLNIMMDLKKCCNHPYLFPVAAMESPKLPSGAYEGGALIKSSGKLMLLQKMLRKLKEQGHRVLIFSQMTKMLDLLEDFLDYEGYKYERIDGGITGALRQEAIDRFNAPGAQQFCFLLSTRAGGLGINLATADTVIIFDSDWNPHNDIQAFSRAHRIGQANKVMIYRFVTRASVEERITQVAKRKMMLTHLVVRPGLGSKAGSMSKQELDDILKFGTEELFKDENEGENKEEDSSVIHYDNEAIARLLDRNQDATEDTDVQNMNEYLSSFKVAQYVVREEDKIEEIEREIIKQEENVDPDYWEKLLRHHYEQQQEDLARNLGKGKRVRKQVNYNDAAQEDQDNQSEYSVGSEEEDEDFDERPEGRRQSKRQLRNEKDKPLPPLLARVGGNIEVLGFNTRQRKAFLNAVMRWGMPPQDAFTTQWLVRDLRGKTEKEFKAYVSLFMRHLCEPGADGSETFADGVPREGLSRQQVLTRIGVMSLVKKKVQEFEHINGRWSMPELMPDPSADSKRSSRASSPTKTSPTTPEASATNSPCTSKPATPAPSEKGEGIRTPLEKEEAENQEEKPEKNSRIGEKMETEADAPSPAPSLGERLEPRKIPLEDEVPGVPGEMEPEPGYRGDREKSATESTPGERGEEKPLDGQEHRERPEGETGDLGKREDVKGDRELRPGPRDEPRSNGRREEKTEKPRFMFNIADGGFTELHTLWQNEERAAISSGKLNEIWHRRHDYWLLAGIVLHGYARWQDIQNDAQFAIINEPFKTEANKGNFLEMKNKFLARRFKLLEQALVIEEQLRRAAYLNLSQEPAHPAMALHARFAEAECLAESHQHLSKESLAGNKPANAVLHKVLNQLEELLSDMKADVTRLPATLSRIPPIAARLQMSERSILSRLASKGTEPHPTPAYPPGPYATPPGYGAAFSAAPVGALAAAGANYSQMPAGSFITAATNGPPVLVKKEKEMVGALVSDGLDRKEPRAGEVICIDD

SEQ ID NO: 14383 - protein, 74 aa, Artificial Sequence
  Synthetic polypeptide
RRRRRRRRRRRRRRTTTREYSGAGRATTGAATATAPPAATSSRRRRRRRHRCPRRRRPRRQIRMTFGCCRQHWV

SEQ ID NO: 14384 - protein, 61 aa, Artificial Sequence
  Synthetic polypeptide
GGGGGGGGGGGGGGRRRGSTRARAGPRPGPRPPQPPRLPPLPAAAAAAATAAPAAAAPAAR

SEQ ID NO: 14385 - protein, 12 aa, Artificial Sequence
  Synthetic polypeptide
AEIAVLHSSLGS

SEQ ID NO: 14386 - protein, 12 aa, Artificial Sequence
  Synthetic polypeptide
AEIAVLHSSLGS

SEQ ID NO: 14387 - protein, 12 aa, Artificial Sequence
  Synthetic polypeptide
AEIAVLHSSLGS

SEQ ID NO: 14388 - protein, 12 aa, Artificial Sequence
  Synthetic polypeptide
AEIAVLHSSLGS

SEQ ID NO: 14389 - protein, 4928 aa, Artificial Sequence
  Synthetic polypeptide
SQLLGRLSQENCLSLGGGGCSELRSQYCTPALEAETKTKDEMAAAEEKVGKNEQGEPEDLKKPEGKNRSAAAVKNEKEQKNQEADVQEVKASTLSPGGGVTVFFHAIISLHFPFNPDLHKVFIRGGEEFGESKWDSNICELHYTRDLGHDRVLVEGIVCISKKHLDKYIPYKYVIYNGESFEYEFIYKHQQKKGEYVNRCLFIKSSLLGSGDWHQYYDIVYMKPHGRLQKVMNHITDGPRKDLVKGKQIAAALMLDSTFSILQTWDTINLNSFFTQFEQFCFVLQQPMIYEGQAQLWTDLQYREKEVKRYLWQHLKKHVVPLPDGKSTDFLPVDCPVRSKLKTGLIVLFVVEKIELLLEGSLDWLCHLLTSDASSPDEFHRDLSHILGIPQSWRLYLVNLCQRCMDTRTYTWLGALPVLHCCMELAPRHKDAWRQPEDTWAALEGLSFSPFREQMLDTSSLLQFMREKQHLLSIDEPLFRSWFSLLPLSHLVMYMENFIEHLGRFPAHILDCLSGIYYRLPGLEQVLNTQDVQDVQNVQNILEMLLRLLDTYRDKIPEEALSPSYLTVCLKLHEAICSSTKLLKFYELPALSAEIVCRMIRLLSLVDSAGQRDETGNNSVQTVFQGTLAATKRWLREVFTKNMLTSSGASFTYVKEIEVWRRLVEIQFPAEHGWKESLLGDMEWRLTKEEPLSQITAYCNSCWDTKGLEDSVAKTFEKCIIEAVSSACQSQTSILQGFSYSDLRKFGIVLSAVITKSWPRTADNFNDILKHLLTLADVKHVFRLCGTDEKILANVTEDAKRLIAVADSVLTKVVGDLLSGTILVGQLELIIKHKNQFLDIWQLREKSLSPQDEQCAVEEALDWRREELLLLKKEKRCVDSLLKMCGNVKHLIQVDFGVLAVRHSQDLSSKRLNDTVTVRLSTSSNSQRATHYHLSSQVQEMAGKIDLLRDSHIFQLFWREAAEPLSEPKEDQEAAELLSEPEEESERHILELEEVYDYLYQPSYRKFIKLHQDLKSGEVTLAEIDVIFKDFVNKYTDLDSELKIMCTVDHQDQRDWIKDRVEQIKEYHHLHQAVHAAKVILQVKESLGLNGDFSVLNTLLNFTDNFDDFRRETLDQINQELIQAKKLLQDISEARCKGLQALSLRKEFICWVREALGGINELKVFVDLASISAGENDIDVDRVACFHDAVQGYASLLFKLDPSVDFSAFMKHLKKLWKALDKDQYLPRKLCDSARNLEWLKTVNESHGSVERSSLTLATAINQRGIYVIQAPKGGQKISPDTVLHLILPESPGSHEESREYSLEEVKELLNKLMLMSGKKDRNNTEVERFSEVFCSVQRLSQAFIDLHSAGNMLFRTWIAMAYCSPKQGVSLQMDFGLDLVTELKEGGDVTELLAALCRQMEHFLDSWKRFVTQKRMEHFYLNFYTAEQLVYLSTELRKQPPSDAALTMLSFIKSNCTLRDVLRASVGCGSEAARYRMRRVMEELPLMLLSEFSLVDKLRIIMEQSMRCLPAFLPDCLDLETLGHCLAHLAGMGGSPVERCLPRGLQVGQPNLVVCGHSEVLPAALAVYMQTPSQPLPTYDEVLLCTPATTFEEVALLLRRCLTLGSLGHKVYSLLFADQLSYEVARQAEELFHNLCTQQHREDYQLVMVCDGDWEHCYLPSAFSQHKVFVTPQAPLEAIQAYLAGHYRVPKQTLSAAAVFNDRLCVGIVASERAGVGKSLYVKRLHDKMKMQLNVKNVPLKTIRLIDPQVDESRVLGALLPFLDAQYQKVPVLFHLDVTSSVQTGIWVFLFKLLILQYLMDINGKMWLRNPCHLYIVEILERRTSVPSRSSSALRTRVPQFSFLDIFPKVTCRPPKEVIDMELSALRSDTEPGMDLWEFCSETFQRPYQYLRRFNQNQDLDTFQYQEGSVEGTPEECLQHFLFHCGVINPSWSELRNFARFLNYQLRDCEASLFCNPSFIGDTLRGFKKFVVTFMIFMARDFATPSLHTSDQSPGKHMVTMDGVREEDLAPFSLRKRWESEPHPYVFFNDDHTTMTFIGFHLQPNINGSVDAISHLTGKVIKRDVMTRDLYQGLLLQRVPFNVDFDKLPRHKKLERLCLTLGIPQATDPDKTYELTTDNMLKILAIEMRFRCGIPVIIMGETGCGKTRLIKFLSDLRRGGTNADTIKLVKVHGGTTADMIYSRVREAENVAFANKDQHQLDTILFFDEANTTEAISCIKEVLCDHMVDGQPLAEDSGLHIIAACNPYRKHSEEMICRLESAGLGYRVSMEETADRLGSIPLRQLVYRVHALPPSLIPLVWDFGQLSDVAEKLYIQQIVQRLVESISLDENGTRVITEVLCASQGFMRKTEDECSFVSLRDVERCVKVFRWFHEHSAMLLAQLNAFLSKSSVSKNHTERDPVLWSLMLAIGVCYHASLEKKDSYRKAIARFFPKPYDDSRLLLDEITRAQDLFLDGVPLRKTIAKNLALKENVFMMVVCIELKIPLFLVGKPGSSKSLAKTIVADAMQGPAAYSDLFRSLKQVHLVSFQCSPHSTPQGIISTFRQCARFQQGKDLQQYVSVVVLDEVGLAEDSPKMPLKTLHPLLEDGCIEDDPAPHKKVGFVGISNWALDPAKMNRGIFVSRGSPNETELIESAKGICSSDILVQDRVQGYFASFAKAYETVCKRQDKEFFGLRDYYSLIKMVFAAAKASNRKPSPQDIAQAVLRNFSGKDDIQALDIFLANLPEAKCSEEVSPMQLIKQNIFGPSQKVPGGEQEDAESRYLLVLTKNYVALQILQQTFFEGDQQPEIIFGSGFPKDQEYTQLCRNINRVKICMETGKMVLLLNLQNLYESLYDALNQYYVHLGGQKYVDLGLGTHRVKCRVHPNFRLIVIEEKDVVYKHFPIPLINRLEKHYLDINTVLEKWQKSIVEELCAWVEKFINVKAHHFQKRHKYSPSDVFIGYHSDACASVVLQVIERQGPRALTEELHQKVSEEAKSILLNCATPDAVVRLSAYSLGGFAAEWLSQEYFHRQRHNSFADFLQAHLHTADLERHAIFTEITTFSRLLTSHDCEILESEVTGRAPKPTLLWLQQFDTEYSFLKEVRNCLTNTAKCKILIFQTDFEDGIRSAQLIASAKYSVINEINKIRENEDRIFVYFITKLSRVGRGTAYVGFHGGLWQSVHIDDLRRSTLMVSDVTRLQHVTISQLFAPGDLPELGLEHRAEDGHEEAMETEASTSGEVAEVAEEAMETESSEKVGKETSELGGSDVSILDTTRLLRSCVQSAVGMLRDQNESCTRNMRRVVLLLGLLNEDDACHASFLRVSKMRLSVFLKKQEESQFHPLEWLAREACNQDALQEAGTFRHTLWKRVQGAVTPLLASMISFIDRDGNLELLTRPDTPPWARDLWMFIFSDTMLLNIPLVMNNERHKGEMAYIVVQNHMNLSENASNNVPFSWKIKDYLEELWVQAQYITDAEGLPKKFVDIFQQTPLGRFLAQLHGEPQQELLQCYLKDFILLTMRVSTEEELKFLQMALWSCTRKLKAASEAPEEEVSLPWVHLAYQRFRSRLQNFSRILTIYPQVLHSLMEARWNHELAGCEMTLDAFAAMACTEMLTRNTLKPSPQAWLQLVKNLSMPLELICSDEHMQGSGSLAQAVIREVRAQWSRIFSTALFVEHVLLGTESRVPELQGLVTEHVFLLDKCLRENSDVKTHGPFEAVMRTLCECKETASKTLSRFGIQPCSICLGDAKDPVCLPCDHVHCLRCLRAWFASEQMICPYCLTALPDEFSPAVSQAHREAIEKHARFRQMCNSFFVDLVSTICFKDNAPPEKEVIESLLSLLFVQKGRLRDAAQRHCEHTKSLSPFNDVVDKTPVIRSVILKLLLKYSFHDVKDYIQEYLTLLKKKAFITEDKTELYMLFINCLEDSILEKTSAYSRNDELNHLEEEGRFLKAYSPASRGREPANEASVEYLQEVARIRLCLDRAADFLSEPEGGPEMAKEKQCYLQQVKQFCIRVENDWHRVYLVRKLSSQRGMEFVQGLSKPGRPHQWVFPKDVVKQQGLRQDHPGQMDRYLVYGDEYKALRDAVAKAVLECKPLGIKTALKACKTPQSQQSAYFLLTLFREVAILYRSHNASLHPTPEQCEAVSKFIGECKILSPPDISRFATSLVDNSVPLLRAGPSDSNLDGTVTEMAIHAAAVLLCGQNELLEPLKNLAFSPATMAHAFLPTMPEDLLAQARRWKGLERVHWYTCPNGHPCSVGECGRPMEQSICIDCHAPIGGIDHKPRDGFHLVKDKADRTQTGHVLGNPQRRDVVTCDRGLPPVVFLLIRLLTHLALLLGASQSSQALINIIKPPVRDPKGFLQQHILKDLEQLAKMLGHSADETIGVVHLVLRRLLQEQHQLSSRRLLNFDTELSTKEMRNNWEKEIAAVISPELEHLDKTLPTMNNLISQDKRISSNPVAKIIYGDPVTFLPHLPRKSVVHCSKIWSCRKRITVEYLQHIVEQKNGKERVPILWHFLQKEAELRLVKFLPEILALQRDLVKQFQNVQQVEYSSIRGFLSKHSSDGLRQLLHNRITVFLSTWNKLRRSLETNGEINLPKDYCSTDLDLDTEFEILLPRRRGLGLCATALVSYLIRLHNEIVYAVEKLSKENNSYSVDAAEVTELHVISYEVERDLTPLILSNCQYQVEEGRETVQEFDLEKIQRQIVSRFLQGKPRLSLKGIPTLVYRHDWNYEHLFMDIKNKMAQDSLPSSVISAISGQLQSYSDACEVLSVVEVTLGFLSTAGGDPNMQLNVYTQDILQMGDQTIHVLKALNRCQLKHTIALWQFLSAHKSEQLLRLHKEPFGEISSRYKADLSPENAKLLSTFLNQTGLDAFLLELHEMIILKLKNPQTQTEERFRPQWSLRDTLVSYMQTKESEILPEMASQFPEEILLASCVSVWKTAAVLKWNREMR

SEQ ID NO: 14390 - protein, 4928 aa, Artificial Sequence; identical to SEQ ID NO: 14389
  Synthetic polypeptide

SEQ ID NO: 14391 - protein, 49 aa, Artificial Sequence
  Synthetic polypeptide
DRSTALQPWKLRPRPRTRWLLLKKKSVRMNKGSLKTSRSQRGRTEVQLL

SEQ ID NO: 14392 - protein, 49 aa, Artificial Sequence; identical to SEQ ID NO: 14391
  Synthetic polypeptide

SEQ ID NO: 14393 - protein, 49 aa, Artificial Sequence; identical to SEQ ID NO: 14391
  Synthetic polypeptide

SEQ ID NO: 14394 - protein, 49 aa, Artificial Sequence; identical to SEQ ID NO: 14391
  Synthetic polypeptide

SEQ ID NO: 14395 - protein, 1271 aa, Artificial Sequence
  Synthetic polypeptide
SQLLGRLSQENCLSLGGGGCSELRSQYCTPALEAETKTKDEMAAAEEKVGKNEQGEPEDLKKPEGKNRSAAAVKNEKEQKNQEADVQEVKASTLSPGGGVTVFFHAIISLHFPFNPDLHKVFIRGGEEFGESKWDSNICELHYTRDLGHDRVLVEGIVCISKKHLDKYIPYKYVIYNGESFEYEFIYKHQQKKGEYVNRCLFIKSSLLGSGDWHQYYDIVYMKPHGRLQKVMNHITDGPRKDLVKGKQIAAALMLDSTFSILQTWDTINLNSFFTQFEQFCFVLQQPMIYEGQAQLWTDLQYREKEVKRYLWQHLKKHVVPLPDGKSTDFLPVDCPVRSKLKTGLIVLFVVEKIELLLEGSLDWLCHLLTSDASSPDEFHRDLSHILGIPQSWRLYLVNLCQRCMDTRTYTWLGALPVLHCCMELAPRHKDAWRQPEDTWAALEGLSFSPFREQMLDTSSLLQFMREKQHLLSIDEPLFRSWFSLLPLSHLVMYMENFIEHLGRFPAHILDCLSGIYYRLPGLEQVLNTQDVQDVQNVQNILEMLLRLLDTYRDKIPEEALSPSYLTVCLKLHEAICSSTKLLKFYELPALSAEIVCRMIRLLSLVDSAGQRDETGNNSVQTVFQGTLAATKRWLREVFTKNMLTSSGASFTYVKEIEVWRRLVEIQFPAEHGWKESLLGDMEWRLTKEEPLSQITAYCNSCWDTKGLEDSVAKTFEKCIIEAVSSACQSQTSILQGFSYSDLRKFGIVLSAVITKSWPRTADNFNDILKHLLTLADVKHVFRLCGTDEKILANVTEDAKRLIAVADSVLTKVVGDLLSGTILVGQLELIIKHKNQFLDIWQLREKSLSPQDEQCAVEEALDWRREELLLLKKEKRCVDSLLKMCGNVKHLIQVDFGVLAVRHSQDLSSKRLNDTVTVRLSTSSNSQRATHYHLSSQVQEMAGKIDLLRDSHIFQLFWREAAEPLSEPKEDQEAAELLSEPEEESERHILELEEVYDYLYQPSYRKFIKLHQDLKSGEVTLAEIDVIFKDFVNKYTDLDSELKIMCTVDHQDQRDWIKDRVEQIKEYHHLHQAVHAAKVILQVKESLGLNGDFSVLNTLLNFTDNFDDFRRETLDQINQELIQAKKLLQDISEARCKGLQALSLRKEFICWVREALGGINELKVFVDLASISAGENDIDVDRVACFHDAVQGYASLLFKLDPSVDFSAFMKHLKKLWKALDKDQYLPRKLVSLILSLMQILLNRALLSNVRAVTVEMVAHLCGRFVHSRFQ

SEQ ID NO: 14396 - protein, 784 aa, Artificial Sequence
  Synthetic polypeptide
SQLLGRLSQENCLSLGGGGCSELRSQYCTPALEAETKTKDEMAAAEEKVGKNEQGEPEDLKKPEGKNRSAAAVKNEKEQKNQEADVQEVKASTLSPGGGVTVFFHAIISLHFPFNPDLHKVFIRGGEEFGESKWDSNICELHYTRDLGHDRVLVEGIVCISKKHLDKYIPYKYVIYNGESFEYEFIYKHQQKKGEYVNRCLFIKSSLLGSGDWHQYYDIVYMKPHGRLQKVMNHITDGPRKDLVKGKQIAAALMLDSTFSILQTWDTINLNSFFTQFEQFCFVLQQPMIYEGQAQLWTDLQYREKEVKRYLWQHLKKHVVPLPDGKSTDFLPVDCPVRSKLKTGLIVLFVVEKIELLLEGSLDWLCHLLTSDASSPDEFHRDLSHILGIPQSWRLYLVNLCQRCMDTRTYTWLGALPVLHCCMELAPRHKDAWRQPEDTWAALEGLSFSPFREQMLDTSSLLQFMREKQHLLSIDEPLFRSWFSLLPLSHLVMYMENFIEHLGRFPAHILDCLSGIYYRLPGLEQVLNTQDVQDVQNVQNILEMLLRLLDTYRDKIPEEALSPSYLTVCLKLHEAICSSTKLLKFYELPALSAEIVCRMIRLLSLVDSAGQRDETGNNSVQTVFQGTLAATKRWLREVFTKNMLTSSGASFTYVKEIEVWRRLVEIQFPAEHGWKESLLGDMEWRLTKEEPLSQITAYCNSCWDTKGLEDSVAKTFEKCIIEAVSSACQVNNLSSWETDSGSQLCSAMTQLRAMKHPLGLSSSANSEIGKWAPSSLAKGNGAEI

SEQ ID NO: 14397 - protein, 15 aa, Artificial Sequence
  Synthetic polypeptide
AVLKVLVWTLGCELS

SEQ ID NO: 14398 - protein, 15 aa, Artificial Sequence
  Synthetic polypeptide
AVLKVLVWTLGCELS

SEQ ID NO: 14399 - protein, 15 aa, Artificial Sequence
  Synthetic polypeptide
AVLKVLVWTLGCELS

SEQ ID NO: 14400 - protein, 1078 aa, Artificial Sequence
  Synthetic polypeptide
QFSKCWYGPLGVSFHDVKDYIQEYLTLLKKKAFITEDKTELYMLFINCLEDSILEKTSAYSRNDELNHLEEEGRFLKAYSPASRGREPANEASVEYLQEVARIRLCLDRAADFLSEPEGGPEMAKEKQCYLQQVKQFCIRVENDWHRVYLVRKLSSQRGMEFVQGLSKPGRPHQWVFPKDVVKQQGLRQDHPGQMDRYLVYGDEYKALRDAVAKAVLECKPLGIKTALKACKTPQSQQSAYFLLTLFREVAILYRSHNASLHPTPEQCEAVSKFIGECKILSPPDISRFATSLVDNSVPLLRAGPSDSNLDGTVTEMAIHAAAVLLCGQNELLEPLKNLAFSPATMAHAFLPTMPEDLLAQARRWKGLERVHWYTCPNGHPCSVGECGRPMEQSICIDCHAPIGGIDHKPRDGFHLVKDKADRTQTGHVLGNPQRRDVVTCDRGLPPVVFLLIRLLTHLALLLGASQSSQALINIIKPPVRDPKGFLQQHILKDLEQLAKMLGHSADETIGVVHLVLRRLLQEQHQLSSRRLLNFDTELSTKEMRNNWEKEIAAVISPELEHLDKTLPTMNNLISQDKRISSNPVAKIIYGDPVTFLPHLPRKSVVHCSKIWSCRKRITVEYLQHIVEQKNGKERVPILWHFLQKEAELRLVKFLPEILALQRDLVKQFQNVQQVEYSSIRGFLSKHSSDGLRQLLHNRITVFLSTWNKLRRSLETNGEINLPKDYCSTDLDLDTEFEILLPRRRGLGLCATALVSYLIRLHNEIVYAVEKLSKENNSYSVDAAEVTELHVISYEVERDLTPLILSNCQYQVEEGRETVQEFDLEKIQRQIVSRFLQGKPRLSLKGIPTLVYRHDWNYEHLFMDIKNKMAQDSLPSSVISAISGQLQSYSDACEVLSVVEVTLGFLSTAGGDPNMQLNVYTQDILQMGDQTIHVLKALNRCQLKHTIALWQFLSAHKSEQLLRLHKEPFGEISSRYKADLSPENAKLLSTFLNQTGLDAFLLELHEMIILKLKNPQTQTEERFRPQWSLRDTLVSYMQTKESEILPEMASQFPEEILLASCVSVWKTAAVLKWNREMR

SEQ ID NO: 14401 - protein, 1078 aa, Artificial Sequence; identical to SEQ ID NO: 14400
  Synthetic polypeptide

SEQ ID NO: 14402 - protein, 1078 aa, Artificial Sequence; identical to SEQ ID NO: 14400
  Synthetic polypeptide

SEQ ID NO: 14403 - protein, 43 aa, Artificial Sequence
  Synthetic polypeptide
MLCLCPQHVETFSSRWLKSTGRSRISWKKCPALPPVPGPCVGA

SEQ ID NO: 14404 - protein, 16 aa, Artificial Sequence
  Synthetic polypeptide
CSVCVRSTWRRSLPDG

SEQ ID NO: 14405 - protein, 16 aa, Artificial Sequence
  Synthetic polypeptide
CSVCVRSTWRRSLPDG

SEQ ID NO: 14406 - protein, 16 aa, Artificial Sequence
  Synthetic polypeptide
CSVCVRSTWRRSLPDG

SEQ ID NO: 14407 - protein, 16 aa, Artificial Sequence
  Synthetic polypeptide
CSVCVRSTWRRSLPDG

SEQ ID NO: 14408 - protein, 16 aa, Artificial Sequence
  Synthetic polypeptide
CSVCVRSTWRRSLPDG

SEQ ID NO: 14409 - protein, 16 aa, Artificial Sequence
  Synthetic polypeptide
CSVCVRSTWRRSLPDG

SEQ ID NO: 14410 - protein, 16 aa, Artificial Sequence
  Synthetic polypeptide
CSVCVRSTWRRSLPDG

SEQ ID NO: 14411 - protein, 16 aa, Artificial Sequence
  Synthetic polypeptide
CSVCVRSTWRRSLPDG

SEQ ID NO: 14412 - protein, 16 aa, Artificial Sequence
  Synthetic polypeptide
CSVCVRSTWRRSLPDG

SEQ ID NO: 14413 - protein, 16 aa, Artificial Sequence
  Synthetic polypeptide
CSVCVRSTWRRSLPDG

SEQ ID NO: 14414 - protein, 16 aa, Artificial Sequence
  Synthetic polypeptide
CSVCVRSTWRRSLPDG

SEQ ID NO: 14415 - protein, 16 aa, Artificial Sequence
  Synthetic polypeptide
CSVCVRSTWRRSLPDG

SEQ ID NO: 14416 - protein, 16 aa, Artificial Sequence
  Synthetic polypeptide
CSVCVRSTWRRSLPDG

SEQ ID NO: 14417 - protein, 16 aa, Artificial Sequence
  Synthetic polypeptide
CSVCVRSTWRRSLPDG

SEQ ID NO: 14418 - protein, 16 aa, Artificial Sequence
  Synthetic polypeptide
CSVCVRSTWRRSLPDG

SEQ ID NO: 14419 - protein, 16 aa, Artificial Sequence
  Synthetic polypeptide
CSVCVRSTWRRSLPDG

SEQ ID NO: 14420 - protein, 42 aa, Artificial Sequence
  Synthetic polypeptide
ALFVSAARGDVLFQMAEVHRQIQNQLEEMPCPASCSGSMCWS

SEQ ID NO: 14421 - protein, 30 aa, Artificial Sequence
  Synthetic polypeptide
MLCLCPQHVETFSSRWLKSTGRSRISWKKC

SEQ ID NO: 14422 - protein, 30 aa, Artificial Sequence; identical to SEQ ID NO: 14421
  Synthetic polypeptide

SEQ ID NO: 14423 - protein, 30 aa, Artificial Sequence; identical to SEQ ID NO: 14421
  Synthetic polypeptide

SEQ ID NO: 14424 - protein, 30 aa, Artificial Sequence; identical to SEQ ID NO: 14421
  Synthetic polypeptide

SEQ ID NO: 14425 - protein, 30 aa, Artificial Sequence; identical to SEQ ID NO: 14421
  Synthetic polypeptide

SEQ ID NO: 14426 - protein, 30 aa, Artificial Sequence; identical to SEQ ID NO: 14421
  Synthetic polypeptide

SEQ ID NO: 14427 - protein, 30 aa, Artificial Sequence; identical to SEQ ID NO: 14421
  Synthetic polypeptide

SEQ ID NO: 14428 - protein, 30 aa, Artificial Sequence; identical to SEQ ID NO: 14421
  Synthetic polypeptide

SEQ ID NO: 14429 - protein, 30 aa, Artificial Sequence; identical to SEQ ID NO: 14421
  Synthetic polypeptide

SEQ ID NO: 14430 - protein, 30 aa, Artificial Sequence; identical to SEQ ID NO: 14421
  Synthetic polypeptide

SEQ ID NO: 14431 - protein, 30 aa, Artificial Sequence; identical to SEQ ID NO: 14421
  Synthetic polypeptide

SEQ ID NO: 14432 - protein, 30 aa, Artificial Sequence; identical to SEQ ID NO: 14421
  Synthetic polypeptide

SEQ ID NO: 14433 - protein, 30 aa, Artificial Sequence; identical to SEQ ID NO: 14421
  Synthetic polypeptide

SEQ ID NO: 14434 - protein, 30 aa, Artificial Sequence; identical to SEQ ID NO: 14421
  Synthetic polypeptide

SEQ ID NO: 14435 - protein, 30 aa, Artificial Sequence; identical to SEQ ID NO: 14421
  Synthetic polypeptide

SEQ ID NO: 14436 - protein, 73 aa, Artificial Sequence
  Synthetic polypeptide
ALFVSAARGDVLFQMAEVHRQIQNQLEEMLKSFHNELLTQLEQKVELDSRYLSAALKKYQTEQRSKGDALDKC

SEQ ID NO: 14437 - protein, 457 aa, Artificial Sequence
  Synthetic polypeptide
ALFVSAARGDVLFQMAEVHRQIQNQLEEMLKSFHNELLTQLEQKVELDSRYLSAALKKYQTEQRSKGDALDKCQAELKKLRKKSQGSKNPQKYSDKELQYIDAISNKQGELENYVSDGYKTALTEERRRFCFLVEKQCAVAKNSAAYHSKGKELLAQKLPLWQQACADPSKIPERAVQLMQQVASNGATLPSALSASKSNLVISDPIPGAKPLPVPPELAPFVGRMSAQESTPIMNGVTGPDGEDYSPWADRKAAQPKSLSPPQSQSKLSDSYSNTLPVRKSVTPKNSYATTENKTLPRSSSMAAGLERNGRMRVKAIFSHAAGDNSTLLSFKEGDLITLLVPEARDGWHYGESEKTKMRGWFPFSYTRVLDSDGSDRLHMSLQQGKSSSTGNLLDKDDLAIPPPDYGAASRAFPAQTASGFKQRPYSVAVPAFSQGLDDYGARSMSSGSGTLVSTV

SEQ ID NO: 14438 - protein, 52 aa, Artificial Sequence
  Synthetic polypeptide
ALFVSAARGDVLFQMAEVHRQIQNQLEEMLKSFHNELLTQLEQKVELDSRLR

SEQ ID NO: 14439 - protein, 52 aa, Artificial Sequence; identical to SEQ ID NO: 14438
  Synthetic polypeptide

SEQ ID NO: 14440 - protein, 470 aa, Artificial Sequence
  Synthetic polypeptide
ALFVSAARGDVLFQMAEVHRQIQNQLEEMLKSFHNELLTQLEQKVELDSRYLSAALKKYQTEQRSKGDALDKCQAELKKLRKKSQGSKNPQKYSDKELQYIDAISNKQGELENYVSDGYKTALTEERRRFCFLVEKQCAVAKNSAAYHSKGKELLAQKLPLWQQACADPSKIPERAVQLMQQVASNGATLPSALSASKSNLVISDPIPGAKPLPVPPELAPFVGRMSAQESTPIMNGVTGPDGEDYSPWADRKAAQPKSLSPPQSQSKLSDSYSNTLPVRKSVTPKNSYATTENKTLPRSSSMAAGLERNGRMRVKAIFSHAAGDNSTLLSFKEGDLITLLVPEARDGWHYGESEKTKMRGWFPFSYTRVLDSDGSDRLHMSLQQGKSSSTGNLLDKDDLAIPPPDYGAASRAFPAQTASGFKQRPYSVAVPAFSQGLDDYGARSMSRNPFAHVQLKPTVTNDRSAPLLS

SEQ ID NO: 14441 - protein, 448 aa, Artificial Sequence
  Synthetic polypeptide
ALFVSAARGDVLFQMAEVHRQIQNQLEEMLKSFHNELLTQLEQKVELDSRYLSAALKKYQTEQRSKGDALDKCQAELKKLRKKSQGSKNPQKYSDKELQYIDAISNKQGELENYVSDGYKTALTEERRRFCFLVEKQCAVAKNSAAYHSKGKELLAQKLPLWQQACADPSKIPERAVQLMQQVASNGATLPSALSASKSNLVISDPIPGAKPLPVPPELAPFVGRMSAQESTPIMNGVTGPDGEDYSPWADRKAAQPKSLSPPQSQSKLSDSYSNTLPVRKSVTPKNSYATTENKTLPRSSSMAAGLERNGRMRVKAIFSHAAGDNSTLLSFKEGDLITLLVPEARDGWHYGESEKTKMRGWFPFSYTRVLDSDGSDRLHMSLQQGKSSSTGNLLDKDDLAIPPPDYGAASRAFPAQTASGFKQRPYSVAVPAFSQGLDDYGARSMSR

SEQ ID NO: 14442 - protein, 456 aa, Artificial Sequence
  Synthetic polypeptide
ALFVSAARGDVLFQMAEVHRQIQNQLEEMLKSFHNELLTQLEQKVELDSRYLSAALKKYQTEQRSKGDALDKCQAELKKLRKKSQGSKNPQKYSDKELQYIDAISNKQGELENYVSDGYKTALTEERRRFCFLVEKQCAVAKNSAAYHSKGKELLAQKLPLWQQACADPSKIPERAVQLMQQVASNGATLPSALSASKSNLVISDPIPGAKPLPVPPELAPFVGRMSAQESTPIMNGVTGPDGEDYSPWADRKAAQPKSLSPPQSQSKLSDSYSNTLPVRKSVTPKNSYATTENKTLPRSSSMAAGLERNGRMRVKAIFSHAAGDNSTLLSFKEGDLITLLVPEARDGWHYGESEKTKMRGWFPFSYTRVLDSDGSDRLHMSLQQGKSSSTGNLLDKDDLAIPPPDYGAASRAFPAQTASGFKQRPYSVAVPAFSQGLDDYGARSMSSADVEVARF

SEQ ID NO: 14443 - protein, 456 aa, Artificial Sequence; identical to SEQ ID NO: 14442
  Synthetic polypeptide

SEQ ID NO: 14444 - protein, 488 aa, Artificial Sequence
  Synthetic polypeptide
ALFVSAARGDVLFQMAEVHRQIQNQLEEMLKSFHNELLTQLEQKVELDSRYLSAALKKYQTEQRSKGDALDKCQAELKKLRKKSQGSKNPQKYSDKELQYIDAISNKQGELENYVSDGYKTALTEERRRFCFLVEKQCAVAKNSAAYHSKGKELLAQKLPLWQQACADPSKIPERAVQLMQQVASNGATLPSALSASKSNLVISDPIPGAKPLPVPPELAPFVGRMSAQESTPIMNGVTGPDGEDYSPWADRKAAQPKSLSPPQSQSKLSDSYSNTLPVRKSVTPKNSYATTENKTLPRSSSMAAGLERNGRMRVKAIFSHAAGDNSTLLSFKEGDLITLLVPEARDGWHYGESEKTKMRGWFPFSYTRVLDSDGSDRLHMSLQQGKSSSTGNLLDKDDLAIPPPDYGAASRAFPAQTASGFKQRPYSVAVPAFSQGLDDYGARSMSRNPFAHVQLKPTVTNDRCDLSAQGPEGREHGDGSARTLAGR

SEQ ID NO: 14445 - protein, 96 aa, Artificial Sequence
  Synthetic polypeptide
ALFVSAARGDVLFQMAEVHRQIQNQLEEMLKSFHNELLTQLEQKVELDSRYLSAALKKYQTEQRSKGDALDKCQAELKKLRKKSQGSKNPQKYSDK

SEQ ID NO: 14446 - protein, 131 aa, Artificial Sequence
  Synthetic polypeptide
ALFVSAARGDVLFQMAEVHRQIQNQLEEMLKSFHNELLTQLEQKVELDSRYLSAALKKYQTEQRSKGDALDKCQAELKKLRKKSQGSKNPQKYSDKELQYIDAISNKQGELENYVSDGYKTALTEERRRFC

SEQ ID NO: 14447 - protein, 129 aa, Artificial Sequence
  Synthetic polypeptide
ALFVSAARGDVLFQMAEVHRQIQNQLEEMLKSFHNELLTQLEQKVELDSRYLSAALKKYQTEQRSKGDALDKCQAELKKLRKKSQGSKNPQKYSDKELQYIDAISNKQGELENYVSDGYKTALTEERRR

SEQ ID NO: 14448 - protein, 108 aa, Artificial Sequence
  Synthetic polypeptide
ALFVSAARGDVLFQMAEVHRQIQNQLEEMLKSFHNELLTQLEQKVELDSRYLSAALKKYQTEQRSKGDALDKCQAELKKLRKKSQGSKNPQKYSDKELQYIDAISNKQ

SEQ ID NO: 14449 - protein, 228 aa, Artificial Sequence
  Synthetic polypeptide
ALFVSAARGDVLFQMAEVHRQIQNQLEEMLKSFHNELLTQLEQKVELDSRYLSAALKKYQTEQRSKGDALDKCQAELKKLRKKSQGSKNPQKYSDKELQYIDAISNKQGELENYVSDGYKTALTEERRRFCFLVEKQCAVAKNSAAYHSKGKELLAQKLPLWQQACADPSKIPERAVQLMQQVASNGATLPSALSASKSNLVISDPIPGAKPLPVPPELAPFVGRMSA

SEQ ID NO: 14450 - protein, 174 aa, Artificial Sequence
  Synthetic polypeptide
ALFVSAARGDVLFQMAEVHRQIQNQLEEMLKSFHNELLTQLEQKVELDSRYLSAALKKYQTEQRSKGDALDKCQAELKKLRKKSQGSKNPQKYSDKELQYIDAISNKQGELENYVSDGYKTALTEERRRFCFLVEKQCAVAKNSAAYHSKGKELLAQKLPLWQQACADPSKIPE

SEQ ID NO: 14451 - protein, 17 aa, Artificial Sequence
  Synthetic polypeptide
SYRFGRLRPRRRWREAV

SEQ ID NO: 14452 - protein, 25 aa, Artificial Sequence
  Synthetic polypeptide
WVWWRVPVILPLWEAEAKKTLEGGC

SEQ ID NO: 14453 - protein, 25 aa, Artificial Sequence
  Synthetic polypeptide
WVWWRVPVILPLWEAEAKKTLEGGC

SEQ ID NO: 14454 - protein, 46 aa, Artificial Sequence
  Synthetic polypeptide
SYRFGRLRPRRRWREAVRRDSELHTCLLPWVQSPSPDGPWWHISNA

SEQ ID NO: 14455 - protein, 34 aa, Artificial Sequence
  Synthetic polypeptide
GWAQWLTPVIPALWKAKSTHLSTGRRTPSSPPSS

SEQ ID NO: 14456 - protein, 34 aa, Artificial Sequence; identical to SEQ ID NO: 14455
  Synthetic polypeptide

SEQ ID NO: 14457 - protein, 34 aa, Artificial Sequence; identical to SEQ ID NO: 14455
  Synthetic polypeptide

SEQ ID NO: 14458 - protein, 34 aa, Artificial Sequence; identical to SEQ ID NO: 14455
  Synthetic polypeptide

SEQ ID NO: 14459 - protein, 11 aa, Artificial Sequence
  Synthetic polypeptide
SQHFGRPRARI

SEQ ID NO: 14460 - protein, 11 aa, Artificial Sequence
  Synthetic polypeptide
SQHFGRPRARI

SEQ ID NO: 14461 - protein, 11 aa, Artificial Sequence
  Synthetic polypeptide
SQHFGRPRARI

SEQ ID NO: 14462 - protein, 11 aa, Artificial Sequence
  Synthetic polypeptide
SQHFGRPRARI

SEQ ID NO: 14463 - protein, 467 aa, Artificial Sequence
  Synthetic polypeptide
MGAVAHTCNPSTLEGQEHAFEHWQEDAFFASQFLNGLNPVLIRRCHYLPKNFPVTDAMVASVLGPGTSLQAELEKGSLFLVDHGILSGIQTNVINGKPQFSAAPMTLLYQSPGCGPLLPLAIQLSQTPGPNSPIFLPTDDKWDWLLAKTWVRNAEFSFHEALTHLLHSHLLPEVFTLATLRQLPHCHPLFKLLIPHTRYTLHINTLARELLIVPGQVVDRSTGIGIEGFSELIQRNMKQLNYSLLCLPEDIRTRGVEDIPGYYYRDDGMQIWGAVERFVSEIIGIYYPSDESVQDDRELQAWVREIFSKGFLNQESSGIPSSLETREALVQYVTMVIFTCSAKHAAVSAGQFDSCAWMPNLPPSMQLPPPTSKGLATCEGFIATLPPVNATCDVILALWLLSKEPGDQRPLGTYPDEHFTEEAPRRSIATFQSRLAQISRGIQERNQGLVLPYTYLDPPLIENSVSI

SEQ ID NO: 14464 - protein, 455 aa, Artificial Sequence
  Synthetic polypeptide
MGAVAHTCNPSTLEGQEHAFEHWQEDAFFASQFLNGLNPVLIRRCHYLPKNFPVTDAMVASVLGPGTSLQAELEKGSLFLVDHGILSGIQTNVINGKPQFSAAPMTLLYQSPGCGPLLPLAIQLSQTPGPNSPIFLPTDDKWDWLLAKTWVRNAEFSFHEALTHLLHSHLLPEVFTLATLRQLPHCHPLFKLLIPHTRYTLHINTLARELLIVPGQVVDRSTGIGIEGFSELIQRNMKQLNYSLLCLPEDIRTRGVEDIPGYYYRDDGMQIWGAVERDESVQDDRELQAWVREIFSKGFLNQESSGIPSSLETREALVQYVTMVIFTCSAKHAAVSAGQFDSCAWMPNLPPSMQLPPPTSKGLATCEGFIATLPPVNATCDVILALWLLSKEPGDQRPLGTYPDEHFTEEAPRRSIATFQSRLAQISRGIQERNQGLVLPYTYLDPPLIENSVSI

SEQ ID NO: 14465 - protein, 438 aa, Artificial Sequence
  Synthetic polypeptide
MGAVAHTCNPSTLEGQEHAFEHWQEDAFFASQFLNGLNPVLIRRCHYLPKNFPVTDAMVASVLGPGTSLQAELEKGSLFLVDHGILSGIQTNVINGKPQFSAAPMTLLYQSPGCGPLLPLAIQLSQTPGPNSPIFLPTDDKWDWLLAKTWVRNAEFSFHEALTHLLHSHLLPEVFTLATLRQLPHCHPLFKSTGIGIEGFSELIQRNMKQLNYSLLCLPEDIRTRGVEDIPGYYYRDDGMQIWGAVERFVSEIIGIYYPSDESVQDDRELQAWVREIFSKGFLNQESSGIPSSLETREALVQYVTMVIFTCSAKHAAVSAGQFDSCAWMPNLPPSMQLPPPTSKGLATCEGFIATLPPVNATCDVILALWLLSKEPGDQRPLGTYPDEHFTEEAPRRSIATFQSRLAQISRGIQERNQGLVLPYTYLDPPLIENSVSI

SEQ ID NO: 14466 - protein, 393 aa, Artificial Sequence
  Synthetic polypeptide
MGAVAHTCNPSTLEGQEHAFEHWQEDAFFASQFLNGLNPVLIRRCHYLPKNFPVTDAMVASVLGPGTSLQAELEKGSLFLVDHGILSGIQTNVINGKPQFSAAPMTLLYQSPGCGPLLPLAIQLSQTPGPNSPIFLPTDDKWDWLLAKTWVRNAEFSFHEALTHLLHSHLLPEVFTLATLRQLPHCHPLFKSTGIGIEGFSELIQRNMKQLNYSLLCLPEDIRTRGVEDIPGYYYRDDGMQIWGIPSSLETREALVQYVTMVIFTCSAKHAAVSAGQFDSCAWMPNLPPSMQLPPPTSKGLATCEGFIATLPPVNATCDVILALWLLSKEPGDQRPLGTYPDEHFTEEAPRRSIATFQSRLAQISRGIQERNQGLVLPYTYLDPPLIENSVSI

SEQ ID NO: 14467 - protein, 128 aa, Artificial Sequence
  Synthetic polypeptide
GRARWLTPVIPALWEAEVGESRGQEMETILTNMFVMDASDPTQLSASCVQLLGLLSAEQLAEASVLILFNKIDLPCYMSTEEMKSLIRLPDIIACAKQNITTAEISAREGTGLAGVLAWLQATHRAND

SEQ ID NO: 14468 - protein, 128 aa, Artificial Sequence; identical to SEQ ID NO: 14467
  Synthetic polypeptide

SEQ ID NO: 14469 - protein, 128 aa, Artificial Sequence; identical to SEQ ID NO: 14467
  Synthetic polypeptide

SEQ ID NO: 14470 - protein, 4 aa, Artificial Sequence
  Synthetic polypeptide
LTCL

SEQ ID NO: 14471 - protein, 4 aa, Artificial Sequence
  Synthetic polypeptide
LTCL

SEQ ID NO: 14472 - protein, 4 aa, Artificial Sequence
  Synthetic polypeptide
LTCL

SEQ ID NO: 14473 - protein, 7 aa, Artificial Sequence
  Synthetic polypeptide
HVCDGRL

SEQ ID NO: 14474 - protein, 7 aa, Artificial Sequence
  Synthetic polypeptide
HVCDGRL

SEQ ID NO: 14475 - protein, 7 aa, Artificial Sequence
  Synthetic polypeptide
HVCDGRL

SEQ ID NO: 14476 - protein, 45 aa, Artificial Sequence
  Synthetic polypeptide
NPVSSKNTISWAWWRVPVIQLLRRLRQENRLNLGDRGYATGRMSR

SEQ ID NO: 14477 - protein, 31 aa, Artificial Sequence
  Synthetic polypeptide
TWETEVMPLDGCPGEGDVAAPSTALLGQEPP

SEQ ID NO: 14478 - protein, 130 aa, Artificial Sequence
  Synthetic polypeptide
LGVVAGACNPATPEAEAGESLEPGRQRLCHWTDVQVKGTSLPRALHCWDRSLHDSHKASKTPLKGCPVHLVDSCPWPHCNPSCPTVRDQFTGQEMNVAQFLMHMGFDMQTVAQPQGLEPSELLGMLSNGS

SEQ ID NO: 14479 - protein, 24 aa, Artificial Sequence
  Synthetic polypeptide
HPSVPGKVGQALCSWCSGCLTRHS

SEQ ID NO: 14480 - protein, 33 aa, Artificial Sequence
  Synthetic polypeptide
SLRHAWDLPALSTDTPQSQAKWDRPCVRGAVAV

SEQ ID NO: 14481 - protein, 33 aa, Artificial Sequence; identical to SEQ ID NO: 14480
  Synthetic polypeptide

SEQ ID NO: 14482 - protein, 193 aa, Artificial Sequence
  Synthetic polypeptide
GPSRCGMPGTCLPSALTPLSPRQSGTGPVFVVQWLFDEAQLTVDNVHLTGQPVQEGLRLYIQNLGRELRHTLKDVPASFAPACLSHEIIIRSHWTDVQVKGTSLPRALHCWDRSLHDSHKASKTPLKGCPVHLVDSCPWPHCNPSCPTVRDQFTGQEMNVAQFLMHMGFDMQTVAQPQGLEPSELLGMLSNGS

SEQ ID NO: 14483 - protein, 20 aa, Artificial Sequence
  Synthetic polypeptide
HPSVPGKVGQALCSWCSGCL

SEQ ID NO: 14484 - protein, 36 aa, Artificial Sequence
  Synthetic polypeptide
GPSRCGMPGTCLPSALTPLSPRQSGTGPVFVVQWLF

SEQ ID NO: 14485 - protein, 15 aa, Artificial Sequence
  Synthetic polypeptide
NGSGGHVPAAGLQPL

SEQ ID NO: 14486 - protein, 15 aa, Artificial Sequence
  Synthetic polypeptide
NGSGGHVPAAGLQPL

SEQ ID NO: 14487 - protein, 15 aa, Artificial Sequence
  Synthetic polypeptide
NGSGGHVPAAGLQPL

SEQ ID NO: 14488 - protein, 15 aa, Artificial Sequence
  Synthetic polypeptide
NGSGGHVPAAGLQPL

SEQ ID NO: 14489 - protein, 15 aa, Artificial Sequence
  Synthetic polypeptide
NGSGGHVPAAGLQPL

SEQ ID NO: 14490 - protein, 15 aa, Artificial Sequence
  Synthetic polypeptide
NGSGGHVPAAGLQPL

SEQ ID NO: 14491 - protein, 15 aa, Artificial Sequence
  Synthetic polypeptide
NGSGGHVPAAGLQPL

SEQ ID NO: 14492 - protein, 300 aa, Artificial Sequence
  Synthetic polypeptide
IPALWDAEAGGSRGQEIKTILAKTVLEDTCRRQDFNPCEYDLKFQRSVLDLSLQWRFANLPNNAKLEMVPASRSREGPENMVRIALQLDDGSRLQDSFCSGQTLWELLSHFPQIRECLQHPGGATPVCVYTRDEVTGEAALRGTTLQSLGLTGGSATIRFVMKCYDPVGKTPGSLGSSASAGQAAASAPLPLESGELSRGDLSRPEDADTSGPCCEHTQEKQSTRAPAAAPFVPFSGGGQRLGGPPGPTRPLTSSSAKLPKSLSSPGGPSKPKKSKSGQDPQQEQEQERERDPQQEQERE

SEQ ID NO: 14493 - protein, 50 aa, Artificial Sequence
  Synthetic polypeptide
MGAVAHACKSQHCGMPRRVDHEVKRSRPSWLKRFWRTRAGGRTSTPVNMI

SEQ ID NO: 14494 - protein, 50 aa, Artificial Sequence; identical to SEQ ID NO: 14493
  Synthetic polypeptide

SEQ ID NO: 14495 - protein, 50 aa, Artificial Sequence; identical to SEQ ID NO: 14493
  Synthetic polypeptide

SEQ ID NO: 14496 - protein, 50 aa, Artificial Sequence; identical to SEQ ID NO: 14493
  Synthetic polypeptide

SEQ ID NO: 14497 - protein, 50 aa, Artificial Sequence; identical to SEQ ID NO: 14493
  Synthetic polypeptide

SEQ ID NO: 14498 - protein, 50 aa, Artificial Sequence; identical to SEQ ID NO: 14493
  Synthetic polypeptide

SEQ ID NO: 14499 - protein, 50 aa, Artificial Sequence; identical to SEQ ID NO: 14493
  Synthetic polypeptide

SEQ ID NO: 14500 - protein, 637 aa, Artificial Sequence
  Synthetic polypeptide
IPALWDAEAGGSRGQEIKTILAKTVLEDTCRRQDFNPCEYDLKFQRSVLDLSLQWRFANLPNNAKLEMVPASRSREGPENMVRIALQLDDGSRLQDSFCSGQTLWELLSHFPQIRECLQHPGGATPVCVYTRDEVTGEAALRGTTLQSLGLTGGSATIRFVMKCYDPVGKTPGSLGSSASAGQAAASAPLPLESGELSRGDLSRPEDADTSGPCCEHTQEKQSTRAPAAAPFVPFSGGGQRLGGPPGPTRPLTSSSAKLPKSLSSPGGPSKPKKSKSGQDPQQEQEQERERDPQQEQERERPVDREPVDREPVVCHPDLEERLQAWPAELPDEFFELTVDDVRRRLAQLKSERKRLEEAPLVTKAFREAQIKEKLERYPKVALRVLFPDRYVLQGFFRPSETVGDLRDFVRSHLGNPELSFYLFITPPKTVLDDHTQTLFQPQLGDRVAPFTLGPSLKRCLGPEQRTRLPVVGDGGDVDSGRLLFWGPSRGRASPSTGQPPCHPVCRPSSPPSPRPSSGDPSRVKAGHKHVGTGRANLFPAALVHLGAEEPAGVYLEPGLLEHAISPSAADVLVARYMSRAAGSPSPLPAPDPAPKSEPAAEEGALVPPEPIPGTAQPVKRSLGKVPKWLKLPASKR

SEQ ID NO: 14501 - protein, 543 aa, Artificial Sequence
  Synthetic polypeptide
IPALWDAEAGGSRGQEIKTILAKTVLEDTCRRQDFNPCEYDLKFQRSVLDLSLQWRFANLPNNAKLEMVPASRSREGPENMVRIALQLDDGSRLQDSFCSGQTLWELLSHFPQIRECLQHPGGATPVCVYTRDEVTGEAALRGTTLQSLGLTGGSATIRFVMKCYDPVGKTPGSLGSSASAGQAAASAPLPLESGELSRGDLSRPEDADTSGPCCEHTQEKQSTRAPAAAPFVPFSGGGQRLGGPPGPTRPLTSSSAKLPKSLSSPGGPSKPKKSKSGQDPQQEQEQERERDPQQEQERERPVDREPVDREPVVCHPDLEERLQAWPAELPDEFFELTVDDVRRRLAQLKSERKRLEEAPLVTKAFREAQIKEKLERYPKVALRVLFPDRYVLQGFFRPSETVGDLRDFVRSHLGNPELSFYLFITPPKTVLDDHTQTLFQANLFPAALVHLGAEEPAGVYLEPGLLEHAISPSAADVLVARYMSRAAGSPSPLPAPDPAPKSEPAAEEGALVPPEPIPGTAQPVKRSLGKVPKWLKLPASKR

SEQ ID NO: 14502 - protein, 48 aa, Artificial Sequence
  Synthetic polypeptide
IPALWDAEAGGSRGQEIKTILAKTVLEDTCRRQDFNPCEYDLKCPWAV

SEQ ID NO: 14503 - protein, 172 aa, Artificial Sequence
  Synthetic polypeptide
IPALWDAEAGGSRGQEIKTILAKTVLEDTCRRQDFNPCEYDLKFQRSVLDLSLQWRFANLPNNAKLEMVPASRSREGPENMVRIALQLDDGSRLQDSFCSGQTLWELLSHFPQIRECLQHPGGATPVCVYTRDEVGGLLLLTQSPLTFSPLSNWKICCPAAVSRAVAGDSGS

SEQ ID NO: 14504 - protein, 150 aa, Artificial Sequence
  Synthetic polypeptide
IPALWDAEAGGSRGQEIKTILAKTVLEDTCRRQDFNPCEYDLKFQRSVLDLSLQWRFANLPNNAKLEMVPASRSREGPENMVRIALQLDDGSRLQDSFCSGQTLWELLSHFPQISPWTGSPWTGSRWCATPTWRSGCRPGQRSCLMSSLS

SEQ ID NO: 14505 - protein, 197 aa, Artificial Sequence
  Synthetic polypeptide
IPALWDAEAGGSRGQEIKTILAKTVLEDTCRRQDFNPCEYDLKFQRSVLDLSLQWRFANLPNNAKLEMVPASRSREGPENMVRIALQLDDGSRLQDSFCSGQTLWELLSHFPQIRECLQHPGGATPVCVYTRDEPSPGQWRETRALESTTCFMEKEGVAGPRSPGCPETSLGALFVFSASLKAQESQKWFHLINICF

SEQ ID NO: 14506 - protein, 65 aa, Artificial Sequence
  Synthetic polypeptide
NNCLQTLDNWSNKTEIPNKTETLDESEIPDKTATLVGRETGKSSQLLQQPTGGPSRCRQALPPQG

SEQ ID NO: 14507 - protein, 65 aa, Artificial Sequence; identical to SEQ ID NO: 14506
  Synthetic polypeptide

SEQ ID NO: 14508 - protein, 65 aa, Artificial Sequence; identical to SEQ ID NO: 14506
  Synthetic polypeptide

SEQ ID NO: 14509 - protein, 96 aa, Artificial Sequence
  Synthetic polypeptide
TTRKLDKVYETTVCRHWTTGQTRPRSPTRPRPWTSPRSRTRPPPLLEGRQARAPSSSSSRQEARQDAGRHCHPRDEDSSPGKGQDHRSLPVSSCKS

SEQ ID NO: 14510 - protein, 96 aa, Artificial Sequence; identical to SEQ ID NO: 14509
  Synthetic polypeptide

SEQ ID NO: 14511 - protein, 96 aa, Artificial Sequence; identical to SEQ ID NO: 14509
  Synthetic polypeptide

SEQ ID NO: 14512 - protein, 131 aa, Artificial Sequence
  Synthetic polypeptide
FCFWPGRSYKDQTLMFLHEQLENWTKYMKQLFADIGQLVKQDRDPQQDRDPGRVRDPGQDRHPCWKGDRQELPAPPAADRRPVKMQAGIATPGMKTAAQAKAKTTGASRSHPAKAKGCQRPPKIRNYNIMD

SEQ ID NO: 14513 - protein, 131 aa, Artificial Sequence; identical to SEQ ID NO: 14512
  Synthetic polypeptide

SEQ ID NO: 14514 - protein, 115 aa, Artificial Sequence
  Synthetic polypeptide
FCFWPGRSYKDQTLMFLHEQLENWTKYMKQLFADIGQLVKQDRDPQQDRDPGRVRDPGQDRHPCWKGDRQELPAPPAADRRPVKMQAGIATPGMKTAAQAKAKTTGASRSHPAKA

SEQ ID NO: 14515 - protein, 432 aa, Artificial Sequence
  Synthetic polypeptide
NLISAKNTKIIQKGEFHKLADAKIFLSDCLACDSCMTAEEGVQLSQQNAKDFFRVLNLNKKCDTSKHKVLVVSVCPQSLPYFAAKFNLSVTDASRRLCGFLKSLGVHYVFDTTIAADFSILESQKEFVRRYRQHSEEERTLPMLTSACPGWVRYAERVLGRPITAHLCTAKSPQQVMGSLVKDYFARQQNLSPEKIFHVIVAPCYDKKLEALQESLPPALHGSRGADCVLTSGEIAQIMEQGDLSVRDAAVDTLFGDLKEDKVTRHDGASSDGHLAHIFRHAAKELFNEDVEEVTYRALRNKDFQEVTLEKNGEVVLRFAAAYGFRNIQNMILKLKKGKFPFHFVEVLACAGGCLNGRGQAQTPDGHADKALLRQMEGIYADIPVRRPESSAHVQELYQEWLEGINSPKAREVLHTTYQSQERGTHSLDIKW

SEQ ID NO: 14516 - protein, 33 aa, Artificial Sequence
  Synthetic polypeptide
DQPGQHGETLSLLKIQKLSRRENSTSWLMPRYF

SEQ ID NO: 14517 - protein, 33 aa, Artificial Sequence; identical to SEQ ID NO: 14516
  Synthetic polypeptide

SEQ ID NO: 14518 - protein, 33 aa, Artificial Sequence; identical to SEQ ID NO: 14516
  Synthetic polypeptide

SEQ ID NO: 14519 - protein, 33 aa, Artificial Sequence; identical to SEQ ID NO: 14516
  Synthetic polypeptide

SEQ ID NO: 14520 - protein, 33 aa, Artificial Sequence; identical to SEQ ID NO: 14516
  Synthetic polypeptide

SEQ ID NO: 14521 - protein, 33 aa, Artificial Sequence; identical to SEQ ID NO: 14516
  Synthetic polypeptide

SEQ ID NO: 14522 - protein, 33 aa, Artificial Sequence; identical to SEQ ID NO: 14516
  Synthetic polypeptide

SEQ ID NO: 14523 - protein, 14 aa, Artificial Sequence
  Synthetic polypeptide
KYKNYPEGRIPQVG

SEQ ID NO: 14524 - protein, 14 aa, Artificial Sequence
  Synthetic polypeptide
KYKNYPEGRIPQVG

SEQ ID NO: 14525 - protein, 14 aa, Artificial Sequence
  Synthetic polypeptide
KYKNYPEGRIPQVG

SEQ ID NO: 14526 - protein, 14 aa, Artificial Sequence
  Synthetic polypeptide
KYKNYPEGRIPQVG

SEQ ID NO: 14527 - protein, 14 aa, Artificial Sequence
  Synthetic polypeptide
KYKNYPEGRIPQVG

SEQ ID NO: 14528 - protein, 14 aa, Artificial Sequence
  Synthetic polypeptide
KYKNYPEGRIPQVG

SEQ ID NO: 14529 - protein, 14 aa, Artificial Sequence
  Synthetic polypeptide
KYKNYPEGRIPQVG

SEQ ID NO: 14530 - protein, 193 aa, Artificial Sequence
  Synthetic polypeptide
NLISAKNTKIIQKGEFHKLADAKIFLSDCLACDSCMTAEEGVQLSQQNAKDFFRVLNLNKKCDTSKHKVLVVSVCPQSLPYFAAKFNLSVTDASRRLCGFLKSLGWVRYAERVLGRPITAHLCTAKSPQQVMGSLVKDYFARQQNLSPEKIFHVIVAPCYDKKLEALQESLPPALHGSRGADCVLTSGESQAW

SEQ ID NO: 14531 - protein, 238 aa, Artificial Sequence
  Synthetic polypeptide
NLISAKNTKIIQKGEFHKLADAKIFLSDCLACDSCMTAEEGVQLSQQNAKDFFRVLNLNKKCDTSKHKVLVVSVCPQSLPYFAAKFNLSVTDASRRLCGFLKSLGVHYVFDTTIAADFSILESQKEFVRRYRQHSEEERTLPMLTSACPGWVRYAERVLGRPITAHLCTAKSPQQVMGSLVKDYFARQQNLSPEKIFHVIVAPCYDKKLEALQESLPPALHGSRGADCVLTSGESQAW

SEQ ID NO: 14532 - protein, 478 aa, Artificial Sequence
  Synthetic polypeptide
NLISAKNTKIIQKGEFHKLADAKIFLSDCLACDSCMTAEEGVQLSQQNAKDFFRVLNLNKKCDTSKHKVLVVSVCPQSLPYFAAKFNLSVTDASRRLCGFLKSLGVHYVFDTTIAADFSILESQKEFVRRYRQHSEEERTLPMLTSACPGWVRYAERVLGRPITAHLCTAKSPQQVMGSLVKDYFARQQVQEEMGSAFPVLPGGSTGWGALQMFGRTTPSPEGGSRQTWMECWCSNLSPEKIFHVIVAPCYDKKLEALQESLPPALHGSRGADCVLTSGEIAQIMEQGDLSVRDAAVDTLFGDLKEDKVTRHDGASSDGHLAHIFRHAAKELFNEDVEEVTYRALRNKDFQEVTLEKNGEVVLRFAAAYGFRNIQNMILKLKKGKFPFHFVEVLACAGGCLNGRGQAQTPDGHADKALLRQMEGIYADIPVRRPESSAHVQELYQEWLEGINSPKAREVLHTTYQSQERGTHSLDIKW

SEQ ID NO: 14533 - protein, 119 aa, Artificial Sequence
  Synthetic polypeptide
NLISAKNTKIIQKGEFHKLADAKIFLSDCLACDSCMTAEEGVQLSQQNAKDFFRVLNLNKKCDTSKHKVLVVSVCPQSLPYFAAKFNLSVTDASRRLCGFLKSLGMLPFPSSLQACRFP

SEQ ID NO: 14534 - protein, 238 aa, Artificial Sequence
  Synthetic polypeptide
NLISAKNTKIIQKGEFHKLADAKIFLSDCLACDSCMTAEEGVQLSQQNAKDFFRVLNLNKKCDTSKHKVLVVSVCPQSLPYFAAKFNLSVTDASRRLCGFLKSLGWVRYAERVLGRPITAHLCTAKSPQQVMGSLVKDYFARQQNLSPEKIFHVIVAPCYDKKLEALQESLPPALHGSRGADCVLTSGEIAQIMEQGDLSVRDAAVDTLFGDLKEDKVTRHDGASSDGHLAHIFRHAA

SEQ ID NO: 14535 - protein, 164 aa, Artificial Sequence
  Synthetic polypeptide
NLISAKNTKIIQKGEFHKLADAKIFLSDCLACDSCMTAEEGVQLSQQNAKDFFRVLNLNKKCDTSKHKVLVVSVCPQSLPYFAAKFNLSVTDASRRLCGFLKSLGVHYVFDTTIAADFSILESQKEFVRRYRQHSEEERTLPMLTSACPGMLPFPSSLQACRFP

SEQ ID NO: 14536 - protein, 22 aa, Artificial Sequence
  Synthetic polypeptide
TREAEVTARQDCTTGLQPGRRR

SEQ ID NO: 14537 - protein, 22 aa, Artificial Sequence
  Synthetic polypeptide
TREAEVTARQDCTTGLQPGRRR

SEQ ID NO: 14538 - protein, 22 aa, Artificial Sequence
  Synthetic polypeptide
TREAEVTARQDCTTGLQPGRRR

SEQ ID NO: 14539 - protein, 22 aa, Artificial Sequence
  Synthetic polypeptide
TREAEVTARQDCTTGLQPGRRR

SEQ ID NO: 14540 - protein, 22 aa, Artificial Sequence
  Synthetic polypeptide
TREAEVTARQDCTTGLQPGRRR

SEQ ID NO: 14541 - protein, 22 aa, Artificial Sequence
  Synthetic polypeptide
TREAEVTARQDCTTGLQPGRRR

SEQ ID NO: 14542 - protein, 22 aa, Artificial Sequence
  Synthetic polypeptide
TREAEVTARQDCTTGLQPGRRR

SEQ ID NO: 14543 - protein, 239 aa, Artificial Sequence
  Synthetic polypeptide
CTPVITATQEAAARESLEPGRQRLQRDKIAPLDSSLGGGGEIAQIMEQGDLSVRDAAVDTLFGDLKEDKVTRHDGASSDGHLAHIFRHAAKELFNEDVEEVTYRALRNKDFQEVTLEKNGEVVLRFAAAYGFRNIQNMILKLKKGKFPFHFVEVLACAGGCLNGRGQAQTPDGHADKALLRQMEGIYADIPVRRPESSAHVQELYQEWLEGINSPKAREVLHTTYQSQERGTHSLDIKW

SEQ ID NO: 14544 - protein, 239 aa, Artificial Sequence; identical to SEQ ID NO: 14543
  Synthetic polypeptide

SEQ ID NO: 14545 - protein, 239 aa, Artificial Sequence; identical to SEQ ID NO: 14543
  Synthetic polypeptide

SEQ ID NO: 14546 - protein, 239 aa, Artificial Sequence; identical to SEQ ID NO: 14543
  Synthetic polypeptide

SEQ ID NO: 14547 - protein, 40 aa, Artificial Sequence
  Synthetic polypeptide
SQLLRRLRQENHLNPGGRGYSETRLHHWTPAWAAEVKLLK

SEQ ID NO: 14548 - protein, 40 aa, Artificial Sequence; identical to SEQ ID NO: 14547
  Synthetic polypeptide

SEQ ID NO: 14549 - protein, 40 aa, Artificial Sequence; identical to SEQ ID NO: 14547
  Synthetic polypeptide

SEQ ID NO: 14550 - protein, 40 aa, Artificial Sequence; identical to SEQ ID NO: 14547
  Synthetic polypeptide

SEQ ID NO: 14551 - protein, 40 aa, Artificial Sequence; identical to SEQ ID NO: 14547
  Synthetic polypeptide

SEQ ID NO: 14552 - protein, 40 aa, Artificial Sequence; identical to SEQ ID NO: 14547
  Synthetic polypeptide

SEQ ID NO: 14553 - protein, 40 aa, Artificial Sequence; identical to SEQ ID NO: 14547
  Synthetic polypeptide

SEQ ID NO: 14554 - protein, 61 aa, Artificial Sequence
  Synthetic polypeptide
CTPVITATQEAAARESLEPGRQRLQRDKIAPLDSSLGGGGEIAQIMEQGDLSVRDAAVDTL

SEQ ID NO: 14555 - protein, 90 aa, Artificial Sequence
  Synthetic polypeptide
CTPVITATQEAAARESLEPGRQRLQRDKIAPLDSSLGGGGEIAQIMEQGDLSVRDAAVDTLFGDLKEDKVTRHDGASSDGHLAHIFRHAA

SEQ ID NO: 14556 - protein, 162 aa, Artificial Sequence
  Synthetic polypeptide
CTPVITATQEAAARESLEPGRQRLQRDKIAPLDSSLGGGGEIAQIMEQGDLSVRDAAVDTLNKDFQEVTLEKNGEVVLRFAAAYGFRNIQNMILKLKKGKFPFHFVEVLACAGGCLNGRGQAQTPDGHADKALLRQMEGIYADIPVRRPESSAHVQELYQEW

SEQ ID NO: 14557 - protein, 98 aa, Artificial Sequence
  Synthetic polypeptide
DCAIGLQLGESRAYSRHWPRHARHCQPDHSDGTDHPGPDGDHSTTGTSRSTPATNKNCNTKRHSRGISPHCGPRPGEQWAPWPQKAPMCQLRLELPQL

SEQ ID NO: 14558 - protein, 99 aa, Artificial Sequence
  Synthetic polypeptide
AEIAPLDSSLVKVEPIPAIGHATLGTASRIIQTAQTTPVQTVTIVQQAPLGQHQLPIKTVTQNGTHVASVPTAVHGQVNNGPLGLRRPPCASSDWSCLS

SEQ ID NO: 14559 - protein, 104 aa, Artificial Sequence
  Synthetic polypeptide
DCAIGLQLGESRAYSRHWPRHARHCQPDHSDGTDHPGPDGDHSTTGTSRSTPATNKNCNTKRHSRGISPHCGPRPGEQCRGESFAHVGNTRIRIGLPAHKAPQR

SEQ ID NO: 14560 - protein, 145 aa, Artificial Sequence
  Synthetic polypeptide
AEIAPLDSSLVKVEPIPAIGHATLGTASRIIQTAQTTPVQTVTIVQQAPLGQHQLPIKTVTQNGTHVASVPTAVHGQVNNAAASPLHMLATHASASASLPTKRHNGDQPEQPELKRIKTEDGEGIVIALSVDTPPAAVREKGVQN

SEQ ID NO: 14561 - protein, 79 aa, Artificial Sequence
  Synthetic polypeptide
DCAIGLQLGESRAYSRHWPRHARHCQPDHSDGTDHPGPDGDHSTTGTSRSTPATNKNCNTKRHSRGISPHCGPRPGEQW

SEQ ID NO: 14562 - protein, 115 aa, Artificial Sequence
  Synthetic polypeptide
AEIAPLDSSLVKVEPIPAIGHATLGTASRIIQTAQTTPVQTVTIVQQAPLGQHQLPIKTVTQNGTHVASVPTAVHGQVNNGKTCWSVAPRGCGYWEQSPFSLVVSVLTVTILAFV

SEQ ID NO: 14563 - protein, 50 aa, Artificial Sequence
  Synthetic polypeptide
HSAGDGLQSKHSCRRDPEGADLRREAGCLQRGHQRQGRRLLRVLGLRACL

SEQ ID NO: 14564 - protein, 50 aa, Artificial Sequence; identical to SEQ ID NO: 14563
  Synthetic polypeptide

SEQ ID NO: 14565 - protein, 50 aa, Artificial Sequence; identical to SEQ ID NO: 14563
  Synthetic polypeptide

SEQ ID NO: 14566 - protein, 766 aa, Artificial Sequence
  Synthetic polypeptide
VDTLQVMGCSQNTVVAVILKALTYDEKRGACSVGTNVRDAACYVCWAFARAYEPQELKPFVTAISSALVIAAVFDRDINCRRAASAAFQENVGRQGTFPHGIDILTTADYFAVGNRSNCFLVISVFIAGFPEYTQPMIDHLVTMKISHWDGVIRELAARALHNLAQQAPEFSATQVFPRLLSMTLSPDLHMRHGSILACAEVAYALYKLAAQENRPVTDHLDEQAVQGLKQIHQQLYDRQLYRGLGGQLMRQAVCVLIEKLSLSKMPFRGDTVIDGWQWLINDTLRHLHLISSHSRQQMKDAAVSALAALCSEYYMKEPGEADPAIQEELITQYLAELRNPEEMTRCGFSLALGALPGFLLKGRLQQVLTGLRAVTHTSPEDVSFAESRRDGLKAIARICQTVGVKAGAPDEAVCGENVSQIYCALLGCMDDYTTDSRGDVGTWVRKAAMTSLMDLTLLLARSQPELIEAHTCERIMCCVAQQASEKIDRFRAHAASVFLTLLHFDSPPIPHVPHRGELEKLFPRSDVASVNWSAPSQAFPRITQLLGLPTYRYHVLLGLVVSLGGLTESTIRHSTQSLFEYMKGIQSDPQALGSFSGTLLQIFEDNLLNERVSVPLLKTLDHVLTHGCFDIFTTEEDHPFAVKLLALCKKEIKNSKDIQKLLSGIAVFCEMVQFPGDVRRQALLQLCLLLCHRFPLIRKTTASQVYETLLTYSDVVGADVLDEVVTVLSDTAWDAELAVVREQRNRLCDLLGVPRPQLVPQPGAC

SEQ ID NO: 14567 - protein, 10 aa, Artificial Sequence
  Synthetic polypeptide
WAAVKTQLSP

SEQ ID NO: 14568 - protein, 10 aa, Artificial Sequence
  Synthetic polypeptide
WAAVKTQLSP

SEQ ID NO: 14569 - protein, 10 aa, Artificial Sequence
  Synthetic polypeptide
WAAVKTQLSP

SEQ ID NO: 14570 - protein, 271 aa, Artificial Sequence
  Synthetic polypeptide
VDTLQVMGCSQNTVVAVILKALTYDEKRGACSVGTNVRDAACYVCWAFARAYEPQELKPFVTAISSALVIAAVFDRDINCRRAASAAFQENVGRQGTFPHGIDILTTADYFAVGNRSNCFLVISVFIAGFPEYTQPMIDHLVTMKISHWDGVIRELAARALHNLAQQAPEFSATQVFPRLLSMTLSPDLHMRHGSILACAEVAYALYKLAAQENRPVTDHLDEQAVQGLKQIHQQPCICSWGLMSPESKAEFCVCVCRISLGRQCVHLSGL

SEQ ID NO: 14571 - protein, 804 aa, Artificial Sequence
  Synthetic polypeptide
VDTLQVMGCSQNTVVAVILKALTYDEKRGACSVGTNVRDAACYVCWAFARAYEPQELKPFVTAISSALVIAAVFDRDINCRRAASAAFQENVGRQGTFPHGIDILTTADYFAVGNRSNCFLVISVFIAGFPEYTQPMIDHLVTMKISHWDGVIRELAARALHNLAQQAPEFSATQVFPRLLSMTLSPDLHMRHGSILACAEVAYALYKLAAQENRPVTDHLDEQAVQGLKQIHQQLYDRQLYRGLGGQLMRQAVCVLIEKLSLSKMPFRGDTVIDGWQWLINDTLRHLHLISSHSRQQMKDAAVSALAALCSEYYMKEPGEADPAIQEELITQYLAELRNPEEMTRCGFSLALGALPGFLLKGRLQQVLTGLRAVTHTSPEDVSFAESRRDGLKAIARICQTVGVKAGAPDEAVCGENVSQIYCALLGCMDDYTTDSRGDVGTWVRKAAMTSLMDLTLLLARSQPELIEAHTCERIMCCVAQQASEKIDRFRAHAASVFLTLLHFDSPPIPHVPHRGELEKLFPRSDVASVNWSAPSQAFPRITQLLGLPTYRYHVLLGLVVSLGGLTESTIRHSTQSLFEYMKGIQSDPQALGSFSGTLLQIFEDNLLNERVSVPLLKTLDHVLTHGCFDIFTTEEDHPFAVKLLALCKKEIKNSKDIQKLLSGIAVDFPSATLVCVGTVQMYAHTHLRLGAPGPHCAHGSALPRFCEMVQFPGDVRRQALLQLCLLLCHRFPLIRKTTASQVYETLLTYSDVVGADVLDEVVTVLSDTAWDAELAVVREQRNRLCDLLGVPRPQLVPQPGAC

SEQ ID NO: 14572 - protein, 53 aa, Artificial Sequence
  Synthetic polypeptide
CLLKVKQNFVCASVGFLWGDSVFIFLGFERFSKASVTQSSMIVSYTGVWEDSS

SEQ ID NO: 14573 - protein, 53 aa, Artificial Sequence; identical to SEQ ID NO: 14572
  Synthetic polypeptide

SEQ ID NO: 14574 - protein, 53 aa, Artificial Sequence; identical to SEQ ID NO: 14572
  Synthetic polypeptide

SEQ ID NO: 14575 - protein, 53 aa, Artificial Sequence; identical to SEQ ID NO: 14572
  Synthetic polypeptide

SEQ ID NO: 14576 - protein, 53 aa, Artificial Sequence; identical to SEQ ID NO: 14572
  Synthetic polypeptide

SEQ ID NO: 14577 - protein, 53 aa, Artificial Sequence; identical to SEQ ID NO: 14572
  Synthetic polypeptide

SEQ ID NO: 14578 - protein, 53 aa, Artificial Sequence; identical to SEQ ID NO: 14572
  Synthetic polypeptide

SEQ ID NO: 14579 - protein, 53 aa, Artificial Sequence; identical to SEQ ID NO: 14572
  Synthetic polypeptide

SEQ ID NO: 14580 - protein, 53 aa, Artificial Sequence; identical to SEQ ID NO: 14572
  Synthetic polypeptide

SEQ ID NO: 14581 - protein, 53 aa, Artificial Sequence; identical to SEQ ID NO: 14572
  Synthetic polypeptide

SEQ ID NO: 14582 - protein, 4 aa, Artificial Sequence
  Synthetic polypeptide
PRAL

SEQ ID NO: 14583 - protein, 4 aa, Artificial Sequence
  Synthetic polypeptide
PRAL

SEQ ID NO: 14584 - protein, 4 aa, Artificial Sequence
  Synthetic polypeptide
PRAL

SEQ ID NO: 14585 - protein, 4 aa, Artificial Sequence
  Synthetic polypeptide
PRAL

SEQ ID NO: 14586 - protein, 4 aa, Artificial Sequence
  Synthetic polypeptide
PRAL

SEQ ID NO: 14587 - protein, 4 aa, Artificial Sequence
  Synthetic polypeptide
PRAL

SEQ ID NO: 14588 - protein, 4 aa, Artificial Sequence
  Synthetic polypeptide
PRAL

SEQ ID NO: 14589 - protein, 4 aa, Artificial Sequence
  Synthetic polypeptide
PRAL

SEQ ID NO: 14590 - protein, 4 aa, Artificial Sequence
  Synthetic polypeptide
PRAL

SEQ ID NO: 14591 - protein, 4 aa, Artificial Sequence
  Synthetic polypeptide
PRAL

SEQ ID NO: 14592 - protein, 4 aa, Artificial Sequence
  Synthetic polypeptide
PRAL

SEQ ID NO: 14593 - protein, 541 aa, Artificial Sequence
  Synthetic polypeptide
EILKGFCDPELYDRQLYRGLGGQLMRQAVCVLIEKLSLSKMPFRGDTVIDGWQWLINDTLRHLHLISSHSRQQMKDAAVSALAALCSEYYMKEPGEADPAIQEELITQYLAELRNPEEMTRCGFSLALGALPGFLLKGRLQQVLTGLRAVTHTSPEDVSFAESRRDGLKAIARICQTVGVKAGAPDEAVCGENVSQIYCALLGCMDDYTTDSRGDVGTWVRKAAMTSLMDLTLLLARSQPELIEAHTCERIMCCVAQQASEKIDRFRAHAASVFLTLLHFDSPPIPHVPHRGELEKLFPRSDVASVNWSAPSQAFPRITQLLGLPTYRYHVLLGLVVSLGGLTESTIRHSTQSLFEYMKGIQSDPQALGSFSGTLLQIFEDNLLNERVSVPLLKTLDHVLTHGCFDIFTTEEDHPFAVKLLALCKKEIKNSKDIQKLLSGIAVFCEMVQFPGDVRRQALLQLCLLLCHRFPLIRKTTASQVYETLLTYSDVVGADVLDEVVTVLSDTAWDAELAVVREQRNRLCDLLGVPRPQLVPQPGAC

SEQ ID NO: 14594 - protein, 579 aa, Artificial Sequence
  Synthetic polypeptide
EILKGFCDPELYDRQLYRGLGGQLMRQAVCVLIEKLSLSKMPFRGDTVIDGWQWLINDTLRHLHLISSHSRQQMKDAAVSALAALCSEYYMKEPGEADPAIQEELITQYLAELRNPEEMTRCGFSLALGALPGFLLKGRLQQVLTGLRAVTHTSPEDVSFAESRRDGLKAIARICQTVGVKAGAPDEAVCGENVSQIYCALLGCMDDYTTDSRGDVGTWVRKAAMTSLMDLTLLLARSQPELIEAHTCERIMCCVAQQASEKIDRFRAHAASVFLTLLHFDSPPIPHVPHRGELEKLFPRSDVASVNWSAPSQAFPRITQLLGLPTYRYHVLLGLVVSLGGLTESTIRHSTQSLFEYMKGIQSDPQALGSFSGTLLQIFEDNLLNERVSVPLLKTLDHVLTHGCFDIFTTEEDHPFAVKLLALCKKEIKNSKDIQKLLSGIAVDFPSATLVCVGTVQMYAHTHLRLGAPGPHCAHGSALPRFCEMVQFPGDVRRQALLQLCLLLCHRFPLIRKTTASQVYETLLTYSDVVGADVLDEVVTVLSDTAWDAELAVVREQRNRLCDLLGVPRPQLVPQPGAC

SEQ ID NO: 14595 - protein, 52 aa, Artificial Sequence
  Synthetic polypeptide
EILKGFCDPELYDRQLYRGLGGQLMRQAVCVLIEKLSLSKMPFRGDTVIDGW

SEQ ID NO: 14596 - protein, 74 aa, Artificial Sequence
  Synthetic polypeptide
EILKGFCDPELYDRQLYRGLGGQLMRQAVCVLIEKLSLSKMPFRGDTVIDGWQWLINDTLRHLHLISSHSRQQM

SEQ ID NO: 14597 - protein, 74 aa, Artificial Sequence; identical to SEQ ID NO: 14596
  Synthetic polypeptide

SEQ ID NO: 14598 - protein, 45 aa, Artificial Sequence
  Synthetic polypeptide
EILKGFCDPELYDRQLYRGLGGQLMRQAVCVLIEKLSLSKMPFRG

SEQ ID NO: 14599 - protein, 80 aa, Artificial Sequence
  Synthetic polypeptide
EILKGFCDPELYDRQLYRGLGGQLMRQADLVIVPQMPPEHTVQGCHLSDVPMGARSCLLSGIKTIPHMSWTAGDLVALGV

SEQ ID NO: 14600 - protein, 167 aa, Artificial Sequence
  Synthetic polypeptide
EILKGFCDPELYDRQLYRGLGGQLMRQAVCVLIEKLSLSKMPFRGDTVIDGWQWLINDTLRHLHLISSHSRQQMKDAAVSALAALCSEYYMKEPGEADPAIQEELITQYLAELRNPEEMTRCGFSLALGALPGFLLKGRLQQVLTGLRAVTHTSPEDVSFAESRRDG

SEQ ID NO: 14601 - protein, 49 aa, Artificial Sequence
  Synthetic polypeptide
CLLKVKQNFVCASVGFLWGDSVFIFLGFERFSKASVTQSSMIVSYTGVW

SEQ ID NO: 14602 - protein, 20 aa, Artificial Sequence
  Synthetic polypeptide
EILKGFCDPELYDRQLYRGL

SEQ ID NO: 14603 - protein, 141 aa, Artificial Sequence
  Synthetic polypeptide
EILKGFCDPELYDRQLYRGLGGQLMRQAVCVLIEKLSLSKMPFRGDTVIDGWQWLINDTLRHLHLISSHSRQQMKDAAVSALAALCSEYYMKEPGEADPAIQEELITQYLAELRNPEEMTRCGFSLALGALPGFLLKGRLQ

SEQ ID NO: 14604 - protein, 155 aa, Artificial Sequence
  Synthetic polypeptide
EILKGFCDPELYDRQLYRGLGGQLMRQAVCVLIEKLSLSKMPFRGDTVIDGWQWLINDTLRHLHLISSHSRQQMKDAAVSALAALCSEYYMKEPGEADPAIQEELITQYLAELRNPEEMTRCGFSLALGALPGFLLKGRLQQVLTGLRAVTHTSP

SEQ ID NO: 14605 - protein, 139 aa, Artificial Sequence
  Synthetic polypeptide
WVSLMTSDGDIRRSFPAQALFLPAAIHVRRDFAPPLPSSMIVRPPQPCGTTVTNTFRTNNIQIQSRDQRLLTLSLDKDDQRTFRDVVRFEVAPCPEPCSGAQKSKAPWLNLHGQQEVEAIKAKPKPLLMPINTFSGIVQ

SEQ ID NO: 14606 - protein, 9 aa, Artificial Sequence
  Synthetic polypeptide
GLPSHVELQ

SEQ ID NO: 14607 - protein, 109 aa, Artificial Sequence
  Synthetic polypeptide
LCSSFAFFHDCEASPAMWNYSDQHLQDEQYPDPEPGPEAADTVAGQGRSTHFQGCGQIRGCSLPRTMFWGPEVQGTVAQFAWATGGGSNQSQAQAPSDAHQHILWYCPV

SEQ ID NO: 14608 - protein, 9 aa, Artificial Sequence
  Synthetic polypeptide
GLPSHVELQ

SEQ ID NO: 14609 - protein, 138 aa, Artificial Sequence
  Synthetic polypeptide
ISLTRSDGGIRRSFPAQALFLPAAIHLRCDLLLLAFCHDCEASPAMWNYSDQHLQDEQYPDPEPGPEAADTVAGQGRSTHFQGCGQIRGCSLPRTMFWGPEVQGTVAQFAWATGGGSNQSQAQAPSDAHQHILWYCPV

SEQ ID NO: 14610 - protein, 110 aa, Artificial Sequence
  Synthetic polypeptide
DVTCSSLPSAMIVRPPQPCGTTVTNTFRTNNIQIQSRDQRLLTLSLDKDDQRTFRDVVRFEVAPCPEPCSGAQKSKAPWLNLHGQQEVEAIKAKPKPLLMPINTFSGIVQ

SEQ ID NO: 14611 - protein, 112 aa, Artificial Sequence
  Synthetic polypeptide
AVVSSDSDSDSDLSSSSLEDRLPSTGVRDRKGDKPWKESGGSVEAPRMGFTHPPGHLSGCQSSLASGETGTGSADPPGGPRPGLTRRAPVKDTPGRAPAADAAPAGPSSCLG

SEQ ID NO: 14612 - protein, 112 aa, Artificial Sequence; identical to SEQ ID NO: 14611
  Synthetic polypeptide

SEQ ID NO: 14613 - protein, 112 aa, Artificial Sequence; identical to SEQ ID NO: 14611
  Synthetic polypeptide

SEQ ID NO: 14614 - protein, 22 aa, Artificial Sequence
  Synthetic polypeptide
SHLYEPWFPVTVTVTRILAPPA

SEQ ID NO: 14615 - protein, 22 aa, Artificial Sequence
  Synthetic polypeptide
SHLYEPWFPVTVTVTRILAPPA

SEQ ID NO: 14616 - protein, 22 aa, Artificial Sequence
  Synthetic polypeptide
SHLYEPWFPVTVTVTRILAPPA

SEQ ID NO: 14617 - protein, 27 aa, Artificial Sequence
  Synthetic polypeptide
KHHAKWKKPETKGRVLCDLIYMSRGFQ

SEQ ID NO: 14618 - protein, 27 aa, Artificial Sequence
  Synthetic polypeptide
KHHAKWKKPETKGRVLCDLIYMSRGFQ

SEQ ID NO: 14619 - protein, 27 aa, Artificial Sequence
  Synthetic polypeptide
KHHAKWKKPETKGRVLCDLIYMSRGFQ

SEQ ID NO: 14620 - protein, 118 aa, Artificial Sequence
  Synthetic polypeptide
DQPGQHKRLACKIFLILRWFGKKRREENCLGTRVRNVKFIMQICQQKKEKRNWLPAQDTDSATFHPTHQRIFGKLVFLPLRLVWKEVILRKILILVLVQKDVSLTTQYFLQKARSRRH

SEQ ID NO: 14621 - protein, 118 aa, Artificial Sequence; identical to SEQ ID NO: 14620
  Synthetic polypeptide

SEQ ID NO: 14622 - protein, 118 aa, Artificial Sequence; identical to SEQ ID NO: 14620
  Synthetic polypeptide

SEQ ID NO: 14623 - protein, 13 aa, Artificial Sequence
  Synthetic polypeptide
AQEFETSLGNTRD

SEQ ID NO: 14624 - protein, 13 aa, Artificial Sequence
  Synthetic polypeptide
AQEFETSLGNTRD

SEQ ID NO: 14625 - protein, 13 aa, Artificial Sequence
  Synthetic polypeptide
AQEFETSLGNTRD

SEQ ID NO: 14626 - protein, 13 aa, Artificial Sequence
  Synthetic polypeptide
AQEFETSLGNTRD

SEQ ID NO: 14627 - protein, 141 aa, Artificial Sequence
  Synthetic polypeptide
WLMPVIPALQEALAEESLEPRSLRPAWATQETSLQNFPHIEVVRKKEERRKLLGHTCKECEIYYADMPAEEREKKLASCSRHRFRYIPPNTPENFWEVGFPSTQTCMERGYIKEDLDPCPRPKRRQPYNAIFSPKGKEQKT

SEQ ID NO: 14628 - protein, 141 aa, Artificial Sequence; identical to SEQ ID NO: 14627
  Synthetic polypeptide

SEQ ID NO: 14629 - protein, 141 aa, Artificial Sequence; identical to SEQ ID NO: 14627
  Synthetic polypeptide

SEQ ID NO: 14630 - protein, 141 aa, Artificial Sequence; identical to SEQ ID NO: 14627
  Synthetic polypeptide

SEQ ID NO: 14631 - protein, 120 aa, Artificial Sequence
  Synthetic polypeptide
DQPGQHKRLACKIFLILRWFGKKRREENCLGTRVRNVKFIMQICQQKKEKRNWLPAQDTDSATFHPTHQRIFGKLVFLPLRLVWKEVILRKILILVLVQKDVSLTTQYFLQKARSRRHRR

SEQ ID NO: 14632 - protein, 3 aa, Artificial Sequence
  Synthetic polypeptide
EFQ

SEQ ID NO: 14633 - protein, 3 aa, Artificial Sequence
  Synthetic polypeptide
EFQ

SEQ ID NO: 14634 - protein, 3 aa, Artificial Sequence
  Synthetic polypeptide
EFQ

SEQ ID NO: 14635 - protein, 3 aa, Artificial Sequence
  Synthetic polypeptide
EFQ

SEQ ID NO: 14636 - protein, 3 aa, Artificial Sequence
  Synthetic polypeptide
EFQ

SEQ ID NO: 14637 - protein, 13 aa, Artificial Sequence
  Synthetic polypeptide
NSNSPYQWQKILL

SEQ ID NO: 14638 - protein, 13 aa, Artificial Sequence
  Synthetic polypeptide
NSNSPYQWQKILL

SEQ ID NO: 14639 - protein, 13 aa, Artificial Sequence
  Synthetic polypeptide
NSNSPYQWQKILL

SEQ ID NO: 14640 - protein, 13 aa, Artificial Sequence
  Synthetic polypeptide
NSNSPYQWQKILL

SEQ ID NO: 14641 - protein, 13 aa, Artificial Sequence
  Synthetic polypeptide
NSNSPYQWQKILL

SEQ ID NO: 14642 - protein, 298 aa, Artificial Sequence
  Synthetic polypeptide
IPIVLISGRRSFCSIFSVLPYRDSTQVGDLKLDGGRQSTGAVSLKEIIGLEGVELGADGKTVSYTQFLLPTNAFGARRNTIDSTSSFSQFRNLSHRSLSIGRASGTQGSLDTGSDLGDFMDYDPNLLDDPQWPCGKHKRVLIFPSYMTTVIDYVKPSDLKKDMNETFKEKFPHIKLTLSKIRSLKREMRKLAQEDCGLEEPTVAMAFVYFEKLALKGKLNKQNRKLCAGACVLLAAKIGSDLKKHEVKHLIDKLEEKFRLNRRELIAFEFPVLVALEFALHLPEHEVMPHYRRLVQSS

SEQ ID NO: 14643 - protein, 298 aa, Artificial Sequence; identical to SEQ ID NO: 14642
  Synthetic polypeptide

SEQ ID NO: 14644 - protein, 298 aa, Artificial Sequence; identical to SEQ ID NO: 14642
  Synthetic polypeptide

SEQ ID NO: 14645 - protein, 30 aa, Artificial Sequence
  Synthetic polypeptide
IPIVLISGRRSFCSIFSVLPYRDSTQVGQQ

SEQ ID NO: 14646 - protein, 48 aa, Artificial Sequence
  Synthetic polypeptide
IPIVLISGRRSFCSIFSVLPYRDSTQVGYVYACMLCSSLGEKISHQCT

SEQ ID NO: 14647 - protein, 10 aa, Artificial Sequence
  Synthetic polypeptide
SRLLRRRKQA

SEQ ID NO: 14648 - protein, 58 aa, Artificial Sequence
  Synthetic polypeptide
HFGRPRQVDHLRSGVQDQPGQHGETPSLLKIQNYPDMVAHACNPGYSGEGNKPEKRNK

SEQ ID NO: 14649 - protein, 701 aa, Artificial Sequence
  Synthetic polypeptide
KYKITQTWWHMPVIPATQEKETSLRKEINNLRARLQEPSAQANCCDSEKNGDIGQQIKTLDQKIERVAEATRMLNGRLDNEFDRLIVPEPDVDFDAKWNELDARINVTEKNAEEHCFYIEETLRGAINGEVGDLKQLVDQKIQSLEDRLGSVLLQMTNNTGAELSPPGAAALPGVSGSGDERVMMELNHLKDKVQVVEDICLLNIQGKPHGMEGALPNREDRAVRDSLHLLKSLNDTMHRKFQETEQTIQKLQQDFSFLYSQLNHTENDVTHLQKEMSNCRAGENAGMGRFTKVGEQERTVDTLPSPQHPVAHCCSQLEERWQRLQSQVISELDACKECTQGVQREVSMVEGRVSHMEKTCSKLDSISGNLQRIKEGLNKHVSSLWNCVRQMNGTLRSHSRDISGLKNSVQQFYSHVFQISTDLQDLVKFQPSAKAPSPPPPAEAPKEPLQPEPAPPRPSGPATAEDPGRRPVLPQRPPEERPPQPPGSTGVIAETGQAGPPAGAGVSGRGLPRGVDGQTGSGTVPGAEGFAGAPGYPKSPPVASPGAPVPSLVSFSAGLTQKPFPSDGGVVLFNKVLVNDGDVYNPSTGVFTAPYDGRYLITATLTPERDAYVEAVLSVSNASVAQLHTAGYRREFLEYHRPPGALHTCGGPGAFHLIVHLKAGDAVNVVVTGGKLAHTDFDEMYSTFSGVFLYPFLSHL

SEQ ID NO: 14650 - protein, 23 aa, Artificial Sequence
  Synthetic polypeptide
CPTLEPRLLLPGVVVNPPQSDLL

SEQ ID NO: 14651 - protein, 23 aa, Artificial Sequence
  Synthetic polypeptide
CPTLEPRLLLPGVVVNPPQSDLL

SEQ ID NO: 14652 - protein, 1108 aa, Artificial Sequence
  Synthetic polypeptide
ILHSLICFNVGSGLHLQVLSTRNENKLLPKHPHLVRQKRAWITAPVALREGEDLSKKNPIAKIHSDLAEERGLKITYKYTGKGITEPPFGIFVFNKDTGELNVTSILDREETPFFLLTGYALDARGNNVEKPLELRIKVLDINDNEPVFTQDVFVGSVEELSAAHTLVMKINATDADEPNTLNSKISYRIVSLEPAYPPVFYLNKDTGEIYTTSVTLDREEHSSYTLTVEARDGNGEVTDKPVKQAQVQIRILDVNDNIPVVENKVLEGMVEENQVNVEVTRIKVFDADEIGSDNWLANFTFASGNEGGYFHIETDAQTNEGIVTLIKEVDYEEMKNLDFSVIVANKAAFHKSIRSKYKPTPIPIKVKVKNVKEGIHFKSSVISIYVSESMDRSSKGQIIGNFQAFDEDTGLPAHARYVKLEDRDNWISVDSVTSEIKLAKLPDFESRYVQNGTYTVKIVAISEDYPRKTITGTVLINVEDINDNCPTLIEPVQTICHDAEYVNVTAEDLDGHPNSGPFSFSVIDKPPGMAEKWKIARQESTSVLLQQSEKKLGRSEIQFLISDNQGFSCPEKQVLTLTVCECLHGSGCREAQHDSYVGLGPAAIALMILAFLLLLLVPLLLLMCHCGKGAKGFTPIPGTIEMLHPWNNEGAPPEDKVVPSFLPVDQGGSLVGRNGVGGMAKEATMKGSSSASIVKGQHEMSEMDGRWEEHRSLLSGRATQFTGATGAIMTTETTKTARATGASRDMAGAQAAAVALNEEFLRNYFTDKAASYTEEDENHTAKDCLLVYSQEETESLNASIGCCSFIEGELDDRFLDDLGLKFKTLAEVCLGQKIDINKEIEQRQKPATETSMNTASHSLCEQTMVNSENTYSSGSSFPVPKSLQEANAEKVTQEIVTERSVSSRQAQKVATPLPDPMASRNVIATETSYVTGSTMPPTTVILGPSQPQSLIVTERVYAPASTLVDQPYANEGTVVVTERVIQPHGGGSNPLEGTQHLQDVPYVMVRERESFLAPSSGVQPTLAMPNIAVGQNVTVTERVLAPASTLQSSYQIPTENSMTARNTTVSGAGVPGPLPDFGLEESGHSNSTITTSSTRVTKHSTVQHSYS

SEQ ID NO: 14653 - protein, 222 aa, Artificial Sequence
  Synthetic polypeptide
ILHSLICFNVGSGLHLQVLSTRNENKLLPKHPHLVRQKRAWITAPVALREGEDLSKKNPIAKIHSDLAEERGLKITYKYTGKGITEPPFGIFVFNKDTGELNVTSILDREETPFFLLTGYALDARGNNVEKPLELRIKVLDINDNEPVFTQDVFVGSVEELSAAHTLVMKINATDADEPNTLNSKISYRIVSLEPAYPPVFYLNKDTGEIYTTSVTLDREVS

SEQ ID NO: 14654 - protein, 12 aa, Artificial Sequence
  Synthetic polypeptide
VRAVLLESEITC

SEQ ID NO: 14655 - protein, 12 aa, Artificial Sequence
  Synthetic polypeptide
VRAVLLESEITC

SEQ ID NO: 14656 - protein, 12 aa, Artificial Sequence
  Synthetic polypeptide
VRAVLLESEITC

SEQ ID NO: 14657 - protein, 12 aa, Artificial Sequence
  Synthetic polypeptide
VRAVLLESEITC

SEQ ID NO: 14658 - protein, 12 aa, Artificial Sequence
  Synthetic polypeptide
VRAVLLESEITC

SEQ ID NO: 14659 - protein, 12 aa, Artificial Sequence
  Synthetic polypeptide
VRAVLLESEITC

SEQ ID NO: 14660 - protein, 12 aa, Artificial Sequence
  Synthetic polypeptide
VRAVLLESEITC

SEQ ID NO: 14661 - protein, 12 aa, Artificial Sequence
  Synthetic polypeptide
VRAVLLESEITC

SEQ ID NO: 14662 - protein, 12 aa, Artificial Sequence
  Synthetic polypeptide
VRAVLLESEITC

SEQ ID NO: 14663 - protein, 12 aa, Artificial Sequence
  Synthetic polypeptide
VRAVLLESEITC

SEQ ID NO: 14664 - protein, 12 aa, Artificial Sequence
  Synthetic polypeptide
VRAVLLESEITC

SEQ ID NO: 14665 - protein, 12 aa, Artificial Sequence
  Synthetic polypeptide
VRAVLLESEITC

SEQ ID NO: 14666 - protein, 12 aa, Artificial Sequence
  Synthetic polypeptide
VRAVLLESEITC

SEQ ID NO: 14667 - protein, 12 aa, Artificial Sequence
  Synthetic polypeptide
VRAVLLESEITC

SEQ ID NO: 14668 - protein, 12 aa, Artificial Sequence
  Synthetic polypeptide
VRAVLLESEITC

SEQ ID NO: 14669 - protein, 396 aa, Artificial Sequence
  Synthetic polypeptide
NQKSPAKKLTNALSKSLSCASSREPLHPMFPDQPEKPLNLAHIVDTWPPRPVTSMNDTLFSHSVPSSGSPFITRSMLESSNRLDEEHRLIARYAARLAAESSSSQPPQQRSAPDISFTIDANKQQRQLIAELENKNREILQEIQRLRLEHEQASQPTPEKAQQNPTLLAELRLLRQRKDELEQRMSALQESRRELMVQLEGLMKLLKTQGAGSPRSSPSHTISRPIPMPIRSASACSTPTHTPQDSLTGVGGDVQEAFAQSSRRNLRNDLLVAADSITNTMSSLVKELNSEVGSETESNVDSEFARTQFEDLVPSPTSEKAFLAQIHARKPGYIHSGATTSTMRGDMVTEDADPYVQPEDENYENDSVRQLENELQMEEYLKQKLQDEAYQVSLQG

SEQ ID NO: 14670 - protein, 396 aa, Artificial Sequence; identical to SEQ ID NO: 14669
  Synthetic polypeptide

SEQ ID NO: 14671 - protein, 41 aa, Artificial Sequence
  Synthetic polypeptide
MHLDSRKIFHSSSFQAYFLTNHFLFLSESSPSRIRNHLLRS

SEQ ID NO: 14672 - protein, 41 aa, Artificial Sequence; identical to SEQ ID NO: 14671
  Synthetic polypeptide

SEQ ID NO: 14673 - protein, 41 aa, Artificial Sequence; identical to SEQ ID NO: 14671
  Synthetic polypeptide

SEQ ID NO: 14674 - protein, 41 aa, Artificial Sequence; identical to SEQ ID NO: 14671
  Synthetic polypeptide

SEQ ID NO: 14675 - protein, 41 aa, Artificial Sequence; identical to SEQ ID NO: 14671
  Synthetic polypeptide

SEQ ID NO: 14676 - protein, 41 aa, Artificial Sequence; identical to SEQ ID NO: 14671
  Synthetic polypeptide

SEQ ID NO: 14677 - protein, 41 aa, Artificial Sequence; identical to SEQ ID NO: 14671
  Synthetic polypeptide

SEQ ID NO: 14678 - protein, 41 aa, Artificial Sequence; identical to SEQ ID NO: 14671
  Synthetic polypeptide

SEQ ID NO: 14679 - protein, 41 aa, Artificial Sequence; identical to SEQ ID NO: 14671
  Synthetic polypeptide

SEQ ID NO: 14680 - protein, 41 aa, Artificial Sequence; identical to SEQ ID NO: 14671
  Synthetic polypeptide

SEQ ID NO: 14681 - protein, 41 aa, Artificial Sequence; identical to SEQ ID NO: 14671
  Synthetic polypeptide

SEQ ID NO: 14682 - protein, 41 aa, Artificial Sequence; identical to SEQ ID NO: 14671
  Synthetic polypeptide

SEQ ID NO: 14683 - protein, 41 aa, Artificial Sequence; identical to SEQ ID NO: 14671
  Synthetic polypeptide

SEQ ID NO: 14684 - protein, 41 aa, Artificial Sequence; identical to SEQ ID NO: 14671
  Synthetic polypeptide

SEQ ID NO: 14685 - protein, 41 aa, Artificial Sequence; identical to SEQ ID NO: 14671
  Synthetic polypeptide

SEQ ID NO: 14686 - protein, 84 aa, Artificial Sequence
  Synthetic polypeptide
NQKSPAKKLTNALSKSLSCASSREPLHPMFPDQPEKPLNLAHIVDTWPPRPVTSMNDTLFSHSVPSSGSPFITRSSDGAFGGCV

SEQ ID NO: 14687 - protein, 434 aa, Artificial Sequence
  Synthetic polypeptide
NQKSPAKKLTNALSKSLSCASSREPLHPMFPDQPEKPLNLAHIVPPRPVTSMNDTLFSHSVPSSGSPFITRSMLESSNRLDEEHRLIARYAARLAAESSSSQPPQQRSAPDISFTIDANKQQRQLIAELENKNREILQEIQRLRLEHEQASQPTPEKAQQNPTLLAELRLLRQRKDELEQRMSALQESRRELMVQLEGLMKLLKTQGAGSPRSSPSHTISRPIPMPIRSASACSTPTHTPQDSLTGVGGDVQEAFAQSSRRNLRNDLLVAADSITNTMSSLVKELNSEVGSETESNVDSEFARTQFEDLVPSPTSEKAFLAQIHARKPGYIHSGATTSTMRGDMVTEDADPYVQPEDENYENDSVRQLENELQMEEYLKQKLQDEAYQLHVSTETRLEHPCPVSETKWRVLFWGFVFFGGFLSLALQIYFWGLF

SEQ ID NO: 14688 - protein, 81 aa, Artificial Sequence
  Synthetic polypeptide
NQKSPAKKLTNALSKSLSCASSREPLHPMFPDQPEKPLNLAHIVPPRPVTSMNDTLFSHSVPSSGSPFITRSSDGAFGGCV

SEQ ID NO: 14689 - protein, 400 aa, Artificial Sequence
  Synthetic polypeptide
NQKSPAKKLTNALSKSLSCASSREPLHPMFPDQPEKPLNLAHIVPPRPVTSMNDTLFSHSVPSSGSPFITRSMLESSNRLDEEHRLIARYAARLAAESSSSQPPQQRSAPDISFTIDANKQQRQLIAELENKNREILQEIQRLRLEHEQASQPTPEKAQQNPTLLAELRLLRQRKDELEQRMSALQESRRELMVQLEGLMKLLKEEELKQGTQGAGSPRSSPSHTISRPIPMPIRSASACSTPTHTPQDSLTGVGGDVQEAFAQSSRRNLRNDLLVAADSITNTMSSLVKELNSEVGSETESNVDSEFARTQFEDLVPSPTSEKAFLAQIHARKPGYIHSGATTSTMRGDMVTEDADPYVQPEDENYENDSVRQLENELQMEEYLKQKLQDEAYQVSLQG

SEQ ID NO: 14690 - protein, 454 aa, Artificial Sequence
  Synthetic polypeptide
NQKSPAKKLTNALSKSLSCASSREPLHPMFPDQPEKPLNLAHIVLDNMPPRPVTSMNDTLFSHSVPSSGSPFITRSSPPKDSEVEQNKLLARAAPAFLKGKGIQYSLNVADRLADEHVLIGLYVNMLRNNPSCMLESSNRLDEEHRLIARYAARLAAESSSSQPPQQRSAPDISFTIDANKQQRQLIAELENKNREILQEIQRLRLEHEQASQPTPEKAQQNPTLLAELRLLRQRKDELEQRMSALQESRRELMVQLEGLMKLLKTQGAGSPRSSPSHTISRPIPMPIRSASACSTPTHTPQDSLTGVGGDVQEAFAQSSRRNLRNDLLVAADSITNTMSSLVKELNSEVGSETESNVDSEFARTQFEDLVPSPTSEKAFLAQIHARKPGYIHSGATTSTMRGDMVTEDADPYVQPEDENYENDSVRQLENELQMEEYLKQKLQDEAYQVSLQG

SEQ ID NO: 14691 - protein, 393 aa, Artificial Sequence
  Synthetic polypeptide
NQKSPAKKLTNALSKSLSCASSREPLHPMFPDQPEKPLNLAHIVPPRPVTSMNDTLFSHSVPSSGSPFITRSMLESSNRLDEEHRLIARYAARLAAESSSSQPPQQRSAPDISFTIDANKQQRQLIAELENKNREILQEIQRLRLEHEQASQPTPEKAQQNPTLLAELRLLRQRKDELEQRMSALQESRRELMVQLEGLMKLLKTQGAGSPRSSPSHTISRPIPMPIRSASACSTPTHTPQDSLTGVGGDVQEAFAQSSRRNLRNDLLVAADSITNTMSSLVKELNSEVGSETESNVDSEFARTQFEDLVPSPTSEKAFLAQIHARKPGYIHSGATTSTMRGDMVTEDADPYVQPEDENYENDSVRQLENELQMEEYLKQKLQDEAYQVSLQG

SEQ ID NO: 14692 - protein, 223 aa, Artificial Sequence
  Synthetic polypeptide
NQKSPAKKLTNALSKSLSCASSREPLHPMFPDQPEKPLNLAHIVDTWPPRPVTSMNDTLFSHSVPSSGSPFITRSMLESSNRLDEEHRLIARYAARLAAESSSSQPPQQRSAPDISFTIDANKQQRQLIAELENKNREILQEIQRLRLEHEQASQPTPEKAQQNPTLLAELRLLRQRKDELEQRMSALQESRRELMVQLEGLMKLLKEEELKQGVSYVPYCRS

SEQ ID NO: 14693 - protein, 277 aa, Artificial Sequence
  Synthetic polypeptide
NQKSPAKKLTNALSKSLSCASSREPLHPMFPDQPEKPLNLAHIVPPRPVTSMNDTLFSHSVPSSGSPFITRSSPPKDSEVEQNKLLARAAPAFLKGKGIQYSLNVADRLADEHVLIGLYVNMLRNNPSCMLESSNRLDEEHRLIARYAARLAAESSSSQPPQQRSAPDISFTIDANKQQRQLIAELENKNREILQEIQRLRLEHEQASQPTPEKAQQNPTLLAELRLLRQRKDELEQRMSALQESRRELMVQLEGLMKLLKEEELKQGVSYVPYCRS

SEQ ID NO: 14694 - protein, 220 aa, Artificial Sequence
  Synthetic polypeptide
NQKSPAKKLTNALSKSLSCASSREPLHPMFPDQPEKPLNLAHIVPPRPVTSMNDTLFSHSVPSSGSPFITRSMLESSNRLDEEHRLIARYAARLAAESSSSQPPQQRSAPDISFTIDANKQQRQLIAELENKNREILQEIQRLRLEHEQASQPTPEKAQQNPTLLAELRLLRQRKDELEQRMSALQESRRELMVQLEGLMKLLKEEELKQGVSYVPYCRS

SEQ ID NO: 14695 - protein, 280 aa, Artificial Sequence
  Synthetic polypeptide
NQKSPAKKLTNALSKSLSCASSREPLHPMFPDQPEKPLNLAHIVDTWPPRPVTSMNDTLFSHSVPSSGSPFITRSSPPKDSEVEQNKLLARAAPAFLKGKGIQYSLNVADRLADEHVLIGLYVNMLRNNPSCMLESSNRLDEEHRLIARYAARLAAESSSSQPPQQRSAPDISFTIDANKQQRQLIAELENKNREILQEIQRLRLEHEQASQPTPEKAQQNPTLLAELRLLRQRKDELEQRMSALQESRRELMVQLEGLMKLLKEEELKQGVSYVPYCRS

SEQ ID NO: 14696 - protein, 453 aa, Artificial Sequence
  Synthetic polypeptide
NQKSPAKKLTNALSKSLSCASSREPLHPMFPDQPEKPLNLAHIVDTWPPRPVTSMNDTLFSHSVPSSGSPFITRSSPPKDSEVEQNKLLARAAPAFLKGKGIQYSLNVADRLADEHVLIGLYVNMLRNNPSCMLESSNRLDEEHRLIARYAARLAAESSSSQPPQQRSAPDISFTIDANKQQRQLIAELENKNREILQEIQRLRLEHEQASQPTPEKAQQNPTLLAELRLLRQRKDELEQRMSALQESRRELMVQLEGLMKLLKTQGAGSPRSSPSHTISRPIPMPIRSASACSTPTHTPQDSLTGVGGDVQEAFAQSSRRNLRNDLLVAADSITNTMSSLVKELNSEVGSETESNVDSEFARTQFEDLVPSPTSEKAFLAQIHARKPGYIHSGATTSTMRGDMVTEDADPYVQPEDENYENDSVRQLENELQMEEYLKQKLQDEAYQVSLQG

SEQ ID NO: 14697 - protein, 453 aa, Artificial Sequence; identical to SEQ ID NO: 14696
  Synthetic polypeptide

SEQ ID NO: 14698 - protein, 64 aa, Artificial Sequence
  Synthetic polypeptide
NQKSPAKKLTNALSKSLSCASSREPLHPMFPDQPEKPLNLAHIVPPRPVTSMNDTLFSHSVPSS

SEQ ID NO: 14699 - protein, 350 aa, Artificial Sequence
  Synthetic polypeptide
KCIFSGPTLPTSPTLPPQNQKLHFHKIPSMLESSNRLDEEHRLIARYAARLAAESSSSQPPQQRSAPDISFTIDANKQQRQLIAELENKNREILQEIQRLRLEHEQASQPTPEKAQQNPTLLAELRLLRQRKDELEQRMSALQESRRELMVQLEGLMKLLKTQGAGSPRSSPSHTISRPIPMPIRSASACSTPTHTPQDSLTGVGGDVQEAFAQSSRRNLRNDLLVAADSITNTMSSLVKELNSEVGSETESNVDSEFARTQFEDLVPSPTSEKAFLAQIHARKPGYIHSGATTSTMRGDMVTEDADPYVQPEDENYENDSVRQLENELQMEEYLKQKLQDEAYQVSLQG

SEQ ID NO: 14700 - protein, 350 aa, Artificial Sequence; identical to SEQ ID NO: 14699
  Synthetic polypeptide

SEQ ID NO: 14701 - protein, 350 aa, Artificial Sequence; identical to SEQ ID NO: 14699
  Synthetic polypeptide

SEQ ID NO: 14702 - protein, 350 aa, Artificial Sequence; identical to SEQ ID NO: 14699
  Synthetic polypeptide

SEQ ID NO: 14703 - protein, 350 aa, Artificial Sequence; identical to SEQ ID NO: 14699
  Synthetic polypeptide

SEQ ID NO: 14704 - protein, 350 aa, Artificial Sequence; identical to SEQ ID NO: 14699
  Synthetic polypeptide

SEQ ID NO: 14705 - protein, 350 aa, Artificial Sequence; identical to SEQ ID NO: 14699
  Synthetic polypeptide

SEQ ID NO: 14706 - protein, 350 aa, Artificial Sequence; identical to SEQ ID NO: 14699
  Synthetic polypeptide

SEQ ID NO: 14707 - protein, 350 aa, Artificial Sequence; identical to SEQ ID NO: 14699
  Synthetic polypeptide

SEQ ID NO: 14708 - protein, 350 aa, Artificial Sequence; identical to SEQ ID NO: 14699
  Synthetic polypeptide

SEQ ID NO: 14709 - protein, 350 aa, Artificial Sequence; identical to SEQ ID NO: 14699
  Synthetic polypeptide

SEQ ID NO: 14710 - protein, 64 aa, Artificial Sequence
  Synthetic polypeptide
MILSVEPVHWTNIIDISWKLVRNASSQVPPSQPPLPYHHRTRNCIFTRSLACLRVQTGLMKNTG

SEQ ID NO: 14711 - protein, 64 aa, Artificial Sequence; identical to SEQ ID NO: 14710
  Synthetic polypeptide

SEQ ID NO: 14712 - protein, 64 aa, Artificial Sequence; identical to SEQ ID NO: 14710
  Synthetic polypeptide

SEQ ID NO: 14713 - protein, 64 aa, Artificial Sequence; identical to SEQ ID NO: 14710
  Synthetic polypeptide

SEQ ID NO: 14714 - protein, 64 aa, Artificial Sequence; identical to SEQ ID NO: 14710
  Synthetic polypeptide

SEQ ID NO: 14715 - protein, 64 aa, Artificial Sequence; identical to SEQ ID NO: 14710
  Synthetic polypeptide

SEQ ID NO: 14716 - protein, 64 aa, Artificial Sequence; identical to SEQ ID NO: 14710
  Synthetic polypeptide

SEQ ID NO: 14717 - protein, 64 aa, Artificial Sequence; identical to SEQ ID NO: 14710
  Synthetic polypeptide

SEQ ID NO: 14718 - protein, 64 aa, Artificial Sequence; identical to SEQ ID NO: 14710
  Synthetic polypeptide

SEQ ID NO: 14719 - protein, 64 aa, Artificial Sequence; identical to SEQ ID NO: 14710
  Synthetic polypeptide

SEQ ID NO: 14720 - protein, 64 aa, Artificial Sequence; identical to SEQ ID NO: 14710
  Synthetic polypeptide

SEQ ID NO: 14721 - protein, 64 aa, Artificial Sequence; identical to SEQ ID NO: 14710
  Synthetic polypeptide

SEQ ID NO: 14722 - protein, 64 aa, Artificial Sequence; identical to SEQ ID NO: 14710
  Synthetic polypeptide

SEQ ID NO: 14723 - protein, 64 aa, Artificial Sequence; identical to SEQ ID NO: 14710
  Synthetic polypeptide

SEQ ID NO: 14724 - protein, 64 aa, Artificial Sequence; identical to SEQ ID NO: 14710
  Synthetic polypeptide

SEQ ID NO: 14725 - protein, 64 aa, Artificial Sequence; identical to SEQ ID NO: 14710
  Synthetic polypeptide

SEQ ID NO: 14726 - protein, 64 aa, Artificial Sequence; identical to SEQ ID NO: 14710
  Synthetic polypeptide

SEQ ID NO: 14727 - protein, 64 aa, Artificial Sequence; identical to SEQ ID NO: 14710
  Synthetic polypeptide

SEQ ID NO: 14728 - protein, 64 aa, Artificial Sequence; identical to SEQ ID NO: 14710
  Synthetic polypeptide

SEQ ID NO: 14729 - protein, 64 aa, Artificial Sequence; identical to SEQ ID NO: 14710
  Synthetic polypeptide

SEQ ID NO: 14730 - protein, 391 aa, Artificial Sequence
  Synthetic polypeptide
KCIFSGPTLPTSPTLPPQNQKLHFHKIPSMLESSNRLDEEHRLIARYAARLAAESSSSQPPQQRSAPDISFTIDANKQQRQLIAELENKNREILQEIQRLRLEHEQASQPTPEKAQQNPTLLAELRLLRQRKDELEQRMSALQESRRELMVQLEGLMKLLKTQGAGSPRSSPSHTISRPIPMPIRSASACSTPTHTPQDSLTGVGGDVQEAFAQSSRRNLRNDLLVAADSITNTMSSLVKELNSEVGSETESNVDSEFARTQFEDLVPSPTSEKAFLAQIHARKPGYIHSGATTSTMRGDMVTEDADPYVQPEDENYENDSVRQLENELQMEEYLKQKLQDEAYQLHVSTETRLEHPCPVSETKWRVLFWGFVFFGGFLSLALQIYFWGLF

SEQ ID NO: 14731 - protein, 357 aa, Artificial Sequence
  Synthetic polypeptide
KCIFSGPTLPTSPTLPPQNQKLHFHKIPSMLESSNRLDEEHRLIARYAARLAAESSSSQPPQQRSAPDISFTIDANKQQRQLIAELENKNREILQEIQRLRLEHEQASQPTPEKAQQNPTLLAELRLLRQRKDELEQRMSALQESRRELMVQLEGLMKLLKEEELKQGTQGAGSPRSSPSHTISRPIPMPIRSASACSTPTHTPQDSLTGVGGDVQEAFAQSSRRNLRNDLLVAADSITNTMSSLVKELNSEVGSETESNVDSEFARTQFEDLVPSPTSEKAFLAQIHARKPGYIHSGATTSTMRGDMVTEDADPYVQPEDENYENDSVRQLENELQMEEYLKQKLQDEAYQVSLQG

SEQ ID NO: 14732 - protein, 177 aa, Artificial Sequence
  Synthetic polypeptide
KCIFSGPTLPTSPTLPPQNQKLHFHKIPSMLESSNRLDEEHRLIARYAARLAAESSSSQPPQQRSAPDISFTIDANKQQRQLIAELENKNREILQEIQRLRLEHEQASQPTPEKAQQNPTLLAELRLLRQRKDELEQRMSALQESRRELMVQLEGLMKLLKEEELKQGVSYVPYCRS

SEQ ID NO: 14733 - protein, 177 aa, Artificial Sequence; identical to SEQ ID NO: 14732
  Synthetic polypeptide

SEQ ID NO: 14734 - protein, 177 aa, Artificial Sequence; identical to SEQ ID NO: 14732
  Synthetic polypeptide

SEQ ID NO: 14735 - protein, 177 aa, Artificial Sequence; identical to SEQ ID NO: 14732
  Synthetic polypeptide

SEQ ID NO: 14736 - protein, 177 aa, Artificial Sequence; identical to SEQ ID NO: 14732
  Synthetic polypeptide

SEQ ID NO: 14737 - protein, 147 aa, Artificial Sequence
  Synthetic polypeptide
KCIFSGPTLPTSPTLPPQNQKLHFHKIPSMLESSNRLDEEHRLIARYAARLAAESSSSQPPQQRSAPDISFTIDANKQQRQLIAELENKNREILQEIQRLRLEHEQASQPTPEKAQQNPTLLAELRLLSAKMSWNRECLLSRRAGES

SEQ ID NO: 14738 - protein, 117 aa, Artificial Sequence
  Synthetic polypeptide
KCIFSGPTLPTSPTLPPQNQKLHFHKIPSMLESSNRLDEEHRLIARYAARLAAESSSSQPPQQRSAPDISFTIDANKQQRQLIAELENKNREILQEIQRLRLEHEQASQPTPEKAQQ

SEQ ID NO: 14739 - protein, 19 aa, Artificial Sequence
  Synthetic polypeptide
CLTPVSQHFERPRVSAWKP

SEQ ID NO: 14740 - protein, 19 aa, Artificial Sequence
  Synthetic polypeptide
CLTPVSQHFERPRVSAWKP

SEQ ID NO: 14741 - protein, 19 aa, Artificial Sequence
  Synthetic polypeptide
CLTPVSQHFERPRVSAWKP

SEQ ID NO: 14742 - protein, 19 aa, Artificial Sequence
  Synthetic polypeptide
CLTPVSQHFERPRVSAWKP

SEQ ID NO: 14743 - protein, 20 aa, Artificial Sequence
  Synthetic polypeptide
VSRLYPSTLRGQGYQHGSHE

SEQ ID NO: 14744 - protein, 20 aa, Artificial Sequence
  Synthetic polypeptide
VSRLYPSTLRGQGYQHGSHE

SEQ ID NO: 14745 - protein, 20 aa, Artificial Sequence
  Synthetic polypeptide
VSRLYPSTLRGQGYQHGSHE

SEQ ID NO: 14746 - protein, 20 aa, Artificial Sequence
  Synthetic polypeptide
VSRLYPSTLRGQGYQHGSHE

SEQ ID NO: 14747 - protein, 148 aa, Artificial Sequence
  Synthetic polypeptide
EAKGISMEAMSENKMVPSEFSTGPVEKAAKPLPFKDPNFVHSGHGGAVAGKKNRTWKNLKQILASERALPWQLNDPNYFSIDAPPSFKPAKKYSDVSGLLEPPNCFPQRLHQLTFPLAMDEGSNFSRCSPTLVNFGFVFIMAILVGVK

SEQ ID NO: 14748 - protein, 143 aa, Artificial Sequence
  Synthetic polypeptide
EAKGISMEAMSENKMVPSEFSTGPVEKAAKPLPFKDPNFVHSGHGGAVAGKKNRTWKNLKQILASERALPWQLNDPNYFSIDAPPSFKPAKKYSDVSGLLANYTDPQSKLRFSTIEEFSYIRRLPSDVVTGYLALRKATSIVP

SEQ ID NO: 14749 - protein, 143 aa, Artificial Sequence; identical to SEQ ID NO: 14748
  Synthetic polypeptide

SEQ ID NO: 14750 - protein, 110 aa, Artificial Sequence
  Synthetic polypeptide
EAKGISMEAMSENKMVPSEFSTGPVEKAAKPLPFKDPNFVHSGHGGAVAGKKNRTWKNLKQILASERALPWQLNDPNYFSIDAPPSFKPAKKYSDVSGLLANYTDPQSKL

SEQ ID NO: 14751 - protein, 74 aa, Artificial Sequence
  Synthetic polypeptide
HPLEWPLSKKQRMTHVGKDTEKLEPLCIVGVNVKWYNCYLKIVWRFLKKCSKKRTTILSSNSTSGYEMWKRISV

SEQ ID NO: 14752 - protein, 74 aa, Artificial Sequence; identical to SEQ ID NO: 14751
  Synthetic polypeptide

SEQ ID NO: 14753 - protein, 33 aa, Artificial Sequence
  Synthetic polypeptide
YGGFSKNAQKRELRYYPAIPPQDTKCGNESVSR

SEQ ID NO: 14754 - protein, 33 aa, Artificial Sequence; identical to SEQ ID NO: 14753
  Synthetic polypeptide

SEQ ID NO: 14755 - protein, 170 aa, Artificial Sequence
  Synthetic polypeptide
KIGTLVHCWCECKMVQLLFKNSMEVSQKMLKKENYDIIQQFHLRIRNVETNQCLDNMARKENEKVGIFNCHGMGGNQVFSYTANKEIRTDDLCLDVSKLNGPVTMLKCHHLKGNQLWEYDPVKLTLQHVNSNQCLDKATEEDSQVPSIRDCNGSRSQQWLLRNVTLPEIF

SEQ ID NO: 14756 - protein, 170 aa, Artificial Sequence; identical to SEQ ID NO: 14755
  Synthetic polypeptide

SEQ ID NO: 14757 - protein, 56 aa, Artificial Sequence
  Synthetic polypeptide
SQHFEMQRRADHLRPGVRDQPGQHGETLSLLKIQKNYLAWWCTPVIPATREAVGSG

SEQ ID NO: 14758 - protein, 178 aa, Artificial Sequence
  Synthetic polypeptide
SQLLERLLVLDNSRVRLKPKARLTPKIQKLLNREARNYTLSFKEAKMVKKFKDSKSVLLITCKTCNRTVKHHGKSRSFVSTLKSNPATPTSKLSLKTPERRTANPNHDMSGSKGKSPASVFRTPTSGQSVSTCSSKNTSKTKKHFSQLKMLLSQNESQKIPKVDFRNFLSSLKGGLLK

SEQ ID NO: 14759 - protein, 63 aa, Artificial Sequence
  Synthetic polypeptide
DAEAGGSFEARSSRPTWPTWRNAVSTKNTKKLPGMVVHACNPSYSRGCWFWITLECVSNPKPG

SEQ ID NO: 14760 - protein, 13 aa, Artificial Sequence
  Synthetic polypeptide
GWVLLLLKAYQVV

SEQ ID NO: 14761 - protein, 13 aa, Artificial Sequence
  Synthetic polypeptide
GWVLLLLKAYQVV

SEQ ID NO: 14762 - protein, 13 aa, Artificial Sequence
  Synthetic polypeptide
GWVLLLLKAYQVV

SEQ ID NO: 14763 - protein, 13 aa, Artificial Sequence
  Synthetic polypeptide
GWVLLLLKAYQVV

SEQ ID NO: 14764 - protein, 6 aa, Artificial Sequence
  Synthetic polypeptide
AGCCFY

SEQ ID NO: 14765 - protein, 6 aa, Artificial Sequence
  Synthetic polypeptide
AGCCFY

SEQ ID NO: 14766 - protein, 6 aa, Artificial Sequence
  Synthetic polypeptide
AGCCFY

SEQ ID NO: 14767 - protein, 6 aa, Artificial Sequence
  Synthetic polypeptide
AGCCFY

SEQ ID NO: 14768 - protein, 142 aa, Artificial Sequence
  Synthetic polypeptide
MGAAFTEGLSSGLSTSVAVFCHELPHELGDFAVLLKAGMTVKQAVLYNALSAMLAYLGMATGIFIGHYAENVSMWIFALTAGLFMYVALVDMVPEMLHNDASDHGCSRWGYFFLQNAGMLLGFGIMLLISIFEHKIVFRINF

SEQ ID NO: 14769 - protein, 142 aa, Artificial Sequence; identical to SEQ ID NO: 14768
  Synthetic polypeptide

SEQ ID NO: 14770 - protein, 95 aa, Artificial Sequence
  Synthetic polypeptide
MGAAFTEGLSSGLSTSVAVFCHELPHELGDFAVLLKAGMTVKQAVLYNALSAMLAYLGMATGIFIGHYAENVSMWIFALTAGLFMYVALVDMVSF

SEQ ID NO: 14771 - protein, 93 aa, Artificial Sequence
  Synthetic polypeptide
MGAAFTEGLSSGLSTSVAVFCHELPHELGDFAVLLKAGMTVKQAVLYNALSAMLAYLGMATGIFIGHYAENVSMWIFALTAGLFMYVALVDMV

SEQ ID NO: 14772 - protein, 43 aa, Artificial Sequence
  Synthetic polypeptide
QGTLFASQPTVLRCLRQRKHLEKGCCYQLEWSHRPSQLHTVDL

SEQ ID NO: 14773 - protein, 43 aa, Artificial Sequence; identical to SEQ ID NO: 14772
  Synthetic polypeptide

SEQ ID NO: 14774 - protein, 43 aa, Artificial Sequence; identical to SEQ ID NO: 14772
  Synthetic polypeptide

SEQ ID NO: 14775 - protein, 43 aa, Artificial Sequence; identical to SEQ ID NO: 14772
  Synthetic polypeptide

SEQ ID NO: 14776 - protein, 43 aa, Artificial Sequence; identical to SEQ ID NO: 14772
  Synthetic polypeptide

SEQ ID NO: 14777 - protein, 43 aa, Artificial Sequence; identical to SEQ ID NO: 14772
  Synthetic polypeptide

SEQ ID NO: 14778 - protein, 43 aa, Artificial Sequence; identical to SEQ ID NO: 14772
  Synthetic polypeptide

SEQ ID NO: 14779 - protein, 43 aa, Artificial Sequence; identical to SEQ ID NO: 14772
  Synthetic polypeptide

SEQ ID NO: 14780 - protein, 43 aa, Artificial Sequence; identical to SEQ ID NO: 14772
  Synthetic polypeptide

SEQ ID NO: 14781 - protein, 789 aa, Artificial Sequence
  Synthetic polypeptide
DVYGRGSILKRVVVTNLNGHTARVNCIQWICKQDGSPSTELVSGGSDNQVIHWEIEDNQLLKAVHLQGHEGPVYAVHAVYQRRTSDPALCTLIVSAAADSAVRLWSKKGPEVMCLQTLNFGNGFALALCLSFLPNTDVPILACGNDDCRIHIFAQQNDQFQKVLSLCGHEDWIRGVEWAAFGRDLFLASCSQDCLIRIWKLYIKSTSLETQDDDNIRLKENTFTIENESVKIAFAVTLETVLAGHENWVNAVHWQPVFYKDGVLQQPVRLLSASMDKTMILWAPDEESGVWLEQVRVGEVGGNTLGFYDCQFNEDGSMIIAHAFHGALHLWKQNTVNPREWTPEIVISGHFDGVQDLVWDPEGEFIITVGTDQTTRLFAPWKRKDQSQVTWHEIARPQIHGYDLKCLAMINRFQFVSGADEKVLRVFSAPRNFVENFCAITGQSLNHVLCNQDSDLPEGATVPALGLSNKAVFQGDIASQPSDEEELLTSTGFEYQQVAFQPSILTEPPTEDHLLQNTLWPEVQKLYGHGYEIFCVTCNSSKTLLASACKAAKKEHAAIILWNTTSWKQVQNLVFHSLTVTQMAFSPNEKFLLAVSRDRTWSLWKKQDTISPEFEPVFSLFAFTNKITSVHSRIIWSCDWSPDSKYFFTGSRDKKVVVWGECDSTDDCIEHNIGPCSSVLDVGGAVTAVSVCPVLHPSQRYVVAVGLECGKICLYTWKKTDQVPEINDWTHCVETSQSQSHTLAIRKLCWKNCSGKTEQKEAEGAEWLHFASCGEDHTVKIHRVNKCAL

SEQ ID NO: 14782 - protein, 763 aa, Artificial Sequence
  Synthetic polypeptide
DVYGRGSILKRVVVTNLNGHTARVNCIQWICKQDGSPSTELVSGGSDNQVIHWEIEDNQLLKAVHLQGHEGPVYAVHAVYQRRTSDPALCTLIVSAAADSAVRLWSKKGPEVPILACGNDDCRIHIFAQQNDQFQKVLSLCGHEDWIRGVEWAAFGRDLFLASCSQDCLIRIWKLYIKSTSLETQDDDNIRLKENTFTIENESVKIAFAVTLETVLAGHENWVNAVHWQPVFYKDGVLQQPVRLLSASMDKTMILWAPDEESGVWLEQVRVGEVGGNTLGFYDCQFNEDGSMIIAHAFHGALHLWKQNTVNPREWTPEIVISGHFDGVQDLVWDPEGEFIITVGTDQTTRLFAPWKRKDQSQVTWHEIARPQIHGYDLKCLAMINRFQFVSGADEKVLRVFSAPRNFVENFCAITGQSLNHVLCNQDSDLPEGATVPALGLSNKAVFQGDIASQPSDEEELLTSTGFEYQQVAFQPSILTEPPTEDHLLQNTLWPEVQKLYGHGYEIFCVTCNSSKTLLASACKAAKKEHAAIILWNTTSWKQVQNLVFHSLTVTQMAFSPNEKFLLAVSRDRTWSLWKKQDTISPEFEPVFSLFAFTNKITSVHSRIIWSCDWSPDSKYFFTGSRDKKVVVWGECDSTDDCIEHNIGPCSSVLDVGGAVTAVSVCPVLHPSQRYVVAVGLECGKICLYTWKKTDQVPEINDWTHCVETSQSQSHTLAIRKLCWKNCSGKTEQKEAEGAEWLHFASCGEDHTVKIHRVNKCAL

SEQ ID NO: 14783 - protein, 854 aa, Artificial Sequence
  Synthetic polypeptide
DVYGRGSILKRVVVTNLNGHTARVNCIQWICKQDGSPSTELVSGGSDNQVIHWEIEDNQLLKAVHLQGHEGPVYAVHAVYQRRTSDPALCTLIVSAAADSAVRLWSKKGPEVMCLQTLNFGNGFALALCLSFLPNTDVTWKTGQVERGRAWKPPASLALCSRSCDSMVSCYASILCKALWKEKLHTFWHHNRISFLPSAFRPIPILACGNDDCRIHIFAQQNDQFQKVLSLCGHEDWIRGVEWAAFGRDLFLASCSQDCLIRIWKLYIKSTSLETQDDDNIRLKENTFTIENESVKIAFAVTLETVLAGHENWVNAVHWQPVFYKDGVLQQPVRLLSASMDKTMILWAPDEESGVWLEQVRVGEVGGNTLGFYDCQFNEDGSMIIAHAFHGALHLWKQNTVNPREWTPEIVISGHFDGVQDLVWDPEGEFIITVGTDQTTRLFAPWKRKDQSQVTWHEIARPQIHGYDLKCLAMINRFQFVSGADEKVLRVFSAPRNFVENFCAITGQSLNHVLCNQDSDLPEGATVPALGLSNKAVFQGDIASQPSDEEELLTSTGFEYQQVAFQPSILTEPPTEDHLLQNTLWPEVQKLYGHGYEIFCVTCNSSKTLLASACKAAKKEHAAIILWNTTSWKQVQNLVFHSLTVTQMAFSPNEKFLLAVSRDRTWSLWKKQDTISPEFEPVFSLFAFTNKITSVHSRIIWSCDWSPDSKYFFTGSRDKKVVVWGECDSTDDCIEHNIGPCSSVLDVGGAVTAVSVCPVLHPSQRYVVAVGLECGKICLYTWKKTDQVPEINDWTHCVETSQSQSHTLAIRKLCWKNCSGKTEQKEAEGAEWLHFASCGEDHTVKIHRVNKCAL

SEQ ID NO: 14784 - protein, 719 aa, Artificial Sequence
  Synthetic polypeptide
DVYGRGSILKRVVVTNLNGHTARVNCIQWICKQDGSPSTELVSGGSDNQVIHWEIEDNQLLKAVHLQGHEGPVYAVHAVYQRRTSDPALCTLIVSAAADSAVRLWSKKGPEGRDLFLASCSQDCLIRIWKLYIKSTSLETQDDDNIRLKENTFTIENESVKIAFAVTLETVLAGHENWVNAVHWQPVFYKDGVLQQPVRLLSASMDKTMILWAPDEESGVWLEQVRVGEVGGNTLGFYDCQFNEDGSMIIAHAFHGALHLWKQNTVNPREWTPEIVISGHFDGVQDLVWDPEGEFIITVGTDQTTRLFAPWKRKDQSQVTWHEIARPQIHGYDLKCLAMINRFQFVSGADEKVLRVFSAPRNFVENFCAITGQSLNHVLCNQDSDLPEGATVPALGLSNKAVFQGDIASQPSDEEELLTSTGFEYQQVAFQPSILTEPPTEDHLLQNTLWPEVQKLYGHGYEIFCVTCNSSKTLLASACKAAKKEHAAIILWNTTSWKQVQNLVFHSLTVTQMAFSPNEKFLLAVSRDRTWSLWKKQDTISPEFEPVFSLFAFTNKITSVHSRIIWSCDWSPDSKYFFTGSRDKKVVVWGECDSTDDCIEHNIGPCSSVLDVGGAVTAVSVCPVLHPSQRYVVAVGLECGKICLYTWKKTDQVPEINDWTHCVETSQSQSHTLAIRKLCWKNCSGKTEQKEAEGAEWLHFASCGEDHTVKIHRVNKCAL

SEQ ID NO: 14785 - protein, 668 aa, Artificial Sequence
  Synthetic polypeptide
DVYGRGSILKRVVVTNLNGHTARVNCIQWICKQDGSPSTELVSGGSDNQVIHWEIEDNQLLKAVHLQGHEGPVYAVHAVYQRRTSDPALCTLIVSAAADSAVRLWSKKGPEVMCLQTLNFGNGFALALCLSFLPNTDVPILACGNDDCRIHIFAQQNDQFQKVLSLCGHEDWIRGVEWAAFGRDLFLASCSQDCLIRIWKLYIKSTSLETQDDDNIRLKENTFTIENESVKIAFAVTLETVLAGHENWVNAVHWQPVFYKDGVLQQPVRLLSASMDKTMILWAPDEESGVWLEQVRVGEVGGNTLGFYDCQFNEDGSMIIAHAFHGALHLWKQNTVNPREWTPEIVISGHFDGVQDLVWDPEGEFIITVGTDQTTRLFAPWKRKDQSQVTWHEIARPQIHGYDLKCLAMINRFQFVSGADEKVLRVFSAPRNFVENFCAITGQSLNHVLCNQDSDLPEGATVPALGLSNKAVFQGDIASQPSDEEELLTSTGFEYQQVAFQPSILTEPPTEDHLLQNTLWPEVQKLYGHGYEIFCVTCNSSKTLLASACKAAKKEHAAIILWNTTSWKQVQNLVFHSLTVTQMAFSPNEKFLLAVSRDRTWSLWKKQDTISPEFVELFGLVIGVLTASISSLGVETKRWLSGVSATPLMTVLSTTLAPAPQSWTWVGL

SEQ ID NO: 14786 - protein, 83 aa, Artificial Sequence
  Synthetic polypeptide
DVYGRGSILKRVVVTNLNGHTARVNCIQWICKQDGSPSTELVSGGSDNQVIHWEIEDNQAMKDLFMRCMLFTRGGHQILHYVH

SEQ ID NO: 14787 - protein, 784 aa, Artificial Sequence
  Synthetic polypeptide
DVYGRGSILKRVVVTNLNGHTARVNCIQWICKQDGSPSTELVSGGSDNQVIHWEIEDNQLLKAVHLQGHEGPVYAVHAVYQRRTSDPALCTLIVSAAADSAVRLWSKKGPEVTWKTGQVERGRAWKPPASLALCSRSCDSMVSCYASILCKALWKEKLHTFWHHNRISFLPSAFRPIPILACGNDDCRIHIFAQQNDQFQKVLSLCGHEDWIRGVEWAAFGRDLFLASCSQDCLIRIWKLYIKSTSLETQDDDNIRLKENTFTIENESVKIAFAVTLETVLAGHENWVNAVHWQPVFYKDGVLQQPVRLLSASMDKTMILWAPDEESGVWLEQREWTPEIVISGHFDGVQDLVWDPEGEFIITVGTDQTTRLFAPWKRKDQSQVTWHEIARPQIHGYDLKCLAMINRFQFVSGADEKVLRVFSAPRNFVENFCAITGQSLNHVLCNQDSDLPEGATVPALGLSNKAVFQGDIASQPSDEEELLTSTGFEYQQVAFQPSILTEPPTEDHLLQNTLWPEVQKLYGHGYEIFCVTCNSSKTLLASACKAAKKEHAAIILWNTTSWKQVQNLVFHSLTVTQMAFSPNEKFLLAVSRDRTWSLWKKQDTISPEFEPVFSLFAFTNKITSVHSRIIWSCDWSPDSKYFFTGSRDKKVVVWGECDSTDDCIEHNIGPCSSVLDVGGAVTAVSVCPVLHPSQRYVVAVGLECGKICLYTWKKTDQVPEINDWTHCVETSQSQSHTLAIRKLCWKNCSGKTEQKEAEGAEWLHFASCGEDHTVKIHRVNKCAL

SEQ ID NO: 14788 - protein, 719 aa, Artificial Sequence
  Synthetic polypeptide
DVYGRGSILKRVVVTNLNGHTARVNCIQWICKQDGSPSTELVSGGSDNQVIHWEIEDNQLLKAVHLQGHEGPVYAVHAVYQRRTSDPALCTLIVSAAADSAVRLWSKKGPEVPILACGNDDCRIHIFAQQNDQFQKVLSLCGHEDWIRGVEWAAFGRDLFLASCSQDCLIRIWKLYIKSTSLETQDDDNIRLKENTFTIENESVKIAFAVTLETVLAGHENWVNAVHWQPVFYKDGVLQQPVRLLSASMDKTMILWAPDEESGVWLEQREWTPEIVISGHFDGVQDLVWDPEGEFIITVGTDQTTRLFAPWKRKDQSQVTWHEIARPQIHGYDLKCLAMINRFQFVSGADEKVLRVFSAPRNFVENFCAITGQSLNHVLCNQDSDLPEGATVPALGLSNKAVFQGDIASQPSDEEELLTSTGFEYQQVAFQPSILTEPPTEDHLLQNTLWPEVQKLYGHGYEIFCVTCNSSKTLLASACKAAKKEHAAIILWNTTSWKQVQNLVFHSLTVTQMAFSPNEKFLLAVSRDRTWSLWKKQDTISPEFEPVFSLFAFTNKITSVHSRIIWSCDWSPDSKYFFTGSRDKKVVVWGECDSTDDCIEHNIGPCSSVLDVGGAVTAVSVCPVLHPSQRYVVAVGLECGKICLYTWKKTDQVPEINDWTHCVETSQSQSHTLAIRKLCWKNCSGKTEQKEAEGAEWLHFASCGEDHTVKIHRVNKCAL

SEQ ID NO: 14789 - protein, 64 aa, Artificial Sequence
  Synthetic polypeptide
DVYGRGSILKRVVVTNLNGHTARVNCIQWICKQDGSPSTELVSGGSDNQVIHWEIEDNQIWARL

SEQ ID NO: 14790 - protein, 327 aa, Artificial Sequence
  Synthetic polypeptide
ASKRPHGRQDPDQTSKGSFVRTKIDTTENLLNTEVHSSPAQRWSMQVPPEVSAEAGDAAVLPCTFTHPHRHYDGPLTAIWRAGEPYAGPQVFRCAAARGSELCQTALSLHGRFRLLGNPRRNDLSLRVERLALADDRRYFCRVEFAGDVHDRYESRHGVRLHVTAAPRIVNISVLPSPAHAFRALCTAEGEPPPALAWSGPALGNSLAAVRSPREGHGHLVTAELPALTHDGRYTCTAANSLGRSEASVYLFRFHGASGASTVALLLGALGFKALLLLGVLAARAARRRPEHLDTPDTPPRSQAQESNYENLSQMNPRSPPATMCSP

SEQ ID NO: 14791 - protein, 50 aa, Artificial Sequence
  Synthetic polypeptide
GRRIVEGSEGAGEHKAREEAEVEQPKQKGDKQVRDPMAGKIQTRPVKAHL

SEQ ID NO: 14792 - protein, 53 aa, Artificial Sequence
  Synthetic polypeptide
GQVQWLTPVIPALWEAKVGGSLETRSLRQAWPRCQVSSRPSHGECEFFPRQSL

SEQ ID NO: 14793 - protein, 53 aa, Artificial Sequence; identical to SEQ ID NO: 14792
  Synthetic polypeptide

SEQ ID NO: 14794 - protein, 216 aa, Artificial Sequence
  Synthetic polypeptide
DKPGQDAKYLQDLLMESVNFSPANLSSTGSRYLNALVDSAVALETKDTSLASFIPAVNDLTSDLFRTKSKSEEIKIELEKLEKNLTATLVLEKCLQEDVKKAELHLSTERAKVDNRRQNMDFLKAKSEEFRFGIKAAEEQLSARGMDASLSHQSLVALSEKLARLKQQTIPLKKKLESYLDLMPNPSLAQVKIEEAKRELDSIEAELTRRVDMMEL

SEQ ID NO: 14795 - protein, 22 aa, Artificial Sequence
  Synthetic polypeptide
DQEFETSLAKMPSIFKTFSWRV

SEQ ID NO: 14796 - protein, 22 aa, Artificial Sequence
  Synthetic polypeptide
DQEFETSLAKMPSIFKTFSWRV

SEQ ID NO: 14797 - protein, 63 aa, Artificial Sequence
  Synthetic polypeptide
DKPGQDAKYLQDLLMESVNFSPANLSSTGSRYLNALVDSAVALETKDTSLASFIPAVNDLTSD

SEQ ID NO: 14798 - protein, 68 aa, Artificial Sequence
  Synthetic polypeptide
QGSPIPGPWSSTGLWPVRNWAAHQEVSLWPVRNRAAHQEVPIFVFTLRTLVKLLRPSRVCIYEKPRSI

SEQ ID NO: 14799 - protein, 68 aa, Artificial Sequence; identical to SEQ ID NO: 14798
  Synthetic polypeptide

SEQ ID NO: 14800 - protein, 68 aa, Artificial Sequence; identical to SEQ ID NO: 14798
  Synthetic polypeptide

SEQ ID NO: 14801 - protein, 68 aa, Artificial Sequence; identical to SEQ ID NO: 14798
  Synthetic polypeptide

SEQ ID NO: 14802 - protein, 68 aa, Artificial Sequence; identical to SEQ ID NO: 14798
  Synthetic polypeptide

SEQ ID NO: 14803 - protein, 68 aa, Artificial Sequence; identical to SEQ ID NO: 14798
  Synthetic polypeptide

SEQ ID NO: 14804 - protein, 68 aa, Artificial Sequence; identical to SEQ ID NO: 14798
  Synthetic polypeptide

SEQ ID NO: 14805 - protein, 68 aa, Artificial Sequence; identical to SEQ ID NO: 14798
  Synthetic polypeptide

SEQ ID NO: 14806 - protein, 68 aa, Artificial Sequence; identical to SEQ ID NO: 14798
  Synthetic polypeptide

SEQ ID NO: 14807 - protein, 68 aa, Artificial Sequence; identical to SEQ ID NO: 14798
  Synthetic polypeptide

SEQ ID NO: 14808 - protein, 68 aa, Artificial Sequence; identical to SEQ ID NO: 14798
  Synthetic polypeptide

SEQ ID NO: 14809 - protein, 68 aa, Artificial Sequence; identical to SEQ ID NO: 14798
  Synthetic polypeptide

SEQ ID NO: 14810 - protein, 20 aa, Artificial Sequence
  Synthetic polypeptide
ACGLLGIGLHIKRFQSSCSL

SEQ ID NO: 14811 - protein, 20 aa, Artificial Sequence
  Synthetic polypeptide
ACGLLGIGLHIKRFQSSCSL

SEQ ID NO: 14812 - protein, 20 aa, Artificial Sequence
  Synthetic polypeptide
ACGLLGIGLHIKRFQSSCSL

SEQ ID NO: 14813 - protein, 20 aa, Artificial Sequence
  Synthetic polypeptide
ACGLLGIGLHIKRFQSSCSL

SEQ ID NO: 14814 - protein, 20 aa, Artificial Sequence
  Synthetic polypeptide
ACGLLGIGLHIKRFQSSCSL

SEQ ID NO: 14815 - protein, 20 aa, Artificial Sequence
  Synthetic polypeptide
ACGLLGIGLHIKRFQSSCSL

SEQ ID NO: 14816 - protein, 20 aa, Artificial Sequence
  Synthetic polypeptide
ACGLLGIGLHIKRFQSSCSL

SEQ ID NO: 14817 - protein, 20 aa, Artificial Sequence
  Synthetic polypeptide
ACGLLGIGLHIKRFQSSCSL

SEQ ID NO: 14818 - protein, 20 aa, Artificial Sequence
  Synthetic polypeptide
ACGLLGIGLHIKRFQSSCSL

SEQ ID NO: 14819 - protein, 20 aa, Artificial Sequence
  Synthetic polypeptide
ACGLLGIGLHIKRFQSSCSL

SEQ ID NO: 14820 - protein, 20 aa, Artificial Sequence
  Synthetic polypeptide
ACGLLGIGLHIKRFQSSCSL

SEQ ID NO: 14821 - protein, 20 aa, Artificial Sequence
  Synthetic polypeptide
ACGLLGIGLHIKRFQSSCSL

SEQ ID NO: 14822 - protein, 217 aa, Artificial Sequence
  Synthetic polypeptide
ESGCTSRGSNLRVHFKNTRETAQAIKGMHIRKATKYLKDVTLQKQCVPFRRYNGGVGRCAQAKQWGWTQGRWPKKSAEFLLHMLKNAESNAELKGLDVDSLVIEHIQVNKAPKMRRRTYRAHGRINPYMSSPCHIEMILTEKEQIVPKPEEEVAQKKKLRSSSLGKWCAFLVSSFQFCSGSTKNSWSHIYTLWFPPSLVVYGLRKQYKNPMIQTKAK

SEQ ID NO: 14823 - protein, 173 aa, Artificial Sequence
  Synthetic polypeptide
ESGCTSRGSNLRVHFKNTRETAQAIKGMHIRKATKYLKDVTLQKQCVPFRRYNGGVGRCAQAKQWGWTQGRWPKKSAEFLLHMLKNAESNAELKGLDVDSLVIEHIQVNKAPKMRRRTYRAHGRINPYMSSPCHIEMILTEKEQIVPKPEEEVAQKKKISQKKLKKQKLMARE

SEQ ID NO: 14824 - protein, 173 aa, Artificial Sequence; identical to SEQ ID NO: 14823
  Synthetic polypeptide

SEQ ID NO: 14825 - protein, 173 aa, Artificial Sequence; identical to SEQ ID NO: 14823
  Synthetic polypeptide

SEQ ID NO: 14826 - protein, 173 aa, Artificial Sequence; identical to SEQ ID NO: 14823
  Synthetic polypeptide

SEQ ID NO: 14827 - protein, 173 aa, Artificial Sequence; identical to SEQ ID NO: 14823
  Synthetic polypeptide

SEQ ID NO: 14828 - protein, 173 aa, Artificial Sequence; identical to SEQ ID NO: 14823
  Synthetic polypeptide

SEQ ID NO: 14829 - protein, 163 aa, Artificial Sequence
  Synthetic polypeptide
ESGCTSRGSNLRVHFKNTRETAQAIKGMHIRKATKYLKDVTLQKQCVPFRRYNGGVGRCAQAKQWGWTQGRWPKKSAEFLLHMLKNAESNAELKGLDVDSLVIEHIQVNKAPKMRRRTYRAHGRINPYMSSPCHIEMILTEKEQIVPKPEEEVAQKKKISQKK

SEQ ID NO: 14830 - protein, 160 aa, Artificial Sequence
  Synthetic polypeptide
ESGCTSRGSNLRVHFKNTRETAQAIKGMHIRKATKYLKDVTLQKQCVPFRRYNGGVGRCAQAKQWGWTQGRWPKKSAEFLLHMLKNAESNAELKGLDVDSLVIEHIQVNKAPKMRRRTYRAHGRINPYMSSPCHIEMILTEKEQIVPKPEEEVAQKKKIS

SEQ ID NO: 14831 - protein, 127 aa, Artificial Sequence
  Synthetic polypeptide
ESGCTSRGSNLRVHFKNTRETAQAIKGMHIRKATKYLKDVTLQKQCVPFRRYNGGVGRCAQAKQWGWTQGRWPKKSAEFLLHMLKNAESNAELKGLDVDSLVIEHIQVNKAPKMRRRTYRAHGRINP

SEQ ID NO: 14832 - protein, 94 aa, Artificial Sequence
  Synthetic polypeptide
ESGCTSRGSNLRVHFKNTRETAQAIKGMHIRKATKYLKDVTLQKQCVPFRRYNGGVGRCAQAKQWGWTQGRWPKKSAEFLLHMLKNAESNAELK

SEQ ID NO: 14833 - protein, 45 aa, Artificial Sequence
  Synthetic polypeptide
ESGCTSRGSNLRVHFKNTRETAQAIKGMHIRKATKYLKDVTLQKQ

SEQ ID NO: 14834 - protein, 54 aa, Artificial Sequence
  Synthetic polypeptide
QGSPIPGPWSSTGLWPVRNWAAHQEVPIFVFTLRTLVKLLRPSRVCIYEKPRSI

SEQ ID NO: 14835 - protein, 54 aa, Artificial Sequence; identical to SEQ ID NO: 14834
  Synthetic polypeptide

SEQ ID NO: 14836 - protein, 54 aa, Artificial Sequence; identical to SEQ ID NO: 14834
  Synthetic polypeptide

SEQ ID NO: 14837 - protein, 54 aa, Artificial Sequence; identical to SEQ ID NO: 14834
  Synthetic polypeptide

SEQ ID NO: 14838 - protein, 54 aa, Artificial Sequence; identical to SEQ ID NO: 14834
  Synthetic polypeptide

SEQ ID NO: 14839 - protein, 54 aa, Artificial Sequence; identical to SEQ ID NO: 14834
  Synthetic polypeptide

SEQ ID NO: 14840 - protein, 54 aa, Artificial Sequence; identical to SEQ ID NO: 14834
  Synthetic polypeptide

SEQ ID NO: 14841 - protein, 54 aa, Artificial Sequence; identical to SEQ ID NO: 14834
  Synthetic polypeptide

SEQ ID NO: 14842 - protein, 54 aa, Artificial Sequence; identical to SEQ ID NO: 14834
  Synthetic polypeptide

SEQ ID NO: 14843 - protein, 54 aa, Artificial Sequence; identical to SEQ ID NO: 14834
  Synthetic polypeptide

SEQ ID NO: 14844 - protein, 54 aa, Artificial Sequence; identical to SEQ ID NO: 14834
  Synthetic polypeptide

SEQ ID NO: 14845 - protein, 54 aa, Artificial Sequence; identical to SEQ ID NO: 14834
  Synthetic polypeptide

SEQ ID NO: 14846 - protein, 32 aa, Artificial Sequence
  Synthetic polypeptide
RGPQSPGHGAVPVCGLLETGLHIKRFQSSCSL

SEQ ID NO: 14847 - protein, 32 aa, Artificial Sequence; identical to SEQ ID NO: 14846
  Synthetic polypeptide

SEQ ID NO: 14848 - protein, 32 aa, Artificial Sequence; identical to SEQ ID NO: 14846
  Synthetic polypeptide

SEQ ID NO: 14849 - protein, 32 aa, Artificial Sequence; identical to SEQ ID NO: 14846
  Synthetic polypeptide

SEQ ID NO: 14850 - protein, 32 aa, Artificial Sequence; identical to SEQ ID NO: 14846
  Synthetic polypeptide

SEQ ID NO: 14851 - protein, 32 aa, Artificial Sequence; identical to SEQ ID NO: 14846
  Synthetic polypeptide

SEQ ID NO: 14852 - protein, 32 aa, Artificial Sequence; identical to SEQ ID NO: 14846
  Synthetic polypeptide

SEQ ID NO: 14853 - protein, 32 aa, Artificial Sequence; identical to SEQ ID NO: 14846
  Synthetic polypeptide

SEQ ID NO: 14854 - protein, 32 aa, Artificial Sequence; identical to SEQ ID NO: 14846
  Synthetic polypeptide

SEQ ID NO: 14855 - protein, 32 aa, Artificial Sequence; identical to SEQ ID NO: 14846
  Synthetic polypeptide

SEQ ID NO: 14856 - protein, 32 aa, Artificial Sequence; identical to SEQ ID NO: 14846
  Synthetic polypeptide

SEQ ID NO: 14857 - protein, 32 aa, Artificial Sequence; identical to SEQ ID NO: 14846
  Synthetic polypeptide

SEQ ID NO: 14858 - protein, 217 aa, Artificial Sequence
  Synthetic polypeptide
KLGCTSRGSNLRVHFKNTRETAQAIKGMHIRKATKYLKDVTLQKQCVPFRRYNGGVGRCAQAKQWGWTQGRWPKKSAEFLLHMLKNAESNAELKGLDVDSLVIEHIQVNKAPKMRRRTYRAHGRINPYMSSPCHIEMILTEKEQIVPKPEEEVAQKKKLRSSSLGKWCAFLVSSFQFCSGSTKNSWSHIYTLWFPPSLVVYGLRKQYKNPMIQTKAK

SEQ ID NO: 14859 - protein, 173 aa, Artificial Sequence
  Synthetic polypeptide
KLGCTSRGSNLRVHFKNTRETAQAIKGMHIRKATKYLKDVTLQKQCVPFRRYNGGVGRCAQAKQWGWTQGRWPKKSAEFLLHMLKNAESNAELKGLDVDSLVIEHIQVNKAPKMRRRTYRAHGRINPYMSSPCHIEMILTEKEQIVPKPEEEVAQKKKISQKKLKKQKLMARE

SEQ ID NO: 14860 - protein, 173 aa, Artificial Sequence; identical to SEQ ID NO: 14859
  Synthetic polypeptide

SEQ ID NO: 14861 - protein, 173 aa, Artificial Sequence; identical to SEQ ID NO: 14859
  Synthetic polypeptide

SEQ ID NO: 14862 - protein, 173 aa, Artificial Sequence; identical to SEQ ID NO: 14859
  Synthetic polypeptide

SEQ ID NO: 14863 - protein, 173 aa, Artificial Sequence; identical to SEQ ID NO: 14859
  Synthetic polypeptide

SEQ ID NO: 14864 - protein, 173 aa, Artificial Sequence; identical to SEQ ID NO: 14859
  Synthetic polypeptide

SEQ ID NO: 14865 - protein, 163 aa, Artificial Sequence
  Synthetic polypeptide
KLGCTSRGSNLRVHFKNTRETAQAIKGMHIRKATKYLKDVTLQKQCVPFRRYNGGVGRCAQAKQWGWTQGRWPKKSAEFLLHMLKNAESNAELKGLDVDSLVIEHIQVNKAPKMRRRTYRAHGRINPYMSSPCHIEMILTEKEQIVPKPEEEVAQKKKISQKK

SEQ ID NO: 14866 - protein, 160 aa, Artificial Sequence
  Synthetic polypeptide
KLGCTSRGSNLRVHFKNTRETAQAIKGMHIRKATKYLKDVTLQKQCVPFRRYNGGVGRCAQAKQWGWTQGRWPKKSAEFLLHMLKNAESNAELKGLDVDSLVIEHIQVNKAPKMRRRTYRAHGRINPYMSSPCHIEMILTEKEQIVPKPEEEVAQKKKIS

SEQ ID NO: 14867 - protein, 127 aa, Artificial Sequence
  Synthetic polypeptide
KLGCTSRGSNLRVHFKNTRETAQAIKGMHIRKATKYLKDVTLQKQCVPFRRYNGGVGRCAQAKQWGWTQGRWPKKSAEFLLHMLKNAESNAELKGLDVDSLVIEHIQVNKAPKMRRRTYRAHGRINP

SEQ ID NO: 14868 - protein, 94 aa, Artificial Sequence
  Synthetic polypeptide
KLGCTSRGSNLRVHFKNTRETAQAIKGMHIRKATKYLKDVTLQKQCVPFRRYNGGVGRCAQAKQWGWTQGRWPKKSAEFLLHMLKNAESNAELK

SEQ ID NO: 14869 - protein, 45 aa, Artificial Sequence
  Synthetic polypeptide
KLGCTSRGSNLRVHFKNTRETAQAIKGMHIRKATKYLKDVTLQKQ

SEQ ID NO: 14870 - protein, 30 aa, Artificial Sequence
  Synthetic polypeptide
NRRGEIVGQRGHAALGKPLKAEPSTFWRRS

SEQ ID NO: 14871 - protein, 30 aa, Artificial Sequence; identical to SEQ ID NO: 14870
  Synthetic polypeptide

SEQ ID NO: 14872 - protein, 13 aa, Artificial Sequence
  Synthetic polypeptide
RQSHRLSGEDPDL

SEQ ID NO: 14873 - protein, 13 aa, Artificial Sequence
  Synthetic polypeptide
RQSHRLSGEDPDL

SEQ ID NO: 14874 - protein, 331 aa, Artificial Sequence
  Synthetic polypeptide
DMTAALKQKRGNRGTERTCCFGETTEGRAIDFLEKILTFNPMDRLTAEMGLQHPYMSPYSCPEDEPTSQHPFRIEDEIDDIVLMAANQSQLSNWDTCSSRYPVSLSSDLEWRPDRCQDASEVQRDPRAGSAPLAEDVQVDPRKDSHSSSERFLEQSHSSMERAFEADYGRSCDYKVGSPSYLDKLLWRDNKPHHYSEPKLILDLSHWKQAAGAPPTATGLADTGAREDEPASLFLEIAQWVKSTQGGPEHASPPADDPERRLSASPPGRPAPVDGGASPQFDLDVFISRALKLCTKPEDLPDNKLGDLNGACIPEHPGDLVQTEAFSKERW

SEQ ID NO: 14875 - protein, 331 aa, Artificial Sequence; identical to SEQ ID NO: 14874
  Synthetic polypeptide

SEQ ID NO: 14876 - protein, 72 aa, Artificial Sequence
  Synthetic polypeptide
PLSRNSGLGKFSRVITFGYYPGKQPSRVRNGLRFITWQPPAGAAVPWTKDRGESWASPFPSLLPSPSRKGHQ

SEQ ID NO: 14877 - protein, 110 aa, Artificial Sequence
  Synthetic polypeptide
LHDLCQGIQGWENLAESSHLATTRESSPPESGTGSGSSRGSRLQEPQFHGPKTEENPGPAPFHPYFPAQAEKDINDIFLFQGLLETEVPEAGASEECVFHLGRKSSGPQC

SEQ ID NO: 14878 - protein, 18 aa, Artificial Sequence
  Synthetic polypeptide
LPQINCMTFVKEFRAGKI

SEQ ID NO: 14879 - protein, 18 aa, Artificial Sequence
  Synthetic polypeptide
LPQINCMTFVKEFRAGKI

SEQ ID NO: 14880 - protein, 18 aa, Artificial Sequence
  Synthetic polypeptide
LPQINCMTFVKEFRAGKI

SEQ ID NO: 14881 - protein, 73 aa, Artificial Sequence
  Synthetic polypeptide
PLSRNSGLGKFSRVITFGYYPGKQPSRVRNGLRFITWQPPAGAAGLLETEVPEAGASEECVFHLGRKSSGPQC

SEQ ID NO: 14882 - protein, 73 aa, Artificial Sequence; identical to SEQ ID NO: 14881
  Synthetic polypeptide

SEQ ID NO: 14883 - protein, 210 aa, Artificial Sequence
  Synthetic polypeptide
LHDLCQGIQGWENLAESSHLATTRESSPPESGTGSGSSRGSRLQEPQVSWKLRFQKREPLKNVFFILAERARDPSAKKRHMAMRNLGTMAYEAPDKVRKYKKIVLDLLVYGLYDPVNLEVIHESMKTLTVVLGKIQGKGLGSFFIDITLQTRTLLDDACKTTFQACSPYLKLKEEYSFQSEEDQRNTKLYQQLSHYHPEILQFFYANKIL

SEQ ID NO: 14884 - protein, 262 aa, Artificial Sequence
  Synthetic polypeptide
LHDLCQGIQGWENLAESSHLATTRESSPPESGTGSGSSRGSRLQEPQVSWKLRFQKREPLKNVFFILAERARDPSAKKRHMAMRNLGTMAYEAPDKVRKYKKIVLDLLVYGLYDPVNLEVIHESMKTLTVVLGKIQGKGLGSFFIDITLQTRTLLDDENDSLRYSAFVLFGQLAAFAGRKWKKFFTSQVKQTRDSLLIHLQDRNPQVAKACKTTFQACSPYLKLKEEYSFQSEEDQRNTKLYQQLSHYHPEILQFFYANKIL

SEQ ID NO: 14885 - protein, 20 aa, Artificial Sequence
  Synthetic polypeptide
QGHLSSPTDVQRQGIHSSGR

SEQ ID NO: 14886 - protein, 18 aa, Artificial Sequence
  Synthetic polypeptide
VLQQTFNAKGFTVLGGDL

SEQ ID NO: 14887 - protein, 452 aa, Artificial Sequence
  Synthetic polypeptide
AAFPNVEGTIARTPEFSNRRSTPRDSQFWEVISDEHAIDSAGTYHGDSHLQLERINVHHHEASGGRYVPRAVLVDLEPGTMDSVHSGPFGQVFRPDNFISGQCGAGNNWAKGRYTEGAELTESVMDVVRKEAESCDCLQGFQLTHSLGGGTGSGMGTLLISKIREEYPDRIINTFSILPSPKVSDTVVEPYNATLSVHQLIENADETFCIDNEALYDICSRTLKLPTPTYGDLNHLVSATMSGVTTCLRFPGQLNADLRKLAVNMVPFPRLHFFMPGFAPLTSRGSQQYRALTVAELTQQMFDAKNMMAACDPRHGCYLTVAAIFRGRMPMREVDEQMFNIQDKNSSYFADWFPDNVKTAVCDIPPRGLKMSATFIGNNAAIQELFTCVSEQFTAMFRRKAFLHWYTGEGMDEMEFTEAESNMNDLVSEYQQYQDATAEEEEDEEYAEEEVA

SEQ ID NO: 14888 - protein, 11 aa, Artificial Sequence
  Synthetic polypeptide
LCDLGKTSQHG

SEQ ID NO: 14889 - protein, 11 aa, Artificial Sequence
  Synthetic polypeptide
LCDLGKTSQHG

SEQ ID NO: 14890 - protein, 1212 aa, Artificial Sequence
  Synthetic polypeptide
ELSPWNQTVLAVLFPSSVTLGKPHSTGSSERIQLSGMYNVRKGKMQLPVNRWTRRQVILCGTCLIVSSVKDSLTGKMHVLPLIGGKVEEVKKHQHCLAFSSSGPQSQTYYICFDTFTEYLRWLRQVSKVASQRISSVDLSCCSLEHLPANLFYSQDLTHLNLKQNFLRQNPSLPAARGLNELQRFTKLKSLNLSNNHLGDFPLAVCSIPTLAELNVSCNALRSVPAAVGVMHNLQTFLLDGNFLQSLPAELENMKQLSYLGLSFNEFTDIPEVLEKLTAVDKLCMSGNCVETLRLQALRKMPHIKHVDLRLNVIRKLIADEVDFLQHVTQLDLRDNKLGDLDAMIFNNIEVLHCERNQLVTLDICGYFLKALYASSNELVQLDVYPVPNYLSYMDVSRNRLENVPEWVCESRKLEVLDIGHNQICELPARLFCNSSLRKLLAGHNQLARLPERLERTSVEVLDVQHNQLLELPPNLLMKADSLRFLNASANKLESLPPATLSEETNSILQELYLTNNSLTDKCVPLLTGHPHLKILHMAYNRLQSFPASKMAKLEELEEIDLSGNKLKAIPTTIMNCRRMHTVIAHSNCIEVFPEVMQLPEIKCVDLSCNELSEVTLPENLPPKLQELDLTGNPRLVLDHKTLELLNNIRCFKIDQPSTGDASGAPAVWSHGYTEASGVKNKLCVAALSVNNFCDNREALYGVFDGDRNVEVPYLLQCTMSDILAEELQKTKNEEEYMVNTFIVMQRKLGTAGQKLGGAAVLCHIKHDPVDPGGSFTLTSANVGKCQTVLCRNGKPLPLSRSYIMSCEEELKRIKQHKAIITEDGKVNGVTESTRILGYTFLHPSVVPRPHVQSVLLTPQDEFFILGSKGLWDSLSVEEAVEAVRNVPDALAAAKKLCTLAQSYGCHDSISAVVVQLSVTEDSFCCCELSAGGAVPPPSPGIFPPSVNMVIKDRPSDGLGVPSSSSGMASEISSELSTSEMSSEVGSTASDEPPPGALSENSPAYPSEQRCMLHPICLSNSFQRQLSSATFSSAFSDNGLDSDDEEPIEGVFTNGSRVEVEVDIHCSRAKEKEKQQHLLQVPAEASDEGIVISANEDEPGLPRKADFSAVGTIGRRRANGSVAPQERSHNVIEVATDAPLRKPGGYFAAPAQPDPDDQFIIPPELEEEVKEIMKHHQEQQQQQQPPPPPQLQPQLPRHYQLDQLPDYYDTPL

SEQ ID NO: 14891 - protein, 1212 aa, Artificial Sequence; identical to SEQ ID NO: 14890
  Synthetic polypeptide

SEQ ID NO: 14892 - protein, 30 aa, Artificial Sequence
  Synthetic polypeptide
PWENLTARVALNGFSSQECIMSVKARCSCQ

SEQ ID NO: 14893 - protein, 30 aa, Artificial Sequence; identical to SEQ ID NO: 14892
  Synthetic polypeptide

SEQ ID NO: 14894 - protein, 1227 aa, Artificial Sequence
  Synthetic polypeptide
GQRKKITGGNLDLHKGMKNNGNNKYKRLILKILFQGKPHSTGSSERIQLSGMYNVRKGKMQLPVNRWTRRQVILCGTCLIVSSVKDSLTGKMHVLPLIGGKVEEVKKHQHCLAFSSSGPQSQTYYICFDTFTEYLRWLRQVSKVASQRISSVDLSCCSLEHLPANLFYSQDLTHLNLKQNFLRQNPSLPAARGLNELQRFTKLKSLNLSNNHLGDFPLAVCSIPTLAELNVSCNALRSVPAAVGVMHNLQTFLLDGNFLQSLPAELENMKQLSYLGLSFNEFTDIPEVLEKLTAVDKLCMSGNCVETLRLQALRKMPHIKHVDLRLNVIRKLIADEVDFLQHVTQLDLRDNKLGDLDAMIFNNIEVLHCERNQLVTLDICGYFLKALYASSNELVQLDVYPVPNYLSYMDVSRNRLENVPEWVCESRKLEVLDIGHNQICELPARLFCNSSLRKLLAGHNQLARLPERLERTSVEVLDVQHNQLLELPPNLLMKADSLRFLNASANKLESLPPATLSEETNSILQELYLTNNSLTDKCVPLLTGHPHLKILHMAYNRLQSFPASKMAKLEELEEIDLSGNKLKAIPTTIMNCRRMHTVIAHSNCIEVFPEVMQLPEIKCVDLSCNELSEVTLPENLPPKLQELDLTGNPRLVLDHKTLELLNNIRCFKIDQPSTGDASGAPAVWSHGYTEASGVKNKLCVAALSVNNFCDNREALYGVFDGDRNVEVPYLLQCTMSDILAEELQKTKNEEEYMVNTFIVMQRKLGTAGQKLGGAAVLCHIKHDPVDPGGSFTLTSANVGKCQTVLCRNGKPLPLSRSYIMSCEEELKRIKQHKAIITEDGKVNGVTESTRILGYTFLHPSVVPRPHVQSVLLTPQDEFFILGSKGLWDSLSVEEAVEAVRNVPDALAAAKKLCTLAQSYGCHDSISAVVVQLSVTEDSFCCCELSAGGAVPPPSPGIFPPSVNMVIKDRPSDGLGVPSSSSGMASEISSELSTSEMSSEVGSTASDEPPPGALSENSPAYPSEQRCMLHPICLSNSFQRQLSSATFSSAFSDNGLDSDDEEPIEGVFTNGSRVEVEVDIHCSRAKEKEKQQHLLQVPAEASDEGIVISANEDEPGLPRKADFSAVGTIGRRRANGSVAPQERSHNVIEVATDAPLRKPGGYFAAPAQPDPDDQFIIPPELEEEVKEIMKHHQEQQQQQQPPPPPQLQPQLPRHYQLDQLPDYYDTPL

SEQ ID NO: 14895 - protein, 1227 aa, Artificial Sequence; identical to SEQ ID NO: 14894
  Synthetic polypeptide

SEQ ID NO: 14896 - protein, 33 aa, Artificial Sequence
  Synthetic polypeptide
KFSSKENLTARVALNGFSSQECIMSVKARCSCQ

SEQ ID NO: 14897 - protein, 33 aa, Artificial Sequence; identical to SEQ ID NO: 14896
  Synthetic polypeptide

SEQ ID NO: 14898 - protein, 16 aa, Artificial Sequence
  Synthetic polypeptide
KTYFKNSLPRKTSQHG

SEQ ID NO: 14899 - protein, 16 aa, Artificial Sequence
  Synthetic polypeptide
KTYFKNSLPRKTSQHG

SEQ ID NO: 14900 - protein, 821 aa, Artificial Sequence
  Synthetic polypeptide
FLHFHLRNRLENVPEWVCESRKLEVLDIGHNQICELPARLFCNSSLRKLLAGHNQLARLPERLERTSVEVLDVQHNQLLELPPNLLMKADSLRFLNASANKLESLPPATLSEETNSILQELYLTNNSLTDKCVPLLTGHPHLKILHMAYNRLQSFPASKMAKLEELEEIDLSGNKLKAIPTTIMNCRRMHTVIAHSNCIEVFPEVMQLPEIKCVDLSCNELSEVTLPENLPPKLQELDLTGNPRLVLDHKTLELLNNIRCFKIDQPSTGDASGAPAVWSHGYTEASGVKNKLCVAALSVNNFCDNREALYGVFDGDRNVEVPYLLQCTMSDILAEELQKTKNEEEYMVNTFIVMQRKLGTAGQKLGGAAVLCHIKHDPVDPGGSFTLTSANVGKCQTVLCRNGKPLPLSRSYIMSCEEELKRIKQHKAIITEDGKVNGVTESTRILGYTFLHPSVVPRPHVQSVLLTPQDEFFILGSKGLWDSLSVEEAVEAVRNVPDALAAAKKLCTLAQSYGCHDSISAVVVQLSVTEDSFCCCELSAGGAVPPPSPGIFPPSVNMVIKDRPSDGLGVPSSSSGMASEISSELSTSEMSSEVGSTASDEPPPGALSENSPAYPSEQRCMLHPICLSNSFQRQLSSATFSSAFSDNGLDSDDEEPIEGVFTNGSRVEVEVDIHCSRAKEKEKQQHLLQVPAEASDEGIVISANEDEPGLPRKADFSAVGTIGRRRANGSVAPQERSHNVIEVATDAPLRKPGGYFAAPAQPDPDDQFIIPPELEEEVKEIMKHHQEQQQQQQPPPPPQLQPQLPRHYQLDQLPDYYDTPL

SEQ ID NO: 14901 - protein, 821 aa, Artificial Sequence; identical to SEQ ID NO: 14900
  Synthetic polypeptide

SEQ ID NO: 14902 - protein, 39 aa, Artificial Sequence
  Synthetic polypeptide
GRSQDGRIGTAPVYSSQRERRRRRVISAFPSEEPLRKCA

SEQ ID NO: 14903 - protein, 39 aa, Artificial Sequence; identical to SEQ ID NO: 14902
  Synthetic polypeptide

SEQ ID NO: 14904 - protein, 39 aa, Artificial Sequence; identical to SEQ ID NO: 14902
  Synthetic polypeptide

SEQ ID NO: 14905 - protein, 177 aa, Artificial Sequence
  Synthetic polypeptide
FLHFHLRNRLENVPEWVCESRKLEVLDIGHNQICELPARLFCNSSLRKLLAGHNQLARLPERLERTSVEVLDVQHNQLLELPPNLLMKADSKMAKLEELEEIDLSGNKLKAIPTTIMNCRRMHTVIAHSNCIEVFPEVMQLPEIKCVDLSCNELSEVTLPENLPPKLQELDLTGNPR

SEQ ID NO: 14906 - protein, 30 aa, Artificial Sequence
  Synthetic polypeptide
SQSCVELLNSKVILGGSVGNMLLRLFRTGS

SEQ ID NO: 14907 - protein, 30 aa, Artificial Sequence; identical to SEQ ID NO: 14906
  Synthetic polypeptide

SEQ ID NO: 14908 - protein, 25 aa, Artificial Sequence
  Synthetic polypeptide
SNFRWKCWKHAAEIIQDRELTNCKE

SEQ ID NO: 14909 - protein, 25 aa, Artificial Sequence
  Synthetic polypeptide
SNFRWKCWKHAAEIIQDRELTNCKE

SEQ ID NO: 14910 - protein, 24 aa, Artificial Sequence
  Synthetic polypeptide
MSRRGNEGLPRATPPENSQEERKY

SEQ ID NO: 14911 - protein, 24 aa, Artificial Sequence
  Synthetic polypeptide
MSRRGNEGLPRATPPENSQEERKY

SEQ ID NO: 14912 - protein, 23 aa, Artificial Sequence
  Synthetic polypeptide
AEEEMRAFPEQLPQKIHKKRGNT

SEQ ID NO: 14913 - protein, 23 aa, Artificial Sequence
  Synthetic polypeptide
AEEEMRAFPEQLPQKIHKKRGNT

SEQ ID NO: 14914 - protein, 18 aa, Artificial Sequence
  Synthetic polypeptide
GPSQSNSPRKFTRREEIL

SEQ ID NO: 14915 - protein, 18 aa, Artificial Sequence
  Synthetic polypeptide
GPSQSNSPRKFTRREEIL

SEQ ID NO: 14916 - protein, 21 aa, Artificial Sequence
  Synthetic polypeptide
RGAFCHDSSWWGRSFKGTSWR

SEQ ID NO: 14917 - protein, 21 aa, Artificial Sequence
  Synthetic polypeptide
RGAFCHDSSWWGRSFKGTSWR

SEQ ID NO: 14918 - protein, 21 aa, Artificial Sequence
  Synthetic polypeptide
RGAFCHDSSWWGRSFKGTSWR

SEQ ID NO: 14919 - protein, 116 aa, Artificial Sequence
  Synthetic polypeptide
VFDSSSLACFFSLLPSCEEVPSVMIHPGGEEVLREQAGGDATENFEDVGHSTDAREMSKTFIIGELHPDDRPKLNKPPETLITTIDSSSSWWTNWVIPAISAVAVALMYRLYMAED

SEQ ID NO: 14920 - protein, 80 aa, Artificial Sequence
  Synthetic polypeptide
VFDSSSLACFFSLLPSCEEVPSVMIHPGGEEVLREQAGGDATENFEDVGHSTDAREMSKTFIIGELHPDDRPKLNKPPEP

SEQ ID NO: 14921 - protein, 106 aa, Artificial Sequence
  Synthetic polypeptide
VFDSSSLACFFSLLPSCEEVPSVMIHPGGEEVLREQAGGDATENFEDVGHSTDAREMSKTFIIGELHPETLITTIDSSSSWWTNWVIPAISAVAVALMYRLYMAED

SEQ ID NO: 14922 - protein, 67 aa, Artificial Sequence
  Synthetic polypeptide
MDEQKAIRAYGAVDVVQPNGGRWKGILTGAAARGAWRALRTHTTRQELLTTAPCPRSHTAGPKMKTP

SEQ ID NO: 14923 - protein, 67 aa, Artificial Sequence; identical to SEQ ID NO: 14922
  Synthetic polypeptide

SEQ ID NO: 14924 - protein, 67 aa, Artificial Sequence; identical to SEQ ID NO: 14922
  Synthetic polypeptide

SEQ ID NO: 14925 - protein, 67 aa, Artificial Sequence; identical to SEQ ID NO: 14922
  Synthetic polypeptide

SEQ ID NO: 14926 - protein, 67 aa, Artificial Sequence; identical to SEQ ID NO: 14922
  Synthetic polypeptide

SEQ ID NO: 14927 - protein, 67 aa, Artificial Sequence; identical to SEQ ID NO: 14922
  Synthetic polypeptide

SEQ ID NO: 14928 - protein, 67 aa, Artificial Sequence; identical to SEQ ID NO: 14922
  Synthetic polypeptide

SEQ ID NO: 14929 - protein, 67 aa, Artificial Sequence; identical to SEQ ID NO: 14922
  Synthetic polypeptide

SEQ ID NO: 14930 - protein, 67 aa, Artificial Sequence; identical to SEQ ID NO: 14922
  Synthetic polypeptide

SEQ ID NO: 14931 - protein, 67 aa, Artificial Sequence; identical to SEQ ID NO: 14922
  Synthetic polypeptide

SEQ ID NO: 14932 - protein, 67 aa, Artificial Sequence; identical to SEQ ID NO: 14922
  Synthetic polypeptide

SEQ ID NO: 14933 - protein, 67 aa, Artificial Sequence; identical to SEQ ID NO: 14922
  Synthetic polypeptide

SEQ ID NO: 14934 - protein, 67 aa, Artificial Sequence; identical to SEQ ID NO: 14922
  Synthetic polypeptide

SEQ ID NO: 14935 - protein, 67 aa, Artificial Sequence; identical to SEQ ID NO: 14922
  Synthetic polypeptide

SEQ ID NO: 14936 - protein, 67 aa, Artificial Sequence; identical to SEQ ID NO: 14922
  Synthetic polypeptide

SEQ ID NO: 14937 - protein, 67 aa, Artificial Sequence; identical to SEQ ID NO: 14922
  Synthetic polypeptide

SEQ ID NO: 14938 - protein, 67 aa, Artificial Sequence; identical to SEQ ID NO: 14922
  Synthetic polypeptide

SEQ ID NO: 14939 - protein, 67 aa, Artificial Sequence; identical to SEQ ID NO: 14922
  Synthetic polypeptide

SEQ ID NO: 14940 - protein, 67 aa, Artificial Sequence; identical to SEQ ID NO: 14922
  Synthetic polypeptide

SEQ ID NO: 14941 - protein, 67 aa, Artificial Sequence; identical to SEQ ID NO: 14922
  Synthetic polypeptide

SEQ ID NO: 14942 - protein, 36 aa, Artificial Sequence
  Synthetic polypeptide
RGPQHGAPGGHCGLTPPGKNCSLRLPAPEVTRPDPR

SEQ ID NO: 14943 - protein, 36 aa, Artificial Sequence; identical to SEQ ID NO: 14942
  Synthetic polypeptide

SEQ ID NO: 14944 - protein, 36 aa, Artificial Sequence; identical to SEQ ID NO: 14942
  Synthetic polypeptide

SEQ ID NO: 14945 - protein, 36 aa, Artificial Sequence; identical to SEQ ID NO: 14942
  Synthetic polypeptide

SEQ ID NO: 14946 - protein, 36 aa, Artificial Sequence; identical to SEQ ID NO: 14942
  Synthetic polypeptide

SEQ ID NO: 14947 - protein, 36 aa, Artificial Sequence; identical to SEQ ID NO: 14942
  Synthetic polypeptide

SEQ ID NO: 14948 - protein, 36 aa, Artificial Sequence; identical to SEQ ID NO: 14942
  Synthetic polypeptide

SEQ ID NO: 14949 - protein, 36 aa, Artificial Sequence; identical to SEQ ID NO: 14942
  Synthetic polypeptide

SEQ ID NO: 14950 - protein, 36 aa, Artificial Sequence; identical to SEQ ID NO: 14942
  Synthetic polypeptide

SEQ ID NO: 14951 - protein, 36 aa, Artificial Sequence; identical to SEQ ID NO: 14942
  Synthetic polypeptide

SEQ ID NO: 14952 - protein, 36 aa, Artificial Sequence; identical to SEQ ID NO: 14942
  Synthetic polypeptide

SEQ ID NO: 14953 - protein, 36 aa, Artificial Sequence; identical to SEQ ID NO: 14942
  Synthetic polypeptide

SEQ ID NO: 14954 - protein, 36 aa, Artificial Sequence; identical to SEQ ID NO: 14942
  Synthetic polypeptide

SEQ ID NO: 14955 - protein, 36 aa, Artificial Sequence; identical to SEQ ID NO: 14942
  Synthetic polypeptide

SEQ ID NO: 14956 - protein, 36 aa, Artificial Sequence; identical to SEQ ID NO: 14942
  Synthetic polypeptide

SEQ ID NO: 14957 - protein, 36 aa, Artificial Sequence; identical to SEQ ID NO: 14942
  Synthetic polypeptide

SEQ ID NO: 14958 - protein, 36 aa, Artificial Sequence; identical to SEQ ID NO: 14942
  Synthetic polypeptide

SEQ ID NO: 14959 - protein, 36 aa, Artificial Sequence; identical to SEQ ID NO: 14942
  Synthetic polypeptide

SEQ ID NO: 14960 - protein, 36 aa, Artificial Sequence; identical to SEQ ID NO: 14942
  Synthetic polypeptide

SEQ ID NO: 14961 - protein, 36 aa, Artificial Sequence; identical to SEQ ID NO: 14942
  Synthetic polypeptide

SEQ ID NO: 14962 - protein, 133 aa, Artificial Sequence
  Synthetic polypeptide
RWKVEGDSDGGRSTGRLEGTADSHHPARTAHYGSLPQKSHGRTQDENPVVHFFKNIVTPRTPPPSQGKGRGLSLSRFSWGAEGQRPGFGYGGRASDYKSAHKGFKGVDAQGTLSKIFKLGGRDSRSGSPMARR

SEQ ID NO: 14963 - protein, 133 aa, Artificial Sequence; identical to SEQ ID NO: 14962
  Synthetic polypeptide

SEQ ID NO: 14964 - protein, 133 aa, Artificial Sequence; identical to SEQ ID NO: 14962
  Synthetic polypeptide

SEQ ID NO: 14965 - protein, 133 aa, Artificial Sequence; identical to SEQ ID NO: 14962
  Synthetic polypeptide

SEQ ID NO: 14966 - protein, 133 aa, Artificial Sequence; identical to SEQ ID NO: 14962
  Synthetic polypeptide

SEQ ID NO: 14967 - protein, 143 aa, Artificial Sequence
  Synthetic polypeptide
RWKVEGDSDGGRSTGRLEGTADSHHPARTAHYGSLPQKSHGRTQDENPVVHFFKNICSPRFSVSFQVTPRTPPPSQGKGRGLSLSRFSWGAEGQRPGFGYGGRASDYKSAHKGFKGVDAQGTLSKIFKLGGRDSRSGSPMARR

SEQ ID NO: 14968 - protein, 122 aa, Artificial Sequence
  Synthetic polypeptide
RWKVEGDSDGGRSTGRLEGTADSHHPARTAHYGSLPQKSHGRTQDENPVVHFFKNIVTPRTPPPSQGKGAEGQRPGFGYGGRASDYKSAHKGFKGVDAQGTLSKIFKLGGRDSRSGSPMARR

SEQ ID NO: 14969 - protein, 122 aa, Artificial Sequence; identical to SEQ ID NO: 14968
  Synthetic polypeptide

SEQ ID NO: 14970 - protein, 89 aa, Artificial Sequence
  Synthetic polypeptide
MDEQKAIRAYGAVDVVQPNGGRWKGILTGAAARGAWRALRTHTTRQELLTTAPCPRSTQLQRQRGRGRQRGLLTSKLPLFFFPVLLSPP

SEQ ID NO: 14971 - protein, 45 aa, Artificial Sequence
  Synthetic polypeptide
RGPQHGAPGGHCGLTPPGKNCSLRLPAPEAHSCRDREDVGGREDC

SEQ ID NO: 14972 - protein, 70 aa, Artificial Sequence
  Synthetic polypeptide
RWKVEGDSDGGRSTGRLEGTADSHHPARTAHYGSLPQKHTAAETERTWAAERTVDIQASFVFFSCPSLTS

SEQ ID NO: 14973 - protein, 198 aa, Artificial Sequence
  Synthetic polypeptide
RWKVEGDSDGGRSTGRLEGTADSHHPARTAHYGSLPQKSHGRTQDENPVVHFFKNIVTPRTPPPSQGKGRGLSLSRFSWVGDERTSIGFLFRPSPHSPATFVFCSVSVASWPPFLSSRDLSAHSWDRAALSSTGEMKRGLPFRKGAEGQRPGFGYGGRASDYKSAHKGFKGVDAQGTLSKIFKLGGRDSRSGSPMARR

SEQ ID NO: 14974 - protein, 49 aa, Artificial Sequence
  Synthetic polypeptide
RWKVEGDSDGGRSTGRLEGTADSHHPARTAHYGSLPQKSHGRTQDENPV

SEQ ID NO: 14975 - protein, 49 aa, Artificial Sequence; identical to SEQ ID NO: 14974
  Synthetic polypeptide

SEQ ID NO: 14976 - protein, 49 aa, Artificial Sequence; identical to SEQ ID NO: 14974
  Synthetic polypeptide

SEQ ID NO: 14977 - protein, 82 aa, Artificial Sequence
  Synthetic polypeptide
RWKVEGDSDGGRSTGRLEGTADSHHPARTAHYGSLPQKSHGRTQDENPVVHFFKNIVTPRTPPPSQGKGGRDSRSGSPMARR

SEQ ID NO: 14978 - protein, 119 aa, Artificial Sequence
  Synthetic polypeptide
RWKVEGDSDGGRSTGRLEGTADSHHPARTAHYGSLPQKSHGRTQDENPVVHFFKNIVTPRTPPPSQGKGRGLSLSRFSWGAEGQRPGFGYGGRASDYKSAHKGFKGVDAQGTLSKIFKL

SEQ ID NO: 14979 - protein, 119 aa, Artificial Sequence; identical to SEQ ID NO: 14978
  Synthetic polypeptide

SEQ ID NO: 14980 - protein, 60 aa, Artificial Sequence
  Synthetic polypeptide
RWKVEGDSDGGRSTGRLEGTADSHHPARTAHYGSLPQKSHGRTQDENPVVHFFKNIAGAR

SEQ ID NO: 14981 - protein, 70 aa, Artificial Sequence
  Synthetic polypeptide
RWKVEGDSDGGRSTGRLEGTADSHHPARTAHYGSLPQKSHGRTQDENPVVHFFKNIDRSGEAGHPGASGS

SEQ ID NO: 14982 - protein, 107 aa, Artificial Sequence
  Synthetic polypeptide
RWKVEGDSDGGRSTGRLEGTADSHHPARTAHYGSLPQKSHGRTQDENPVVHFFKNIVTPRTPPPSQGKGRGLSLSRFSWVGDERTSIGFLFRPSPHSPATFVFCSVS

SEQ ID NO: 14983 - protein, 81 aa, Artificial Sequence
  Synthetic polypeptide
RWKVEGDSDGGRSTGRLEGTADSHHPARTAHYGSLPQKSHGRTQDENPVVHFFKNIVYTSSPTRTEVGRLGTRVLLAADGC

SEQ ID NO: 14984 - protein, 48 aa, Artificial Sequence
  Synthetic polypeptide
RWKVEGDSDGGRSTGRLEGTADSHHPARTAHYGSLPQKSHGRTQDENP

SEQ ID NO: 14985 - protein, 34 aa, Artificial Sequence
  Synthetic polypeptide
RKVVPLNPKTPNVHQLQSHWRYSCGLLLRPTQHT

SEQ ID NO: 14986 - protein, 8 aa, Artificial Sequence
  Synthetic polypeptide
KIKERWYL

SEQ ID NO: 14987 - protein, 57 aa, Artificial Sequence
  Synthetic polypeptide
FNSYLTFTFSSNVLQSGKGRKLKKGGTSKSKNSKCPPAPVTLEIQLWFAPKTHPAHV

SEQ ID NO: 14988 - protein, 17 aa, Artificial Sequence
  Synthetic polypeptide
DQPGQHDKWWPGVCSIP

SEQ ID NO: 14989 - protein, 17 aa, Artificial Sequence
  Synthetic polypeptide
DQPGQHDKWWPGVCSIP

SEQ ID NO: 14990 - protein, 17 aa, Artificial Sequence
  Synthetic polypeptide
DQPGQHDKWWPGVCSIP

SEQ ID NO: 14991 - protein, 17 aa, Artificial Sequence
  Synthetic polypeptide
DQPGQHDKWWPGVCSIP

SEQ ID NO: 14992 - protein, 17 aa, Artificial Sequence
  Synthetic polypeptide
DQPGQHDKWWPGVCSIP

SEQ ID NO: 14993 - protein, 17 aa, Artificial Sequence
  Synthetic polypeptide
DQPGQHDKWWPGVCSIP

SEQ ID NO: 14994 - protein, 17 aa, Artificial Sequence
  Synthetic polypeptide
DQPGQHDKWWPGVCSIP

SEQ ID NO: 14995 - protein, 17 aa, Artificial Sequence
  Synthetic polypeptide
DQPGQHDKWWPGVCSIP

SEQ ID NO: 14996 - protein, 27 aa, Artificial Sequence
  Synthetic polypeptide
AREFETSLGNMTNGGPEFARYLEGSLR

SEQ ID NO: 14997 - protein, 27 aa, Artificial Sequence
  Synthetic polypeptide
AREFETSLGNMTNGGPEFARYLEGSLR

SEQ ID NO: 14998 - protein, 27 aa, Artificial Sequence
  Synthetic polypeptide
AREFETSLGNMTNGGPEFARYLEGSLR

SEQ ID NO: 14999 - protein, 27 aa, Artificial Sequence
  Synthetic polypeptide
AREFETSLGNMTNGGPEFARYLEGSLR

SEQ ID NO: 15000 - protein, 27 aa, Artificial Sequence
  Synthetic polypeptide
AREFETSLGNMTNGGPEFARYLEGSLR

SEQ ID NO: 15001 - protein, 27 aa, Artificial Sequence
  Synthetic polypeptide
AREFETSLGNMTNGGPEFARYLEGSLR

SEQ ID NO: 15002 - protein, 27 aa, Artificial Sequence
  Synthetic polypeptide
AREFETSLGNMTNGGPEFARYLEGSLR

SEQ ID NO: 15003 - protein, 22 aa, Artificial Sequence
  Synthetic polypeptide
AREFETSLGNMTNGGPEFARYL

SEQ ID NO: 15004 - protein, 41 aa, Artificial Sequence
  Synthetic polypeptide
DWAQWLTPVIPALWEAEAGGSRVSFIGSHVLSRLSCSCYRV

SEQ ID NO: 15005 - protein, 141 aa, Artificial Sequence
  Synthetic polypeptide
SQHFGRPRRADHEFHSLAPMYYRGSAAAVIVYDITKQDSFYTLKKWVKELKEHGPENIVMAIAGNKCDLSDIREVPLKDAKEYAESIGAIVVETSAKNAINIEELFQGISRQIPPLDPHENGNNGTIKVEKPTMQASRRCC

SEQ ID NO: 15006 - protein, 51 aa, Artificial Sequence
  Synthetic polypeptide
MGAVAHACNPSTLGGRGGRITSFIHWLPCTIEAQLQLLSCMILPSRIHFIP

SEQ ID NO: 15007 - protein, 31 aa, Artificial Sequence
  Synthetic polypeptide
VWWLTPIPALWEAEVGGSLKPRSSRPAWISW

SEQ ID NO: 15008 - protein, 31 aa, Artificial Sequence; identical to SEQ ID NO: 15007
  Synthetic polypeptide

SEQ ID NO: 15009 - protein, 31 aa, Artificial Sequence; identical to SEQ ID NO: 15007
  Synthetic polypeptide

SEQ ID NO: 15010 - protein, 31 aa, Artificial Sequence; identical to SEQ ID NO: 15007
  Synthetic polypeptide

SEQ ID NO: 15011 - protein, 80 aa, Artificial Sequence
  Synthetic polypeptide
ARCGGSHLSQHFGRQRWEDRLNPGVQDQPGYHGDRVRGARTPGCVAAEGAGPCAHGLEDGGGPAAGQRPQLPGEQEPGSW

SEQ ID NO: 15012 - protein, 80 aa, Artificial Sequence; identical to SEQ ID NO: 15011
  Synthetic polypeptide

SEQ ID NO: 15013 - protein, 80 aa, Artificial Sequence; identical to SEQ ID NO: 15011
  Synthetic polypeptide

SEQ ID NO: 15014 - protein, 80 aa, Artificial Sequence; identical to SEQ ID NO: 15011
  Synthetic polypeptide

SEQ ID NO: 15015 - protein, 513 aa, Artificial Sequence
  Synthetic polypeptide
TQEFKTSLDIMVTEYVEHGPLDVWLRRERGHVPMAWKMVVAQQLASALSYLENKNLVHGNVCGRNILLARLGLAEGTSPFIKLSDPGVGLGALSREERVERIPWLAPECLPGGANSLSTAMDKWGFGATLLEICFDGEAPLQSRSPSEKEHFYQRQHRLPEPSCPQLATLTSQCLTYEPTQRPSFRTILRDLTRLQPHNLADVLTVNPDSPASDPTVFHKRYLKKIRDLGEGHFGKVSLYCYDPTNDGTGEMVAVKALKADCGPQHRSGWKQEIDILRTLYHEHIIKYKGCCEDQGEKSLQLVMEYVPLGSLRDYLPRHSIGLAQLLLFAQQICEGMAYLHAQHYIHRDLAARNVLLDNDRLVKIGDFGLAKAVPEGHEYYRVREDGDSPVFWYAPECLKEYKFYYASDVWSFGVTLYELLTHCDSSQSPPTKFLELIGIAQGQMTVLRLTELLERGERLPRPDKCPCEVYHLMKNCWETEASFRPTFENLIPILKTVHEKYQGQAPSVFSVC

SEQ ID NO: 15016 - protein, 513 aa, Artificial Sequence; identical to SEQ ID NO: 15015
  Synthetic polypeptide

SEQ ID NO: 15017 - protein, 513 aa, Artificial Sequence; identical to SEQ ID NO: 15015
  Synthetic polypeptide

SEQ ID NO: 15018 - protein, 247 aa, Artificial Sequence
  Synthetic polypeptide
TQEFKTSLDIMVTEYVEHGPLDVWLRRERGHVPMAWKMVVAQQLASALSYLENKNLVHGNVCGRNILLARLGLAEGTSPFIKLSDPGVGLGALSREERVERIPWLAPECLPGGANSLSTAMDKWGFGATLLEICFDGEAPLQSRSPSEVCLGDPWALPAVGAPPRNPEDRIRAQSCIPSGLVTSSLSGLPAGGPLAGAQCSPSLFRSLWKSLVPGTQKASKRLDFSFRQSDQGSDGRRPGCRVGKKG

SEQ ID NO: 15019 - protein, 33 aa, Artificial Sequence
  Synthetic polypeptide
GQLGHKISLDLEARPRDDQARRAWLRHRGPERG

SEQ ID NO: 15020 - protein, 33 aa, Artificial Sequence; identical to SEQ ID NO: 15019
  Synthetic polypeptide

SEQ ID NO: 15021 - protein, 196 aa, Artificial Sequence
  Synthetic polypeptide
AWTWRPDPEMTKRDVPGFAIGGLSGGESKSQFWRMVALSTSRLPKDKPRYLMGVGYATDLVVCVALGCDMFDCVFPTRTARFGSALVPTGNLQLRKKVFEKDFGPIDPECTCPTCQKHSRAFLHALLHSDNTAALHHLTVHNIAYQLQLMSAVRTSIVEKRFPDFVRDFMGAMYGDPTLCPTWATDALASVGITLG

SEQ ID NO: 15022 - protein, 16 aa, Artificial Sequence
  Synthetic polypeptide
AAGAQDKPGLGGQTQR

SEQ ID NO: 15023 - protein, 16 aa, Artificial Sequence
  Synthetic polypeptide
AAGAQDKPGLGGQTQR

SEQ ID NO: 15024 - protein, 40 aa, Artificial Sequence
  Synthetic polypeptide
AWTWRPDPEMTKRDVPGFAIGGLSGGESKSQFWRMVALST

SEQ ID NO: 15025 - protein, 559 aa, Artificial Sequence
  Synthetic polypeptide
LHKDKDFGTTKAEDRGMLLKTFNEPGSEYFIFLLSTRAGGLGLNLQSADTVIIFDSDWNPHQDLQAQDRAHRIGQQNEVRVLRLCTVNSVEEKILAAAKYKLNVDQKVIQAGMFDQKSSSHERRAFLQAILEHEEQDESRHCSTGSGSASFAHTAPPPAGVNPDLEEPPLKEEDEVPDDETVNQMIARHEEEFDLFMRMDLDRRREEARNPKRKPRLMEEDELPSWIIKDDAEVERLTCEEEEEKMFGRGSRHRKEVDYSDSLTEKQWLKKITGKDIHDTASSVARGLQFQRGLQFCTRASKAIEEGTLEEIEEEVRQKKSSRKRKRDSDAGSSTPTTSTRSRDKDDESKKQKKRGRPPAEKLSPNPPNLTKKMKKIVDAVIKYKDSSSGRQLSEVFIQLPSRKELPEYYELIRKPVDFKKIKERIRNHKYRSLNDLEKDVMLLCQNAQTFNLEGSLIYEDSIVLQSVFTSVRQKIEKEDDSEGEESEEEEEGEEEGSESESRSVKVKIKLGRKEKAQDRLKGGRRRPSRGSRAKPVVSDDDSEEEQEEDRSGSGSEED

SEQ ID NO: 15026 - protein, 18 aa, Artificial Sequence
  Synthetic polypeptide
SIRTRTLEPRRRRTGACC

SEQ ID NO: 15027 - protein, 18 aa, Artificial Sequence
  Synthetic polypeptide
SIRTRTLEPRRRRTGACC

SEQ ID NO: 15028 - protein, 18 aa, Artificial Sequence
  Synthetic polypeptide
SIRTRTLEPRRRRTGACC

SEQ ID NO: 15029 - protein, 18 aa, Artificial Sequence
  Synthetic polypeptide
SIRTRTLEPRRRRTGACC

SEQ ID NO: 15030 - protein, 18 aa, Artificial Sequence
  Synthetic polypeptide
SIRTRTLEPRRRRTGACC

SEQ ID NO: 15031 - protein, 18 aa, Artificial Sequence
  Synthetic polypeptide
SIRTRTLEPRRRRTGACC

SEQ ID NO: 15032 - protein, 18 aa, Artificial Sequence
  Synthetic polypeptide
SIRTRTLEPRRRRTGACC

SEQ ID NO: 15033 - protein, 18 aa, Artificial Sequence
  Synthetic polypeptide
SIRTRTLEPRRRRTGACC

SEQ ID NO: 15034 - protein, 18 aa, Artificial Sequence
  Synthetic polypeptide
SIRTRTLEPRRRRTGACC

SEQ ID NO: 15035 - protein, 24 aa, Artificial Sequence
  Synthetic polypeptide
GQGLWNHEGGGPGHAAENLQRARL

SEQ ID NO: 15036 - protein, 24 aa, Artificial Sequence
  Synthetic polypeptide
GQGLWNHEGGGPGHAAENLQRARL

SEQ ID NO: 15037 - protein, 24 aa, Artificial Sequence
  Synthetic polypeptide
GQGLWNHEGGGPGHAAENLQRARL

SEQ ID NO: 15038 - protein, 24 aa, Artificial Sequence
  Synthetic polypeptide
GQGLWNHEGGGPGHAAENLQRARL

SEQ ID NO: 15039 - protein, 24 aa, Artificial Sequence
  Synthetic polypeptide
GQGLWNHEGGGPGHAAENLQRARL

SEQ ID NO: 15040 - protein, 24 aa, Artificial Sequence
  Synthetic polypeptide
GQGLWNHEGGGPGHAAENLQRARL

SEQ ID NO: 15041 - protein, 24 aa, Artificial Sequence
  Synthetic polypeptide
GQGLWNHEGGGPGHAAENLQRARL

SEQ ID NO: 15042 - protein, 24 aa, Artificial Sequence
  Synthetic polypeptide
GQGLWNHEGGGPGHAAENLQRARL

SEQ ID NO: 15043 - protein, 24 aa, Artificial Sequence
  Synthetic polypeptide
GQGLWNHEGGGPGHAAENLQRARL

SEQ ID NO: 15044 - protein, 527 aa, Artificial Sequence
  Synthetic polypeptide
LHKDKDFGTTKAEDRGMLLKTFNEPGSEYFIFLLSTRAGGLGLNLQSADTVIIFDSDWNPHQDLQAQDRAHRIGQQNEVRVLRLCTVNSVEEKILAAAKYKLNVDQKVIQAGMFDQKSSSHERRAFLQAILEHEEQDESRHCSTGSGSASFAHTAPPPAGVNPDLEEPPLKEEDEVPDDETVNQMIARHEEEFDLFMRMDLDRRREEARNPKRKPRLMEEDELPSWIIKDDAEVERLTCEEEEEKMFGRGSRHRKEVDYSDSLTEKQWLKAIEEGTLEEIEEEVRQKKSSRKRKRDSDAGSSTPTTSTRSRDKDDESKKQKKRGRPPAEKLSPNPPNLTKKMKKIVDAVIKYKDSSSGRQLSEVFIQLPSRKELPEYYELIRKPVDFKKIKERIRNHKYRSLNDLEKDVMLLCQNAQTFNLEGSLIYEDSIVLQSVFTSVRQKIEKEDDSEGEESEEEEEGEEEGSESESRSVKVKIKLGRKEKAQDRLKGGRRRPSRGSRAKPVVSDDDSEEEQEEDRSGSGSEED

SEQ ID NO: 15045 - protein, 527 aa, Artificial Sequence; identical to SEQ ID NO: 15044
  Synthetic polypeptide

SEQ ID NO: 15046 - protein, 497 aa, Artificial Sequence
  Synthetic polypeptide
LHKDKDFGTTKAEDRGMLLKTFNEPGSEYFIFLLSTRAGGLGLNLQSADTVIIFDSDWNPHQDLQAQDRAHRIGQQNEVRVLRLCTVNSVEEKILAAAKYKLNVDQKVIQAGMFDQKSSSHERRAFLQAILEHEEQDEEEDEVPDDETVNQMIARHEEEFDLFMRMDLDRRREEARNPKRKPRLMEEDELPSWIIKDDAEVERLTCEEEEEKMFGRGSRHRKEVDYSDSLTEKQWLKTLKAIEEGTLEEIEEEVRQKKSSRKRKRDSDAGSSTPTTSTRSRDKDDESKKQKKRGRPPAEKLSPNPPNLTKKMKKIVDAVIKYKDSSSGRQLSEVFIQLPSRKELPEYYELIRKPVDFKKIKERIRNHKYRSLNDLEKDVMLLCQNAQTFNLEGSLIYEDSIVLQSVFTSVRQKIEKEDDSEGEESEEEEEGEEEGSESESRSVKVKIKLGRKEKAQDRLKGGRRRPSRGSRAKPVVSDDDSEEEQEEDRSGSGSEED

SEQ ID NO: 15047 - protein, 497 aa, Artificial Sequence; identical to SEQ ID NO: 15046
  Synthetic polypeptide

SEQ ID NO: 15048 - protein, 496 aa, Artificial Sequence
  Synthetic polypeptide
LHKDKDFGTTKAEDRGMLLKTFNEPGSEYFIFLLSTRAGGLGLNLQSADTVIIFDSDWNPHQDLQAQDRAHRIGQQNEVRVLRLCTVNSVEEKILAAAKYKLNVDQKVIQAGMFDQKSSSHERRAFLQAILEHEEQDEEEDEVPDDETVNQMIARHEEEFDLFMRMDLDRRREEARNPKRKPRLMEEDELPSWIIKDDAEVERLTCEEEEEKMFGRGSRHRKEVDYSDSLTEKQWLKTLKAIEEGTLEEIEEEVRQKKSSRKRKRDSDAGSSTPTTSTRSRDKDDESKKQKKRGRPPAEKLSPNPPNLTKKMKKIVDAVIKYKDSSGRQLSEVFIQLPSRKELPEYYELIRKPVDFKKIKERIRNHKYRSLNDLEKDVMLLCQNAQTFNLEGSLIYEDSIVLQSVFTSVRQKIEKEDDSEGEESEEEEEGEEEGSESESRSVKVKIKLGRKEKAQDRLKGGRRRPSRGSRAKPVVSDDDSEEEQEEDRSGSGSEED

SEQ ID NO: 15049 - protein, 496 aa, Artificial Sequence; identical to SEQ ID NO: 15048
  Synthetic polypeptide

SEQ ID NO: 15050 - protein, 493 aa, Artificial Sequence
  Synthetic polypeptide
LHKDKDFGTTKAEDRGMLLKTFNEPGSEYFIFLLSTRAGGLGLNLQSADTVIIFDSDWNPHQDLQAQDRAHRIGQQNEVRVLRLCTVNSVEEKILAAAKYKLNVDQKVIQAGMFDQKSSSHERRAFLQAILEHEEQDEEEDEVPDDETVNQMIARHEEEFDLFMRMDLDRRREEARNPKRKPRLMEEDELPSWIIKDDAEVERLTCEEEEEKMFGRGSRHRKEVDYSDSLTEKQWLKAIEEGTLEEIEEEVRQKKSSRKRKRDSDAGSSTPTTSTRSRDKDDESKKQKKRGRPPAEKLSPNPPNLTKKMKKIVDAVIKYKDSSGRQLSEVFIQLPSRKELPEYYELIRKPVDFKKIKERIRNHKYRSLNDLEKDVMLLCQNAQTFNLEGSLIYEDSIVLQSVFTSVRQKIEKEDDSEGEESEEEEEGEEEGSESESRSVKVKIKLGRKEKAQDRLKGGRRRPSRGSRAKPVVSDDDSEEEQEEDRSGSGSEED

SEQ ID NO: 15051 - protein, 494 aa, Artificial Sequence
  Synthetic polypeptide
LHKDKDFGTTKAEDRGMLLKTFNEPGSEYFIFLLSTRAGGLGLNLQSADTVIIFDSDWNPHQDLQAQDRAHRIGQQNEVRVLRLCTVNSVEEKILAAAKYKLNVDQKVIQAGMFDQKSSSHERRAFLQAILEHEEQDEEEDEVPDDETVNQMIARHEEEFDLFMRMDLDRRREEARNPKRKPRLMEEDELPSWIIKDDAEVERLTCEEEEEKMFGRGSRHRKEVDYSDSLTEKQWLKAIEEGTLEEIEEEVRQKKSSRKRKRDSDAGSSTPTTSTRSRDKDDESKKQKKRGRPPAEKLSPNPPNLTKKMKKIVDAVIKYKDSSSGRQLSEVFIQLPSRKELPEYYELIRKPVDFKKIKERIRNHKYRSLNDLEKDVMLLCQNAQTFNLEGSLIYEDSIVLQSVFTSVRQKIEKEDDSEGEESEEEEEGEEEGSESESRSVKVKIKLGRKEKAQDRLKGGRRRPSRGSRAKPVVSDDDSEEEQEEDRSGSGSEED

SEQ ID NO: 15052 - protein, 95 aa, Artificial Sequence
  Synthetic polypeptide
DATVLQPGDRGDLGDAGPKPPGWRARQRASSASVTTAARSRTLAWTATSTPPPSPWWMTTLSSLMQSGSPVTTGDPCASCRETRMAPGSWSGWSG

SEQ ID NO: 15053 - protein, 95 aa, Artificial Sequence; identical to SEQ ID NO: 15052
  Synthetic polypeptide

SEQ ID NO: 15054 - protein, 95 aa, Artificial Sequence; identical to SEQ ID NO: 15052
  Synthetic polypeptide

SEQ ID NO: 15055 - protein, 55 aa, Artificial Sequence
  Synthetic polypeptide
SHLLRRLRQENRLNPGGRECSEMPPFSSLATEATSGTRGQSPPAGVRDSGRHPHQ

SEQ ID NO: 15056 - protein, 55 aa, Artificial Sequence; identical to SEQ ID NO: 15055
  Synthetic polypeptide

SEQ ID NO: 15057 - protein, 55 aa, Artificial Sequence; identical to SEQ ID NO: 15055
  Synthetic polypeptide

SEQ ID NO: 15058 - protein, 756 aa, Artificial Sequence
  Synthetic polypeptide
IQEAESAVRCHRSPAWRQRRPRGRGAKAPRLACETAGVIRISDDSSTESDPGLDSDFNSSPESLVDDDVVIVDAVGLPSDDRGPLCLLQRDPHGPGVLERVERLKQDLLDKVRRLGRELPVNTLDELIDQLGGPQRVAEMTGRKGRVVSRPDGTVAFESRAEQGLSIDHVNLREKQRFMSGEKLVAIISEASSSGVSLQADRRVQNQRRRVHMTLELPWSADRAIQQFGRTHRSNQVSAPEYVFLISELAGERRFASIVAKRLESLGALTHGDRRATESRDLSKYNFENKYGTRALHCVLTTILSQTENKVPVPQGYPGGVPTFFRDMKQGLLSVGIGGRESRNGCLDVEKDCSITKFLNRILGLEVHKQNALFQYFSDTFDHLIEMDKREGKYDMGILDLAPGIEEIYEESQQVFLAPGHPQDGQVVFYKISVDRGLKWEDAFAKSLALTGPYDGFYLSYKVRGNKPSCLLAEQNRGQFFTVYKPNIGRQSQLEALDSLRRKFHRVTAEEAKEPWESGYALSLTHCSHSAWNRHCRLAQEGKDCLQGLRLRHHYMLCGALLRVWGRIAAVMADVSSSSYLQIVRLKTKDRKKQVGIKIPEGCVRRVLQELRLMDADVKRRQAPALGCPAPPAPRPLALPCGPGEVLDLTYSPPAEAFPPPPHFSFPAPLSLDAGPGVVPLGTPDAQADPAALAHQGCDINFKEVLEDMLRSLHAGPPSEGALGEGAGAGGAAGGGPERQSVIQFSPPFPGAQAPL

SEQ ID NO: 15059 - protein, 756 aa, Artificial Sequence; identical to SEQ ID NO: 15058
  Synthetic polypeptide

SEQ ID NO: 15060 - protein, 756 aa, Artificial Sequence; identical to SEQ ID NO: 15058
  Synthetic polypeptide

SEQ ID NO: 15061 - protein, 34 aa, Artificial Sequence
  Synthetic polypeptide
GCSKVGAAGHCDPACLPPGVHGHLPCAHPGILLL

SEQ ID NO: 15062 - protein, 34 aa, Artificial Sequence; identical to SEQ ID NO: 15061
  Synthetic polypeptide

SEQ ID NO: 15063 - protein, 327 aa, Artificial Sequence
  Synthetic polypeptide
PRAVLKSVLLGIVILLAYRLEFTDTFPVHTQGFFCYDSTYAKPYPGPEAASRVPPALVYALVTAGPTLTILLGELARAFFPAPPSAVPVIGESTIVSGACCRFSPPVRRLVRFLGVYSFGLFTTTIFANAGQVVTGNPTPHFLSVCRPNYTALGCLPPSPDRPGPDRFVTDQGACAGSPSLVAAARRAFPCKDAALCAYAVTYTAMYVTLVFRVKGSRLVKPSLCLALLCPAFLVGVVRVAEYRNHWSDVLAGFLTGAAIATFLVTCVVHNFQSRPPSGRRLSPWEDLGQAPTMDSPLEKNPRSAGRIRHRHGSPHPSRRTAPAVAT

SEQ ID NO: 15064 - protein, 68 aa, Artificial Sequence
  Synthetic polypeptide
PRAVLKSVLLGIVILLAYRLEFTDTFPVHTQGFFCYDSTYAKPYPGPEAASRVPPALVYALVTAGPTL

SEQ ID NO: 15065 - protein, 59 aa, Artificial Sequence
  Synthetic polypeptide
GGARWLTPVIPALWEAEASGSSGSQPHCQYLPPLSNQQGEGAEGSAPGAAGGRVGVWRP

SEQ ID NO: 15066 - protein, 59 aa, Artificial Sequence; identical to SEQ ID NO: 15065
  Synthetic polypeptide

SEQ ID NO: 15067 - protein, 59 aa, Artificial Sequence; identical to SEQ ID NO: 15065
  Synthetic polypeptide

SEQ ID NO: 15068 - protein, 59 aa, Artificial Sequence; identical to SEQ ID NO: 15065
  Synthetic polypeptide

SEQ ID NO: 15069 - protein, 59 aa, Artificial Sequence; identical to SEQ ID NO: 15065
  Synthetic polypeptide

SEQ ID NO: 15070 - protein, 59 aa, Artificial Sequence; identical to SEQ ID NO: 15065
  Synthetic polypeptide

SEQ ID NO: 15071 - protein, 215 aa, Artificial Sequence
  Synthetic polypeptide
SQHFGRPRQVDHQAPSPIANTFLHYRTSKVRVLRAARLERLVGELVFGDREQDPSFMPAFLATYRTFVPTACLLGFLLPPMPPPPPPGVEIKKTAVQDLSFNKNLRAVVSVLGSWLQDHPQDFRDPPAHSDLGSVRTFLGWAAPGSAEAQKAEKLLEDFLEEAEREQEEEPPQDLPELPKLLTQTLQRPARRKRKGSCLKVPSSWTSAWTRWPSS

SEQ ID NO: 15072 - protein, 38 aa, Artificial Sequence
  Synthetic polypeptide
RGEVAHACNPSTLGGRGKWIIRLPAPLPIPSSTIEPAR

SEQ ID NO: 15073 - protein, 38 aa, Artificial Sequence; identical to SEQ ID NO: 15072
  Synthetic polypeptide

SEQ ID NO: 15074 - protein, 38 aa, Artificial Sequence; identical to SEQ ID NO: 15072
  Synthetic polypeptide

SEQ ID NO: 15075 - protein, 38 aa, Artificial Sequence; identical to SEQ ID NO: 15072
  Synthetic polypeptide

SEQ ID NO: 15076 - protein, 38 aa, Artificial Sequence; identical to SEQ ID NO: 15072
  Synthetic polypeptide

SEQ ID NO: 15077 - protein, 38 aa, Artificial Sequence; identical to SEQ ID NO: 15072
  Synthetic polypeptide

SEQ ID NO: 15078 - protein, 145 aa, Artificial Sequence
  Synthetic polypeptide
SQHFGRPRQVDHQAPSPIANTFLHYRTSKVRVLRAARLERLVGELVFGDREQDPSFMPAFLATYRTFVPTACLLGFLLPPMPPPPPPGDQEDSGTRSELQQEPEGCGVSAGLLAAGPPSGFPRPPCPFGPGQCPNLSGLGGPREC

SEQ ID NO: 15079 - protein, 674 aa, Artificial Sequence
  Synthetic polypeptide
SQHFGRPRQVDHQAPSPIANTFLHYRTSKVRVLRAARLERLVGELVFGDREQDPSFMPAFLATYRTFVPTACLLGFLLPPMPPPPPPGVEIKKTAVQDLSFNKNLRAVVSVLGSWLQDHPQDFRDPPAHSDLGSVRTFLGWAAPGSAEAQKAEKLLEDFLEEAEREQEEEPPQVWTGPPRVAQTSDPDSSEACAEEEEGLMPQGPQLLDFSVDEVAEQLTLIDLELFSKVRLYECLGSVWSQRDRPGAAGASPTVRATVAQFNTVTGCVLGSVLGAPGLAAPQRAQRLEKWIRIAQRCRELRNFSSLRAILSALQSNPIYRLKRSWGAVSREPLSTFRKLSQIFSDENNHLSSREILFQEEATEGSQEEDNTPGSLPSKPPPGPVPYLGTFLTDLVMLDTALPDMLEGDLINFEKRRKEWEILARIQQLQRRCQSYTLSPHPPILAALHAQNQLTEEQSYRLSRVIEPPAASCPSSPRIRRRISLTKRLSAKLAREKSSSPSGSPGDPSSPTSSVSPGSPPSSPRSRDAPAGSPPASPGPQGPSTKLPLSLDLPSPRPFALPLGSPRIPLPAQQSSEARVIRVSIDNDHGNLYRSILLTSQDKAPSVVRRALQKHNVPQPWACDYQLFQVLPGDRVLLIPDNANVFYAMSPVAPRDFMLRRKEGTRNTLSVSPS

SEQ ID NO: 15080 - protein, 680 aa, Artificial Sequence
  Synthetic polypeptide
SQHFGRPRQVDHQAPSPIANTFLHYRTSKVRVLRAARLERLVGELVFGDREQDPSFMPAFLATYRTFVPTACLLGFLLPPMPPPPPPGVEIKKTAVQDLSFNKNLRAVVSVLGSWLQDHPQDFRDPPAHSDLGSVRTFLGWAAPGSAEAQKAEKLLEDFLEEAEREQEEEPPQVWTGPPRVAQTSDPDSSEACAEEEEGLMPQGPQLLDFSVDEVAEQLTLIDLELFSKVRLYECLGSVWSQRDRPGAAGASPTVRATVAQFNTVTGCVLGSVLGAPGLAAPQRAQRLEKWIRIAQRCRELRNFSSLRAILSALQSNPIYRLKRSWGAVSREPLSTFRKLSQIFSDENNHLSSREILFQEEATEGSQEEDNTPGSLPSKPPPGPVPYLGTFLTDLVMLDTALPDMLEGDLINFEKRRKEWEILARIQQLQRRCQSYTLSPHPPILAALHAQNQLTEEQSYRLSRVIEPPAASCPSSPRIRRRISLTKRLSAKLAREKSSSPSGSPGDPSSPTSSLCISPSVSPGSPPSSPRSRDAPAGSPPASPGPQGPSTKLPLSLDLPSPRPFALPLGSPRIPLPAQQSSEARVIRVSIDNDHGNLYRSILLTSQDKAPSVVRRALQKHNVPQPWACDYQLFQVLPGDRVLLIPDNANVFYAMSPVAPRDFMLRRKEGTRNTLSVSPS

SEQ ID NO: 15081 - protein, 176 aa, Artificial Sequence
  Synthetic polypeptide
SQHFGRPRQVDHQAPSPIANTFLHYRTSKVRVLRAARLERLVGELVFGDREQDPSFMPAFLATYRTFVPTACLLGFLLPPMPPPPPPGVEIKKTAVQDLSFNKNLRAVVSVLGSWLQDHPQDFRDPPAHSDLGSVRTFLGWAAPGSAEAQKAEKLLEDFLEEAEREQEEEPPQVWT

SEQ ID NO: 15082 - protein, 131 aa, Artificial Sequence
  Synthetic polypeptide
SQHFGRPRQVDHQAPSPIANTFLHYRTSKVRVLRAARLERLVGELVFGDREQDPSFMPAFLATYRTFVPTACLLGFLLPPMPPPPPPGVEIKKTAVQDLSFNKNLRTTLRISETPLPIRTWAVSEPFWAGR

SEQ ID NO: 15083 - protein, 41 aa, Artificial Sequence
  Synthetic polypeptide
RVAGLSQGSEGRWPGLGPRLHLSLARAAGCCQGPTGAGAGG

SEQ ID NO: 15084 - protein, 41 aa, Artificial Sequence; identical to SEQ ID NO: 15083
  Synthetic polypeptide

SEQ ID NO: 15085 - protein, 41 aa, Artificial Sequence; identical to SEQ ID NO: 15083
  Synthetic polypeptide

SEQ ID NO: 15086 - protein, 41 aa, Artificial Sequence; identical to SEQ ID NO: 15083
  Synthetic polypeptide

SEQ ID NO: 15087 - protein, 41 aa, Artificial Sequence; identical to SEQ ID NO: 15083
  Synthetic polypeptide

SEQ ID NO: 15088 - protein, 41 aa, Artificial Sequence; identical to SEQ ID NO: 15083
  Synthetic polypeptide

SEQ ID NO: 15089 - protein, 346 aa, Artificial Sequence
  Synthetic polypeptide
ARAPRVDGLDWAPGYTSHWLEQLAAAKAQQEQELAADAFKELDDDMDGTVSVTELQTHPELDTDGDGALSEAEAQALLSGDTQTDATSFYDRVWAAIRDKYRSEALPTDLPAPSAPDLTEPKEEQPPVPSSPTEEEEEEEEEEEEEAEEEEEEEDSEVQGEQPKPASPAEEDKMPPYDEQTQAFIDAAQEARNKFEEAERSLKDMEESIRNLEQEISFDFGPNGEFAYLYSQCYELTTNEYVYRLCPFKLVSQKPKLGGSPTSLGTWGSWIGPDHDKFSAMKYEQGTGCWQGPNRSTTVRLLCGKETMVTSTTEPSRCEYLMELMTPAACPEPPPEAPTEDDHDEL

SEQ ID NO: 15090 - protein, 346 aa, Artificial Sequence; identical to SEQ ID NO: 15089
  Synthetic polypeptide

SEQ ID NO: 15091 - protein, 346 aa, Artificial Sequence; identical to SEQ ID NO: 15089
  Synthetic polypeptide

SEQ ID NO: 15092 - protein, 349 aa, Artificial Sequence
  Synthetic polypeptide
ARAPRVDGLDWAPGYTSHWLEQLAAAKAQQEQELAADAFKELDDDMDGTVSVTELQTHPELDTDGDGALSEAEAQALLSGDTQTDATSFYDRVWAAIRDKYRSEALPTDLPAPSAPDLTEPKEEQPPVPSSPTEEEEEEEEEEEEEAEEEEEEEDSEEAPPPLSPPQPASPAEEDKMPPYDEQTQAFIDAAQEARNKFEEAERSLKDMEESIRNLEQEISFDFGPNGEFAYLYSQCYELTTNEYVYRLCPFKLVSQKPKLGGSPTSLGTWGSWIGPDHDKFSAMKYEQGTGCWQGPNRSTTVRLLCGKETMVTSTTEPSRCEYLMELMTPAACPEPPPEAPTEDDHDEL

SEQ ID NO: 15093 - protein, 349 aa, Artificial Sequence; identical to SEQ ID NO: 15092
  Synthetic polypeptide

SEQ ID NO: 15094 - protein, 356 aa, Artificial Sequence
  Synthetic polypeptide
ARAPRVDGLDWAPGYTSHWLEQLAAAKAQQEQELAADAFKELDDDMDGTVSVTELQTHPELDTDGDGALSEAEAQALLSGDTQTDATSFYDRVWAAIRDKYRSEALPTDLPAPSAPDLTEPKEEQPPVPSSPTEEEEEEEEEEEEEAEEEEEEEDSEVQGEQPKEAPPPLSPPQPASPAEEDKMPPYDEQTQAFIDAAQEARNKFEEAERSLKDMEESIRNLEQEISFDFGPNGEFAYLYSQCYELTTNEYVYRLCPFKLVSQKPKLGGSPTSLGTWGSWIGPDHDKFSAMKYEQGTGCWQGPNRSTTVRLLCGKETMVTSTTEPSRCEYLMELMTPAACPEPPPEAPTEDDHDEL

SEQ ID NO: 15095 - protein, 64 aa, Artificial Sequence
  Synthetic polypeptide
HEVPPSGTTSSGSGQPVRARSRRRGMPPRRTSSSTLPGRATPWPSRTPAPFWPARPLLSAGIFQ

SEQ ID NO: 15096 - protein, 64 aa, Artificial Sequence; identical to SEQ ID NO: 15095
  Synthetic polypeptide

SEQ ID NO: 15097 - protein, 37 aa, Artificial Sequence
  Synthetic polypeptide
HQLLCDLGRGPLPVWALTSSNTKFPQAAPLPAAAGSQ

SEQ ID NO: 15098 - protein, 37 aa, Artificial Sequence; identical to SEQ ID NO: 15097
  Synthetic polypeptide

SEQ ID NO: 15099 - protein, 37 aa, Artificial Sequence; identical to SEQ ID NO: 15097
  Synthetic polypeptide

SEQ ID NO: 15100 - protein, 132 aa, Artificial Sequence
  Synthetic polypeptide
LPLTRSSPKRHHFQRQRAASESTEQEEGDAPQEDFIQYIARAGDAVAFPHPRPFLASPPPALGRYFSVDGGARGGPVGPCPPSPPPRRPRERSPGPVDTRSPASSGKAPPRGGLTGATSPAWTRGGKQGETG

SEQ ID NO: 15101 - protein, 132 aa, Artificial Sequence; identical to SEQ ID NO: 15100
  Synthetic polypeptide

SEQ ID NO: 15102 - protein, 61 aa, Artificial Sequence
  Synthetic polypeptide
HEVPPSGTTSSGSGQPVRARSRRRGMPPRRTSSSTLPGRATPWPSRTPAPFWPARPLLSAG

SEQ ID NO: 15103 - protein, 384 aa, Artificial Sequence
  Synthetic polypeptide
LPLTRSSPKRHHFQRQRAASESTEQEEGDAPQEDFIQYIARAGDAVAFPHPRPFLASPPPALGRLEAAEAAGGASPDSPPERGAGSAGPEQQQPPLEPDAERDAGPEQAQTSYRDLWSLRASLELHAAASDHSSSGNDRDSVRSGDSSGSGSGGAAPAFPPPSPPAPRPKDGEARRLLQMDSGYASIEGRGAGDDTEPPAAPARPRSPRAWPRRPRRDYSIDEKTDALFHEFLRHDPHFDDTPAAARHRARAHPHARKQWQRGRQHSDPGARAAPALAGTPAPPAGAARPARAPLRRGDSVDGPPDGRTLGGAGDDPAIPVIEEEPGGGGCPGSGLCVLPSGSVLDKLAAGLDERLFPPRLAEPVVATPALVAAAPTSPDHSPA

SEQ ID NO: 15104 - protein, 42 aa, Artificial Sequence
  Synthetic polypeptide
RQEFKTSLVNMGAAHRRVHGQDATDDCELAAAAAGELGEGPG

SEQ ID NO: 15105 - protein, 137 aa, Artificial Sequence
  Synthetic polypeptide
AQWLTPVIPALWEAETGGSPDVRNSRPAWSTWEQHIAECMAKMPQMIVNWQQQQRENWEKAQADKERRARLQAEAQELLGYQVDPRSARFQELLQDLEKKERKRLKEEKQKRKKEARAAALAAAVAQDPAASGAPSS

SEQ ID NO: 15106 - protein, 38 aa, Artificial Sequence
  Synthetic polypeptide
SQHFGRPRREDHLTSGIQDQPGQHGSSTSQSAWPRCHR

SEQ ID NO: 15107 - protein, 437 aa, Artificial Sequence
  Synthetic polypeptide
RGGERDEFHPFIEALLPHVRAFSYTWFNLQARKRKYFKKHEKRMSKDEERAVKDELLGEKPEIKQKWASRLLAKLRKDIRPEFREDFVLTITGKKPPCCVLSNPDQKGKIRRIDCLRQADKVWRLDLVMVILFKGIPLESTDGERLYKSPQCSNPGLCVQPHHIGVTIKELDLYLAYFVHTPESGQSDSSNQQGDADIKPLPNGHLSFQDCFVTSGVWNVTELVRVSQTPVATASGPNFSLADLESPSYYNINQVTLGRRSITSPPSTSTTKRPKSIDDSEMESPVDDVFYPGTGRSPAAGSSQSSGWPNDVDAGPASLKKSGKLDFCSALSSQGSSPRMAFTHHPLPVLAGVRPGSPRATASALHFPSTSIIQQSSPYFTHPTIRYHHHHGQDSLKEFVQFVCSDGSGQATGQHSQRQAPPLPTGLSASDPGTATF

SEQ ID NO: 15108 - protein, 437 aa, Artificial Sequence; identical to SEQ ID NO: 15107
  Synthetic polypeptide

SEQ ID NO: 15109 - protein, 437 aa, Artificial Sequence; identical to SEQ ID NO: 15107
  Synthetic polypeptide

SEQ ID NO: 15110 - protein, 51 aa, Artificial Sequence
  Synthetic polypeptide
EGERGMSSTRSSRHCCLTSALSPTPGSTCRRGSASTSRSMKSGCRRTRSGR

SEQ ID NO: 15111 - protein, 51 aa, Artificial Sequence; identical to SEQ ID NO: 15110
  Synthetic polypeptide

SEQ ID NO: 15112 - protein, 51 aa, Artificial Sequence; identical to SEQ ID NO: 15110
  Synthetic polypeptide

SEQ ID NO: 15113 - protein, 51 aa, Artificial Sequence; identical to SEQ ID NO: 15110
  Synthetic polypeptide

SEQ ID NO: 15114 - protein, 51 aa, Artificial Sequence; identical to SEQ ID NO: 15110
  Synthetic polypeptide

SEQ ID NO: 15115 - protein, 51 aa, Artificial Sequence; identical to SEQ ID NO: 15110
  Synthetic polypeptide

SEQ ID NO: 15116 - protein, 51 aa, Artificial Sequence; identical to SEQ ID NO: 15110
  Synthetic polypeptide

SEQ ID NO: 15117 - protein, 51 aa, Artificial Sequence; identical to SEQ ID NO: 15110
  Synthetic polypeptide

SEQ ID NO: 15118 - protein, 51 aa, Artificial Sequence; identical to SEQ ID NO: 15110
  Synthetic polypeptide

SEQ ID NO: 15119 - protein, 5 aa, Artificial Sequence
  Synthetic polypeptide
RGREG

SEQ ID NO: 15120 - protein, 5 aa, Artificial Sequence
  Synthetic polypeptide
RGREG

SEQ ID NO: 15121 - protein, 5 aa, Artificial Sequence
  Synthetic polypeptide
RGREG

SEQ ID NO: 15122 - protein, 5 aa, Artificial Sequence
  Synthetic polypeptide
RGREG

SEQ ID NO: 15123 - protein, 5 aa, Artificial Sequence
  Synthetic polypeptide
RGREG

SEQ ID NO: 15124 - protein, 5 aa, Artificial Sequence
  Synthetic polypeptide
RGREG

SEQ ID NO: 15125 - protein, 5 aa, Artificial Sequence
  Synthetic polypeptide
RGREG

SEQ ID NO: 15126 - protein, 5 aa, Artificial Sequence
  Synthetic polypeptide
RGREG

SEQ ID NO: 15127 - protein, 5 aa, Artificial Sequence
  Synthetic polypeptide
RGREG

SEQ ID NO: 15128 - protein, 498 aa, Artificial Sequence
  Synthetic polypeptide
RGGERDEFHPFIEALLPHVRAFSYTWFNLQARKRKYFKKHEKRMSKDEERAVKDELLGEKPEIKQKWASRLLAKLRKDIRPEFREDFVLTITGKKPPCCVLSNPDQKGKIRRIDCLRQADKVWRLDLVMVILFKGIPLESTDGERLYKSPQCSNPGLCVQPHHIGVTIKELDLYLAYFVHTPESGQSDSSNQQGDADIKPLPNGHLSFQDCFVTSGVWNVTELVRVSQTPVATASGPNFSLADLESPSYYNINQVTLGRRSITSPPSTSTTKRPKSIDDSEMESPVDDVFYPGTGRSPAAGSSQSSGWPNDVDAGPASLKKSGKLDFCSALSSQGSSPRMAFTHHPLPVLAGVRPGSPRATASALHFPSTSIIQQSSPYFTHPTIRYHHHHGQDSLKEFVQFVCSDGSGQATGQPNGSGQGKVPGSFLLPPPPPVARPVPLPMPDSKSTSTAPDGAALTPPSPSFATTGASSANRFVSIGPRDGNFLNIPQQSQSWFL

SEQ ID NO: 15129 - protein, 498 aa, Artificial Sequence; identical to SEQ ID NO: 15128
  Synthetic polypeptide

SEQ ID NO: 15130 - protein, 396 aa, Artificial Sequence
  Synthetic polypeptide
RGGERDEFHPFIEALLPHVRAFSYTWFNLQARKRKYFKKHEKRMSKDEERAVKDELLGEKPEIKQKWASRLLAKLRKDIRPEFREDFVLTITGKKPPCCVLSNPDQKGKIRRIDCLRQADKVWRLDLVMVILFKGIPLESTDGERLYKSPQCSNPGLCVQPHHIGVTIKELDLYLAYFVHTPESGQSDSSNQQGDADIKPLPNGHLSFQDCFVTSGVWNVTELVRVSQTPVATASGPNFSLADLESPSYYNINQVTLGRRSITSPPSTSTTKRPKSIDDSEMESPVDDVFYPGTGRSPAAGSSQSSGWPNDVDAGSPRATASALHFPSTSIIQQSSPYFTHPTIRYHHHHGQDSLKEFVQFVCSDGSGQATGQHSQRQAPPLPTGLSASDPGTATF

SEQ ID NO: 15131 - protein, 52 aa, Artificial Sequence
  Synthetic polypeptide
RGGERDEFHPFIEALLPHVRAFSYTWFNLQARKRKYFKKHEKRMSKDEERAV

SEQ ID NO: 15132 - protein, 163 aa, Artificial Sequence
  Synthetic polypeptide
RGGERDEFHPFIEALLPHVRAFSYTWFNLQARKRKYFKKHEKRMSKDEERAVKDELLGEKPEIKQKWASRLLAKLRKDIRPEFREDFVLTITGKKPPCCVLSNPDQKGKIRRIDCLRQADKVWRLDLVMVILFKGIPLESTDGERLYKSPQCSNPGLCVQPHH

SEQ ID NO: 15133 - protein, 457 aa, Artificial Sequence
  Synthetic polypeptide
RGGERDEFHPFIEALLPHVRAFSYTWFNLQARKRKYFKKHEKRMSKDEERAVKDELLGEKPEIKQKWASRLLAKLRKDIRPEFREDFVLTITGKKPPCCVLSNPDQKGKIRRIDCLRQADKVWRLDLVMVILFKGIPLESTDGERLYKSPQCSNPGLCVQPHHIGVTIKELDLYLAYFVHTPESGQSDSSNQQGDADIKPLPNGHLSFQDCFVTSGVWNVTELVRVSQTPVATASGPNFSLADLESPSYYNINQVTLGRRSITSPPSTSTTKRPKSIDDSEMESPVDDVFYPGTGRSPAAGSSQSSGWPNDVDAGSPRATASALHFPSTSIIQQSSPYFTHPTIRYHHHHGQDSLKEFVQFVCSDGSGQATGQPNGSGQGKVPGSFLLPPPPPVARPVPLPMPDSKSTSTAPDGAALTPPSPSFATTGASSANRFVSIGPRDGNFLNIPQQSQSWFL

SEQ ID NO: 15134 - protein, 27 aa, Artificial Sequence
  Synthetic polypeptide
EMAPGEERGDKDSILAPEETMRIRTIR

SEQ ID NO: 15135 - protein, 27 aa, Artificial Sequence
  Synthetic polypeptide
EMAPGEERGDKDSILAPEETMRIRTIR

SEQ ID NO: 15136 - protein, 27 aa, Artificial Sequence
  Synthetic polypeptide
EMAPGEERGDKDSILAPEETMRIRTIR

SEQ ID NO: 15137 - protein, 27 aa, Artificial Sequence
  Synthetic polypeptide
EMAPGEERGDKDSILAPEETMRIRTIR

SEQ ID NO: 15138 - protein, 27 aa, Artificial Sequence
  Synthetic polypeptide
EMAPGEERGDKDSILAPEETMRIRTIR

SEQ ID NO: 15139 - protein, 27 aa, Artificial Sequence
  Synthetic polypeptide
EMAPGEERGDKDSILAPEETMRIRTIR

SEQ ID NO: 15140 - protein, 27 aa, Artificial Sequence
  Synthetic polypeptide
EMAPGEERGDKDSILAPEETMRIRTIR

SEQ ID NO: 15141 - protein, 27 aa, Artificial Sequence
  Synthetic polypeptide
EMAPGEERGDKDSILAPEETMRIRTIR

SEQ ID NO: 15142 - protein, 27 aa, Artificial Sequence
  Synthetic polypeptide
EMAPGEERGDKDSILAPEETMRIRTIR

SEQ ID NO: 15143 - protein, 32 aa, Artificial Sequence
  Synthetic polypeptide
YSGPRRNYENPDNQIVQTSKEMRTSNHCPTGT

SEQ ID NO: 15144 - protein, 32 aa, Artificial Sequence; identical to SEQ ID NO: 15143
  Synthetic polypeptide

SEQ ID NO: 15145 - protein, 32 aa, Artificial Sequence; identical to SEQ ID NO: 15143
  Synthetic polypeptide

SEQ ID NO: 15146 - protein, 32 aa, Artificial Sequence; identical to SEQ ID NO: 15143
  Synthetic polypeptide

SEQ ID NO: 15147 - protein, 32 aa, Artificial Sequence; identical to SEQ ID NO: 15143
  Synthetic polypeptide

SEQ ID NO: 15148 - protein, 32 aa, Artificial Sequence; identical to SEQ ID NO: 15143
  Synthetic polypeptide

SEQ ID NO: 15149 - protein, 32 aa, Artificial Sequence; identical to SEQ ID NO: 15143
  Synthetic polypeptide

SEQ ID NO: 15150 - protein, 32 aa, Artificial Sequence; identical to SEQ ID NO: 15143
  Synthetic polypeptide

SEQ ID NO: 15151 - protein, 32 aa, Artificial Sequence; identical to SEQ ID NO: 15143
  Synthetic polypeptide

SEQ ID NO: 15152 - protein, 261 aa, Artificial Sequence
  Synthetic polypeptide
RCFLPEESGQSDSSNQQGDADIKPLPNGHLSFQDCFVTSGVWNVTELVRVSQTPVATASGPNFSLADLESPSYYNINQVTLGRRSITSPPSTSTTKRPKSIDDSEMESPVDDVFYPGTGRSPAAGSSQSSGWPNDVDAGPASLKKSGKLDFCSALSSQGSSPRMAFTHHPLPVLAGVRPGSPRATASALHFPSTSIIQQSSPYFTHPTIRYHHHHGQDSLKEFVQFVCSDGSGQATGQHSQRQAPPLPTGLSASDPGTATF

SEQ ID NO: 15153 - protein, 261 aa, Artificial Sequence; identical to SEQ ID NO: 15152
  Synthetic polypeptide

SEQ ID NO: 15154 - protein, 261 aa, Artificial Sequence; identical to SEQ ID NO: 15152
  Synthetic polypeptide

SEQ ID NO: 15155 - protein, 29 aa, Artificial Sequence
  Synthetic polypeptide
GASYLRNPDNQIVQTSKEMRTSNHCPTGT

SEQ ID NO: 15156 - protein, 29 aa, Artificial Sequence
  Synthetic polypeptide
GASYLRNPDNQIVQTSKEMRTSNHCPTGT

SEQ ID NO: 15157 - protein, 29 aa, Artificial Sequence
  Synthetic polypeptide
GASYLRNPDNQIVQTSKEMRTSNHCPTGT

SEQ ID NO: 15158 - protein, 29 aa, Artificial Sequence
  Synthetic polypeptide
GASYLRNPDNQIVQTSKEMRTSNHCPTGT

SEQ ID NO: 15159 - protein, 29 aa, Artificial Sequence
  Synthetic polypeptide
GASYLRNPDNQIVQTSKEMRTSNHCPTGT

SEQ ID NO: 15160 - protein, 29 aa, Artificial Sequence
  Synthetic polypeptide
GASYLRNPDNQIVQTSKEMRTSNHCPTGT

SEQ ID NO: 15161 - protein, 29 aa, Artificial Sequence
  Synthetic polypeptide
GASYLRNPDNQIVQTSKEMRTSNHCPTGT

SEQ ID NO: 15162 - protein, 29 aa, Artificial Sequence
  Synthetic polypeptide
GASYLRNPDNQIVQTSKEMRTSNHCPTGT

SEQ ID NO: 15163 - protein, 29 aa, Artificial Sequence
  Synthetic polypeptide
GASYLRNPDNQIVQTSKEMRTSNHCPTGT

SEQ ID NO: 15164 - protein, 322 aa, Artificial Sequence
  Synthetic polypeptide
RCFLPEESGQSDSSNQQGDADIKPLPNGHLSFQDCFVTSGVWNVTELVRVSQTPVATASGPNFSLADLESPSYYNINQVTLGRRSITSPPSTSTTKRPKSIDDSEMESPVDDVFYPGTGRSPAAGSSQSSGWPNDVDAGPASLKKSGKLDFCSALSSQGSSPRMAFTHHPLPVLAGVRPGSPRATASALHFPSTSIIQQSSPYFTHPTIRYHHHHGQDSLKEFVQFVCSDGSGQATGQPNGSGQGKVPGSFLLPPPPPVARPVPLPMPDSKSTSTAPDGAALTPPSPSFATTGASSANRFVSIGPRDGNFLNIPQQSQSWFL

SEQ ID NO: 15165 - protein, 322 aa, Artificial Sequence; identical to SEQ ID NO: 15164
  Synthetic polypeptide

SEQ ID NO: 15166 - protein, 322 aa, Artificial Sequence; identical to SEQ ID NO: 15164
  Synthetic polypeptide

SEQ ID NO: 15167 - protein, 30 aa, Artificial Sequence
  Synthetic polypeptide
RCFLPEESGQSDSSNQQGDADIKPLPNGHL

SEQ ID NO: 15168 - protein, 220 aa, Artificial Sequence
  Synthetic polypeptide
RCFLPEESGQSDSSNQQGDADIKPLPNGHLSFQDCFVTSGVWNVTELVRVSQTPVATASGPNFSLADLESPSYYNINQVTLGRRSITSPPSTSTTKRPKSIDDSEMESPVDDVFYPGTGRSPAAGSSQSSGWPNDVDAGSPRATASALHFPSTSIIQQSSPYFTHPTIRYHHHHGQDSLKEFVQFVCSDGSGQATGQHSQRQAPPLPTGLSASDPGTATF

SEQ ID NO: 15169 - protein, 281 aa, Artificial Sequence
  Synthetic polypeptide
RCFLPEESGQSDSSNQQGDADIKPLPNGHLSFQDCFVTSGVWNVTELVRVSQTPVATASGPNFSLADLESPSYYNINQVTLGRRSITSPPSTSTTKRPKSIDDSEMESPVDDVFYPGTGRSPAAGSSQSSGWPNDVDAGSPRATASALHFPSTSIIQQSSPYFTHPTIRYHHHHGQDSLKEFVQFVCSDGSGQATGQPNGSGQGKVPGSFLLPPPPPVARPVPLPMPDSKSTSTAPDGAALTPPSPSFATTGASSANRFVSIGPRDGNFLNIPQQSQSWFL

SEQ ID NO: 15170 - protein, 75 aa, Artificial Sequence
  Synthetic polypeptide
GQARWLTPVIPALWEAEAGRSQGIGVWNPAFDVTPHDLITGGIITELGVFAPEELRTALTTTISSRDGTLDGPQM

SEQ ID NO: 15171 - protein, 75 aa, Artificial Sequence; identical to SEQ ID NO: 15170
  Synthetic polypeptide

SEQ ID NO: 15172 - protein, 49 aa, Artificial Sequence
  Synthetic polypeptide
SQHFGRPRRADHKGLEFGILPSMSPPTTSSLVASSQNWGSLPLRSSGQP

SEQ ID NO: 15173 - protein, 49 aa, Artificial Sequence; identical to SEQ ID NO: 15172
  Synthetic polypeptide

SEQ ID NO: 15174 - protein, 51 aa, Artificial Sequence
  Synthetic polypeptide
PGEVAHTCNPSTLGGRGGQITRDWSLESCLRCHPPRPHHWWHHHRTGGLCP

SEQ ID NO: 15175 - protein, 51 aa, Artificial Sequence; identical to SEQ ID NO: 15174
  Synthetic polypeptide

SEQ ID NO: 15176 - protein, 80 aa, Artificial Sequence
  Synthetic polypeptide
NGDTFPDADADEDSLAGELDEAMGSSEWLALTKSPQAFYRGRPSWQGTPGVLRGSRDVLAGLSSSCCKWGCSKSEISSLC

SEQ ID NO: 15177 - protein, 32 aa, Artificial Sequence
  Synthetic polypeptide
VKTEIPSRMQMLMKTVWQASWMRPWGPASGWP

SEQ ID NO: 15178 - protein, 11 aa, Artificial Sequence
  Synthetic polypeptide
LKRRYLPGCRC

SEQ ID NO: 15179 - protein, 11 aa, Artificial Sequence
  Synthetic polypeptide
LKRRYLPGCRC

SEQ ID NO: 15180 - protein, 10 aa, Artificial Sequence
  Synthetic polypeptide
NGDTFPDADA

SEQ ID NO: 15181 - protein, 12 aa, Artificial Sequence
  Synthetic polypeptide
VKTEIPSRMQML

SEQ ID NO: 15182 - protein, 28 aa, Artificial Sequence
  Synthetic polypeptide
LHHCTPTWTWSGRSFMLARLRVRNLIRS

SEQ ID NO: 15183 - protein, 28 aa, Artificial Sequence
  Synthetic polypeptide
LHHCTPTWTWSGRSFMLARLRVRNLIRS

SEQ ID NO: 15184 - protein, 28 aa, Artificial Sequence
  Synthetic polypeptide
LHHCTPTWTWSGRSFMLARLRVRNLIRS

SEQ ID NO: 15185 - protein, 28 aa, Artificial Sequence
  Synthetic polypeptide
LHHCTPTWTWSGRSFMLARLRVRNLIRS

SEQ ID NO: 15186 - protein, 30 aa, Artificial Sequence
  Synthetic polypeptide
AQEVRAAVSHDCTTALQPGPGVEDHLCWLG

SEQ ID NO: 15187 - protein, 30 aa, Artificial Sequence; identical to SEQ ID NO: 15186
  Synthetic polypeptide

SEQ ID NO: 15188 - protein, 30 aa, Artificial Sequence; identical to SEQ ID NO: 15186
  Synthetic polypeptide

SEQ ID NO: 15189 - protein, 30 aa, Artificial Sequence; identical to SEQ ID NO: 15186
  Synthetic polypeptide

SEQ ID NO: 15190 - protein, 176 aa, Artificial Sequence
  Synthetic polypeptide
AMIAPLHSNLDLEWKIIYVGSAESEEFDQILDSVLVGPVPAGRHMFVFQADAPNPSLIPETDAVGVTVVLITCTYHGQEFIRVGYYVNNEYLNPELRENPPMKPDFSQLQRNILASNPRVTRFHINWDNNMDRLEAIETQDPSLGCGLPLNCTPIKGLGLPGCIPGLLPENSMDCI

SEQ ID NO: 15191 - protein, 117 aa, Artificial Sequence
  Synthetic polypeptide
AMIAPLHSNLDLEWKIIYVGSAESEEFDQILDSVLVGPVPAGRHMFVFQLQRNILASNPRVTRFHINWDNNMDRLEAIETQDPSLGCGLPLNCTPIKGLGLPGCIPGLLPENSMDCI

SEQ ID NO: 15192 - protein, 55 aa, Artificial Sequence
  Synthetic polypeptide
AMIAPLHSNLDLEWKIIYVGSAESEEFDQILDSVLVGPVPAGRHMFVFQRLMPWV

SEQ ID NO: 15193 - protein, 139 aa, Artificial Sequence
  Synthetic polypeptide
AMIAPLHSNLDLEWKIIYVGSAESEEFDQILDSVLVGPVPAGRHMFVFQADAPNPSLIPETDAVGVTVVLITCTYHGQEFIRVGYYVNNEYLNPELRENPPMKPDFSQVGPVSTSCFPQGRSLYLGGVQPFKLRVKVTS

SEQ ID NO: 15194 - protein, 39 aa, Artificial Sequence
  Synthetic polypeptide
DVGSASAPPPRLGCEERLCPAATPSGRCSGSSSRRCSGG

SEQ ID NO: 15195 - protein, 39 aa, Artificial Sequence; identical to SEQ ID NO: 15194
  Synthetic polypeptide

SEQ ID NO: 15196 - protein, 39 aa, Artificial Sequence; identical to SEQ ID NO: 15194
  Synthetic polypeptide

SEQ ID NO: 15197 - protein, 39 aa, Artificial Sequence; identical to SEQ ID NO: 15194
  Synthetic polypeptide

SEQ ID NO: 15198 - protein, 117 aa, Artificial Sequence
  Synthetic polypeptide
GASLPGRPSSKMWGAPLPRRPVWDVRSASARPRPRLGGAVVPAADAAAAGETLCRGAHGPLVLQAVVHEQRGPTRPEHPAGLESGAVRPGHRGLCAGRWHREGPPGPLGQLRPPGQL

SEQ ID NO: 15199 - protein, 117 aa, Artificial Sequence; identical to SEQ ID NO: 15198
  Synthetic polypeptide

SEQ ID NO: 15200 - protein, 117 aa, Artificial Sequence; identical to SEQ ID NO: 15198
  Synthetic polypeptide

SEQ ID NO: 15201 - protein, 117 aa, Artificial Sequence; identical to SEQ ID NO: 15198
  Synthetic polypeptide

SEQ ID NO: 15202 - protein, 235 aa, Artificial Sequence
  Synthetic polypeptide
GAPLPGRDPVWEVQWFQQQTLQRRVKRSVVVPTDPWFSKQWYMNSEAQPDLSILQAWSQGLSGQGIVVSVLDDGIEKDHPDLWANYDPLASYDFNDYDPDPQPRYTPSKENRRTDAGRYHHRCHRGPVAEPAAAAHPHLQRQLGSRGRRPHGGRPRHPHPRGLPAWCDQASTRFPWAAPPSRAACPGTAKPAPPPSPPPTAAAWPPTPRSSPRTCITGAQTSTRAPRPQPHWRPA

SEQ ID NO: 15203 - protein, 669 aa, Artificial Sequence
  Synthetic polypeptide
GAPLPGRDPVWEVQWFQQQTLQRRVKRSVVVPTDPWFSKQWYMNSEAQPDLSILQAWSQGLSGQGIVVSVLDDGIEKDHPDLWANYDPLASYDFNDYDPDPQPRYTPSKENRHGTRCAGEVAAMANNGFCGVGVAFNARIGGVRMLDGTITDVIEAQSLSLQPQHIHIYSASWGPEDDGRTVDGPGILTREAFRRGVTKGRGGLGTLFIWASGNGGLHYDNCNCDGYTNSIHTLSVGSTTQQGRVPWYSEACASTLTTTYSSGVATDPQIVTTDLHHGCTDQHTGTSASAPLAAGMIALALEANPFLTWRDMQHLVVRASKPAHLQAEDWRTNGVGRQVSHHYGYGLLDAGLLVDTARTWLPTQPQRKCAVRVQSRPTPILPLIYIRENVSACAGLHNSIRSLEHVQAQLTLSYSRRGDLEISLTSPMGTRSTLVAIRPLDVSTEGYNNWVFMSTHFWDENPQGVWTLGLENKGYYFNTGTLYRYTLLLYGTAEDMTARPTGPQVTSSACVQRDTEGLCQACDGPAYILGQLCLAYCPPRFFNHTRLVTAGPGHTAAPALRVCSSCHASCYTCRGGSPRDCTSCPPSSTLDQQQGSCMGPTTPDSRPRLRAAACPHHRCPASAMVLSLLAVTLGGPVLCGMSMDLPLYAWLSRARATPTKPQVWLPAGT

SEQ ID NO: 15204 - protein, 439 aa, Artificial Sequence
  Synthetic polypeptide
GAPLPGRDPVWEVQWFQQQTLQRRVKRSVVVPTDPWFSKQWYMNSEAQPDLSILQAWSQGLSGQGIVVSVLDDGIEKDHPDLWANYDPLASYDFNDYDPDPQPRYTPSKENRRTDAGRYHHRCHRGPVAEPAAAAHPHLQRQLGSRGRRPHGGRPRHPHPRGLPAWCDQGEWQPEEGRGGRPGRRPLPAPPGFPGPRRAGHALHLGLGQRRPALRQLQLRRLHQQHPHAFRGQHHPAGPRALVQRSLRLHPHHHLQQRRGHRPPDRHHGPASRVHRPAHGHLGLSPTGGRHDRPSAGGQPVPDVERHAAPGGPRVQAGAPAGRGLEDQRRGAPSEPSLRIRAAGRRAAGGHRPHLAAHPAAEEVRRPGPEPPHPHPAADLHQGKRIGLRRPPQLHPLAGARAGAADAVLQPARRPGDLAHQPHGHALHTRGHTTLGRQH

SEQ ID NO: 15205 - protein, 143 aa, Artificial Sequence
  Synthetic polypeptide
GAPLPGRDPVWEVQWFQQQTLQRRVKRSVVVPTDPWFSKQWYMNSEAQPDLSILQAWSQGLSGQGIVVSVLDDGIEKDHPDLWANYDPLASYDFNDYDPDPQPRYTPSKENRRTDAGRYHHRCHRGPVAEPAAAAHPHLQRQL

SEQ ID NO: 15206 - protein, 54 aa, Artificial Sequence
  Synthetic polypeptide
GCSTAHDGAVQEVLPHGGPQYSQQQAHQQEAGALPEGREPFHRQPRGGEGAGGG

SEQ ID NO: 15207 - protein, 54 aa, Artificial Sequence; identical to SEQ ID NO: 15206
  Synthetic polypeptide

SEQ ID NO: 15208 - protein, 152 aa, Artificial Sequence
  Synthetic polypeptide
MLIEAFQILGFWSRDAQLLMMEQSKKSSLMVARSILNNKLISKKLERYLKGENPFTDSPEEEKEQEEAEGGALDEGAQGEAAGISEGAEGVPAQPPVPPEPAPGAVSPPPPPPPEEEEEGAVPLLGGALQRQIRGIPGLDVEDDEEGGGGAP

SEQ ID NO: 15209 - protein, 152 aa, Artificial Sequence; identical to SEQ ID NO: 15208
  Synthetic polypeptide

SEQ ID NO: 15210 - protein, 22 aa, Artificial Sequence
  Synthetic polypeptide
QSKCSLKHFRFWVFGVGMLNCS

SEQ ID NO: 15211 - protein, 22 aa, Artificial Sequence
  Synthetic polypeptide
QSKCSLKHFRFWVFGVGMLNCS

SEQ ID NO: 15212 - protein, 155 aa, Artificial Sequence
  Synthetic polypeptide
KKQVSQVWRQVPVVPATQEAELMMEQSKKSSLMVARSILNNKLISKKLERYLKGENPFTDSPEEEKEQEEAEGGALDEGAQGEAAGISEGAEGVPAQPPVPPEPAPGAVSPPPPPPPEEEEEGAVPLLGGALQRQIRGIPGLDVEDDEEGGGGAP

SEQ ID NO: 15213 - protein, 155 aa, Artificial Sequence; identical to SEQ ID NO: 15212
  Synthetic polypeptide

SEQ ID NO: 15214 - protein, 9 aa, Artificial Sequence
  Synthetic polypeptide
SPLRRRLSS

SEQ ID NO: 15215 - protein, 9 aa, Artificial Sequence
  Synthetic polypeptide
SPLRRRLSS

SEQ ID NO: 15216 - protein, 61 aa, Artificial Sequence
  Synthetic polypeptide
RGGQEHELGTGGLDPRQLCGLRVPTAYTWGAVGAVGLVWATDWRLILDWVPYINGKFKKDN

SEQ ID NO: 15217 - protein, 61 aa, Artificial Sequence; identical to SEQ ID NO: 15216
  Synthetic polypeptide

SEQ ID NO: 15218 - protein, 61 aa, Artificial Sequence; identical to SEQ ID NO: 15216
  Synthetic polypeptide

SEQ ID NO: 15219 - protein, 61 aa, Artificial Sequence; identical to SEQ ID NO: 15216
  Synthetic polypeptide

SEQ ID NO: 15220 - protein, 44 aa, Artificial Sequence
  Synthetic polypeptide
VVGKSMSLEPEASILASCVASGSRRPTHGALWAPWGWCGPPIGG

SEQ ID NO: 15221 - protein, 44 aa, Artificial Sequence; identical to SEQ ID NO: 15220
  Synthetic polypeptide

SEQ ID NO: 15222 - protein, 44 aa, Artificial Sequence; identical to SEQ ID NO: 15220
  Synthetic polypeptide

SEQ ID NO: 15223 - protein, 44 aa, Artificial Sequence; identical to SEQ ID NO: 15220
  Synthetic polypeptide

SEQ ID NO: 15224 - protein, 50 aa, Artificial Sequence
  Synthetic polypeptide
AWNRRPRSSPAVWPQGPDGLHMGRCGRRGAGVGHRLAADPGLGTLHQWQV

SEQ ID NO: 15225 - protein, 50 aa, Artificial Sequence; identical to SEQ ID NO: 15224
  Synthetic polypeptide

SEQ ID NO: 15226 - protein, 50 aa, Artificial Sequence; identical to SEQ ID NO: 15224
  Synthetic polypeptide

SEQ ID NO: 15227 - protein, 50 aa, Artificial Sequence; identical to SEQ ID NO: 15224
  Synthetic polypeptide

SEQ ID NO: 15228 - protein, 153 aa, Artificial Sequence
  Synthetic polypeptide
GQVWWLMPIIPALWEAEVGGSGGQEFETSLATTVARKLVILEGELERAEERAEVSELKCGDLEEELKNVTNNLKSLEAASEKYSEKEDKYEEEIKLLSDKLKEAETRAEFAERTVAKLEKTIDDLEEKLAQAKEENVGLHQTLDQTLNELNCI

SEQ ID NO: 15229 - protein, 153 aa, Artificial Sequence; identical to SEQ ID NO: 15228
  Synthetic polypeptide

SEQ ID NO: 15230 - protein, 153 aa, Artificial Sequence; identical to SEQ ID NO: 15228
  Synthetic polypeptide

SEQ ID NO: 15231 - protein, 15 aa, Artificial Sequence
  Synthetic polypeptide
VDQEVRNSRPAWPLR

SEQ ID NO: 15232 - protein, 15 aa, Artificial Sequence
  Synthetic polypeptide
VDQEVRNSRPAWPLR

SEQ ID NO: 15233 - protein, 15 aa, Artificial Sequence
  Synthetic polypeptide
VDQEVRNSRPAWPLR

SEQ ID NO: 15234 - protein, 15 aa, Artificial Sequence
  Synthetic polypeptide
VDQEVRNSRPAWPLR

SEQ ID NO: 15235 - protein, 15 aa, Artificial Sequence
  Synthetic polypeptide
VDQEVRNSRPAWPLR

SEQ ID NO: 15236 - protein, 15 aa, Artificial Sequence
  Synthetic polypeptide
VDQEVRNSRPAWPLR

SEQ ID NO: 15237 - protein, 15 aa, Artificial Sequence
  Synthetic polypeptide
VDQEVRNSRPAWPLR

SEQ ID NO: 15238 - protein, 15 aa, Artificial Sequence
  Synthetic polypeptide
VDQEVRNSRPAWPLR

SEQ ID NO: 15239 - protein, 35 aa, Artificial Sequence
  Synthetic polypeptide
PGVVAHAYNPSTLGGRGRWIRRSGIRDQPGHYGSS

SEQ ID NO: 15240 - protein, 35 aa, Artificial Sequence; identical to SEQ ID NO: 15239
  Synthetic polypeptide

SEQ ID NO: 15241 - protein, 35 aa, Artificial Sequence; identical to SEQ ID NO: 15239
  Synthetic polypeptide

SEQ ID NO: 15242 - protein, 35 aa, Artificial Sequence; identical to SEQ ID NO: 15239
  Synthetic polypeptide

SEQ ID NO: 15243 - protein, 35 aa, Artificial Sequence; identical to SEQ ID NO: 15239
  Synthetic polypeptide

SEQ ID NO: 15244 - protein, 35 aa, Artificial Sequence; identical to SEQ ID NO: 15239
  Synthetic polypeptide

SEQ ID NO: 15245 - protein, 35 aa, Artificial Sequence; identical to SEQ ID NO: 15239
  Synthetic polypeptide

SEQ ID NO: 15246 - protein, 35 aa, Artificial Sequence; identical to SEQ ID NO: 15239
  Synthetic polypeptide

SEQ ID NO: 15247 - protein, 55 aa, Artificial Sequence
  Synthetic polypeptide
GQVWWLMPIIPALWEAEVGGSGGQEFETSLATTVARKLVILEGELERAEERAEVS

SEQ ID NO: 15248 - protein, 85 aa, Artificial Sequence
  Synthetic polypeptide
GQVWWLMPIIPALWEAEVGGSGGQEFETSLATTVARKLVILEGELERAEERAEVSELKCGDLEEELKNVTNNLKSLEAASEKYSE

SEQ ID NO: 15249 - protein, 91 aa, Artificial Sequence
  Synthetic polypeptide
GQVWWLMPIIPALWEAEVGGSGGQEFETSLATTVARKLVILEGELERAEERAEVSELKCGDLEEELKNVTNNLKSLEAASEKYSEKEDKYE

SEQ ID NO: 15250 - protein, 46 aa, Artificial Sequence
  Synthetic polypeptide
GQVWWLMPIIPALWEAEVGGSGGQEFETSLATTVARKLVILEGELE

SEQ ID NO: 15251 - protein, 97 aa, Artificial Sequence
  Synthetic polypeptide
GQVWWLMPIIPALWEAEVGGSGGQEFETSLATTVARKLVILEGELERAEERAEVSELKCGDLEEELKNVTNNLKSLEAASEKYSEKEDKYEEEIKLL

SEQ ID NO: 15252 - protein, 27 aa, Artificial Sequence
  Synthetic polypeptide
ESFSDFSSSILKRRTNMKKKLNFCLTN

SEQ ID NO: 15253 - protein, 27 aa, Artificial Sequence
  Synthetic polypeptide
ESFSDFSSSILKRRTNMKKKLNFCLTN

SEQ ID NO: 15254 - protein, 27 aa, Artificial Sequence
  Synthetic polypeptide
ESFSDFSSSILKRRTNMKKKLNFCLTN

SEQ ID NO: 15255 - protein, 27 aa, Artificial Sequence
  Synthetic polypeptide
ESFSDFSSSILKRRTNMKKKLNFCLTN

SEQ ID NO: 15256 - protein, 24 aa, Artificial Sequence
  Synthetic polypeptide
PVHPLSFCLNITSESPSLISHLVF

SEQ ID NO: 15257 - protein, 24 aa, Artificial Sequence
  Synthetic polypeptide
PVHPLSFCLNITSESPSLISHLVF

SEQ ID NO: 15258 - protein, 24 aa, Artificial Sequence
  Synthetic polypeptide
PVHPLSFCLNITSESPSLISHLVF

SEQ ID NO: 15259 - protein, 24 aa, Artificial Sequence
  Synthetic polypeptide
PVHPLSFCLNITSESPSLISHLVF

SEQ ID NO: 15260 - protein, 24 aa, Artificial Sequence
  Synthetic polypeptide
PVHPLSFCLNITSESPSLISHLVF

SEQ ID NO: 15261 - protein, 24 aa, Artificial Sequence
  Synthetic polypeptide
PVHPLSFCLNITSESPSLISHLVF

SEQ ID NO: 15262 - protein, 24 aa, Artificial Sequence
  Synthetic polypeptide
PVHPLSFCLNITSESPSLISHLVF

SEQ ID NO: 15263 - protein, 11 aa, Artificial Sequence
  Synthetic polypeptide
ESFSDFSSSIL

SEQ ID NO: 15264 - protein, 18 aa, Artificial Sequence
  Synthetic polypeptide
ESFSDFSSSILKRRTNMK

SEQ ID NO: 15265 - protein, 24 aa, Artificial Sequence
  Synthetic polypeptide
ESFSDFSSSILKRRTNMKKKLNFC

SEQ ID NO: 15266 - protein, 211 aa, Artificial Sequence
  Synthetic polypeptide
GQVRWLSSVIPALWEAEASPKPVLCHQSKERKPSAEMNRITTKEATSSCPPKSPLGETRQKLWRSLKMLPERGQRVRQQLKSHLATVNLSSLLDVRRSTVISGPGTGKGSQDHSGDPTSGDRGYTDPCVATSLKSPSQPQAPKDRKVPTRKAERSVSCIEVTPGDRSWHQMVVRALSSQESKPEHQGLAEPENDQLPEEYQQPPPFAPGYC

SEQ ID NO: 15267 - protein, 27 aa, Artificial Sequence
  Synthetic polypeptide
SQHSGRPRPPQSQSCVTNQRKGSRQQR

SEQ ID NO: 15268 - protein, 27 aa, Artificial Sequence
  Synthetic polypeptide
SQHSGRPRPPQSQSCVTNQRKGSRQQR

SEQ ID NO: 15269 - protein, 27 aa, Artificial Sequence
  Synthetic polypeptide
SQHSGRPRPPQSQSCVTNQRKGSRQQR

SEQ ID NO: 15270 - protein, 27 aa, Artificial Sequence
  Synthetic polypeptide
SQHSGRPRPPQSQSCVTNQRKGSRQQR

SEQ ID NO: 15271 - protein, 27 aa, Artificial Sequence
  Synthetic polypeptide
SQHSGRPRPPQSQSCVTNQRKGSRQQR

SEQ ID NO: 15272 - protein, 158 aa, Artificial Sequence
  Synthetic polypeptide
PGAVALICNPSTLGGRGLPKASPVSPIKGKEAVSRDEQNNHQGSHFLLPPKIPSWRDPPETLEEPQNAPRERPEGPAAAKKPPRHCELVVTLGCPEIHGDLRPWDRKRQPRSLRGSHLGGQRLHGSLCGHISQKPLTAPGTKRQKGPHQEGREVGQLH

SEQ ID NO: 15273 - protein, 210 aa, Artificial Sequence
  Synthetic polypeptide
GQVRWLSSVIPALWEAEASPKPVLCHQSKERKPSAEMNRITTKEATSSCPPKSPLGETRQKLWRSLKMLPERGQRVRQQKSHLATVNLSSLLDVRRSTVISGPGTGKGSQDHSGDPTSGDRGYTDPCVATSLKSPSQPQAPKDRKVPTRKAERSVSCIEVTPGDRSWHQMVVRALSSQESKPEHQGLAEPENDQLPEEYQQPPPFAPGYC

SEQ ID NO: 15274 - protein, 157 aa, Artificial Sequence
  Synthetic polypeptide
PGAVALICNPSTLGGRGLPKASPVSPIKGKEAVSRDEQNNHQGSHFLLPPKIPSWRDPPETLEEPQNAPRERPEGPAAEKPPRHCELVVTLGCPEIHGDLRPWDRKRQPRSLRGSHLGGQRLHGSLCGHISQKPLTAPGTKRQKGPHQEGREVGQLH

SEQ ID NO: 15275 - protein, 159 aa, Artificial Sequence
  Synthetic polypeptide
GQVRWLSSVIPALWEAEASPKPVLCHQSKERKPSAEMNRITTKEATSSCPPKSPLGETRQKLWRSLKMLPERGQRVRQQLKKPPRHCELVVTLGCPEIHGDLRPWDRKRQPRSLRGSHLGGQRLHGSLCGHISQKPLTAPGTKRQKGPHQEGREVGQLH

SEQ ID NO: 15276 - protein, 159 aa, Artificial Sequence; identical to SEQ ID NO: 15275
  Synthetic polypeptide

SEQ ID NO: 15277 - protein, 86 aa, Artificial Sequence
  Synthetic polypeptide
PGAVALICNPSTLGGRGLPKASPVSPIKGKEAVSRDEQNNHQGSHFLLPPKIPSWRDPPETLEEPQNAPRERPEGPAAAKKATSPL

SEQ ID NO: 15278 - protein, 86 aa, Artificial Sequence; identical to SEQ ID NO: 15277
  Synthetic polypeptide

SEQ ID NO: 15279 - protein, 57 aa, Artificial Sequence
  Synthetic polypeptide
GQVRWLSSVIPALWEAEASPKPVLCHQSKERKPSAEMNRITTKEATSSCPPKSPLGE

SEQ ID NO: 15280 - protein, 56 aa, Artificial Sequence
  Synthetic polypeptide
PGAVALICNPSTLGGRGLPKASPVSPIKGKEAVSRDEQNNHQGSHFLLPPKIPSWR

SEQ ID NO: 15281 - protein, 217 aa, Artificial Sequence
  Synthetic polypeptide
GQVRWLSSVIPALWEAEVGGSPEASPKPVLCHQSKERKPSAEMNRITTKEATSSCPPKSPLGETRQKLWRSLKMLPERGQRVRQQLKSHLATVNLSSLLDVRRSTVISGPGTGKGSQDHSGDPTSGDRGYTDPCVATSLKSPSQPQAPKDRKVPTRKAERSVSCIEVTPGDRSWHQMVVRALSSQESKPEHQGLAEPENDQLPEEYQQPPPFAPGYC

SEQ ID NO: 15282 - protein, 33 aa, Artificial Sequence
  Synthetic polypeptide
SQHSGRPRWVDHLRPPQSQSCVTNQRKGSRQQR

SEQ ID NO: 15283 - protein, 33 aa, Artificial Sequence; identical to SEQ ID NO: 15282
  Synthetic polypeptide

SEQ ID NO: 15284 - protein, 33 aa, Artificial Sequence; identical to SEQ ID NO: 15282
  Synthetic polypeptide

SEQ ID NO: 15285 - protein, 33 aa, Artificial Sequence; identical to SEQ ID NO: 15282
  Synthetic polypeptide

SEQ ID NO: 15286 - protein, 33 aa, Artificial Sequence; identical to SEQ ID NO: 15282
  Synthetic polypeptide

SEQ ID NO: 15287 - protein, 216 aa, Artificial Sequence
  Synthetic polypeptide
GQVRWLSSVIPALWEAEVGGSPEASPKPVLCHQSKERKPSAEMNRITTKEATSSCPPKSPLGETRQKLWRSLKMLPERGQRVRQQKSHLATVNLSSLLDVRRSTVISGPGTGKGSQDHSGDPTSGDRGYTDPCVATSLKSPSQPQAPKDRKVPTRKAERSVSCIEVTPGDRSWHQMVVRALSSQESKPEHQGLAEPENDQLPEEYQQPPPFAPGYC

SEQ ID NO: 15288 - protein, 165 aa, Artificial Sequence
  Synthetic polypeptide
GQVRWLSSVIPALWEAEVGGSPEASPKPVLCHQSKERKPSAEMNRITTKEATSSCPPKSPLGETRQKLWRSLKMLPERGQRVRQQLKKPPRHCELVVTLGCPEIHGDLRPWDRKRQPRSLRGSHLGGQRLHGSLCGHISQKPLTAPGTKRQKGPHQEGREVGQLH

SEQ ID NO: 15289 - protein, 165 aa, Artificial Sequence; identical to SEQ ID NO: 15288
  Synthetic polypeptide

SEQ ID NO: 15290 - protein, 63 aa, Artificial Sequence
  Synthetic polypeptide
GQVRWLSSVIPALWEAEVGGSPEASPKPVLCHQSKERKPSAEMNRITTKEATSSCPPKSPLGE

SEQ ID NO: 15291 - protein, 25 aa, Artificial Sequence
  Synthetic polypeptide
WRGQELRCQPDWLQNQRPQCLPEDD

SEQ ID NO: 15292 - protein, 25 aa, Artificial Sequence
  Synthetic polypeptide
WRGQELRCQPDWLQNQRPQCLPEDD

SEQ ID NO: 15293 - protein, 25 aa, Artificial Sequence
  Synthetic polypeptide
WRGQELRCQPDWLQNQRPQCLPEDD

SEQ ID NO: 15294 - protein, 25 aa, Artificial Sequence
  Synthetic polypeptide
WRGQELRCQPDWLQNQRPQCLPEDD

SEQ ID NO: 15295 - protein, 25 aa, Artificial Sequence
  Synthetic polypeptide
WRGQELRCQPDWLQNQRPQCLPEDD

SEQ ID NO: 15296 - protein, 25 aa, Artificial Sequence
  Synthetic polypeptide
WRGQELRCQPDWLQNQRPQCLPEDD

SEQ ID NO: 15297 - protein, 25 aa, Artificial Sequence
  Synthetic polypeptide
WRGQELRCQPDWLQNQRPQCLPEDD

SEQ ID NO: 15298 - protein, 25 aa, Artificial Sequence
  Synthetic polypeptide
WRGQELRCQPDWLQNQRPQCLPEDD

SEQ ID NO: 15299 - protein, 25 aa, Artificial Sequence
  Synthetic polypeptide
WRGQELRCQPDWLQNQRPQCLPEDD

SEQ ID NO: 15300 - protein, 25 aa, Artificial Sequence
  Synthetic polypeptide
WRGQELRCQPDWLQNQRPQCLPEDD

SEQ ID NO: 15301 - protein, 25 aa, Artificial Sequence
  Synthetic polypeptide
WRGQELRCQPDWLQNQRPQCLPEDD

SEQ ID NO: 15302 - protein, 25 aa, Artificial Sequence
  Synthetic polypeptide
WRGQELRCQPDWLQNQRPQCLPEDD

SEQ ID NO: 15303 - protein, 25 aa, Artificial Sequence
  Synthetic polypeptide
WRGQELRCQPDWLQNQRPQCLPEDD

SEQ ID NO: 15304 - protein, 226 aa, Artificial Sequence
  Synthetic polypeptide
GEGRSSDVSQTGSKTNALNVSQKMIEMFVRTKHKIDKSHEFALVVVNDDTAWLSGLTSDPRELCSCLYDLETASCSTFNLEGLFSLIQQKTELPVTENVQTIPPPYVVRTILVYSRPPCQPQFSLTEPMKKMFQCPYFFFDVVYIHNGTEEKEEEMSWKDMFAFMGSLDTKGTSYKYEVALAGPALELHNCMAKLLAHPLQRPCQSHASYSLLEEEDEAIEVEATV

SEQ ID NO: 15305 - protein, 226 aa, Artificial Sequence; identical to SEQ ID NO: 15304
  Synthetic polypeptide

SEQ ID NO: 15306 - protein, 226 aa, Artificial Sequence; identical to SEQ ID NO: 15304
  Synthetic polypeptide

SEQ ID NO: 15307 - protein, 23 aa, Artificial Sequence
  Synthetic polypeptide
ERAGAPMSARLAPKPTPSMSPRR

SEQ ID NO: 15308 - protein, 23 aa, Artificial Sequence
  Synthetic polypeptide
ERAGAPMSARLAPKPTPSMSPRR

SEQ ID NO: 15309 - protein, 23 aa, Artificial Sequence
  Synthetic polypeptide
ERAGAPMSARLAPKPTPSMSPRR

SEQ ID NO: 15310 - protein, 23 aa, Artificial Sequence
  Synthetic polypeptide
ERAGAPMSARLAPKPTPSMSPRR

SEQ ID NO: 15311 - protein, 23 aa, Artificial Sequence
  Synthetic polypeptide
ERAGAPMSARLAPKPTPSMSPRR

SEQ ID NO: 15312 - protein, 23 aa, Artificial Sequence
  Synthetic polypeptide
ERAGAPMSARLAPKPTPSMSPRR

SEQ ID NO: 15313 - protein, 23 aa, Artificial Sequence
  Synthetic polypeptide
ERAGAPMSARLAPKPTPSMSPRR

SEQ ID NO: 15314 - protein, 23 aa, Artificial Sequence
  Synthetic polypeptide
ERAGAPMSARLAPKPTPSMSPRR

SEQ ID NO: 15315 - protein, 23 aa, Artificial Sequence
  Synthetic polypeptide
ERAGAPMSARLAPKPTPSMSPRR

SEQ ID NO: 15316 - protein, 23 aa, Artificial Sequence
  Synthetic polypeptide
ERAGAPMSARLAPKPTPSMSPRR

SEQ ID NO: 15317 - protein, 23 aa, Artificial Sequence
  Synthetic polypeptide
ERAGAPMSARLAPKPTPSMSPRR

SEQ ID NO: 15318 - protein, 23 aa, Artificial Sequence
  Synthetic polypeptide
ERAGAPMSARLAPKPTPSMSPRR

SEQ ID NO: 15319 - protein, 23 aa, Artificial Sequence
  Synthetic polypeptide
ERAGAPMSARLAPKPTPSMSPRR

SEQ ID NO: 15320 - protein, 25 aa, Artificial Sequence
  Synthetic polypeptide
GEGRSSDVSQTGSKTNALNVSQKMI

SEQ ID NO: 15321 - protein, 159 aa, Artificial Sequence
  Synthetic polypeptide
GEGRSSDVSQTGSKTNALNVSQKMIEMFVRTKHKIDKSHEFALVVVNDDTAWLSGLTSDPRELCSCLYDLETASCSTFNLEGLFSLIQQKTELPVTENVQTIPPPYVVRTILVYSRPPCQPQFSLTEPMKKMFQCPYFFFDVVYIHNGTEEKEEEMSWK

SEQ ID NO: 15322 - protein, 97 aa, Artificial Sequence
  Synthetic polypeptide
GEGRSSDVSQTGSKTNALNVSQKMIEMFVRTKHKIDKSHEFALVVVNDDTAWLSGLTSDPRELCSCLYDLETASCSTFNLEGLFSLIQQKTELPVTE

SEQ ID NO: 15323 - protein, 78 aa, Artificial Sequence
  Synthetic polypeptide
GEGRSSDVSQTGSKTNALNVSQKMIEMFVRTKHKIDKSHEFALVVVNDDTAWLSGLTSDPRELCSCLYDLETASCSTF

SEQ ID NO: 15324 - protein, 226 aa, Artificial Sequence
  Synthetic polypeptide
GEGRSSDVSQTGSKTNALNVSQKMIEMFVRTKHKIDKSHEFALVVVNDDTAWLSGLTSDPRELCSCLYDLETASCSTFNISGASPARQQKTELPVTENVQTIPPPYVVRTILVYSRPPCQPQFSLTEPMKKMFQCPYFFFDVVYIHNGTEEKEEEMSWKDMFAFMGSLDTKGTSYKYEVALAGPALELHNCMAKLLAHPLQRPCQSHASYSLLEEEDEAIEVEATV

SEQ ID NO: 15325 - protein, 115 aa, Artificial Sequence
  Synthetic polypeptide
GEGRSSDVSQTGSKTNALNVSQKMIEMFVRTKHKIDKSHEFALVVVNDDTAWLSGLTSDPRELCSCLYDLETASCSTFTFSLAPPPDLEGLFSLIQQKTELPVTENVQTIPPPYV

SEQ ID NO: 15326 - protein, 90 aa, Artificial Sequence
  Synthetic polypeptide
GEGRSSDVSQTGSKTNALNVSQKMIEMFVRTKHKIDKSHEFALVVVNDDTAWLSGLTSDPRELCSCLYDLETASCSTFTPPPDLEGLFSL

SEQ ID NO: 15327 - protein, 105 aa, Artificial Sequence
  Synthetic polypeptide
GEGRSSDVSQTGSKTNALNVSQKMIEMFVRTKHKIDKSHEFALVVVNDDTAWLSGLTSDPRELCSCLYDLETASCSTFNLEGLFSLIQQKTELPVTENVQTIPPP

SEQ ID NO: 15328 - protein, 122 aa, Artificial Sequence
  Synthetic polypeptide
GEGRSSDVSQTGSKTNALNVSQKMIEMFVRTKHKIDKSHEFALVVVNDDTAWLSGLTSDPRELCSCLYDLETASCSTFNLEGLFSLIQQKTELPVTENVQTIPPPYVVRTILVYSRPPCQPQ

SEQ ID NO: 15329 - protein, 57 aa, Artificial Sequence
  Synthetic polypeptide
GEGRSSDVSQTGSKTNALNVSQKMIEMFVRTKHKIDKSHCLNHPCTSAPSCARKSLA

SEQ ID NO: 15330 - protein, 28 aa, Artificial Sequence
  Synthetic polypeptide
THLNSSMASCPVAGRFFERTACLQQKQF

SEQ ID NO: 15331 - protein, 28 aa, Artificial Sequence
  Synthetic polypeptide
THLNSSMASCPVAGRFFERTACLQQKQF

SEQ ID NO: 15332 - protein, 28 aa, Artificial Sequence
  Synthetic polypeptide
THLNSSMASCPVAGRFFERTACLQQKQF

SEQ ID NO: 15333 - protein, 111 aa, Artificial Sequence
  Synthetic polypeptide
IHPWLHALLQADFLKGLPVYNKSNFSRFHADSVCKASNRRPSVYLPTREYPSEQIIVTEKTNILLRYLHQQWDKKNAAKKRDQEQVELEGESSAPPRKVARTDSPDMHEDT

SEQ ID NO: 15334 - protein, 111 aa, Artificial Sequence; identical to SEQ ID NO: 15333
  Synthetic polypeptide

SEQ ID NO: 15335 - protein, 111 aa, Artificial Sequence; identical to SEQ ID NO: 15333
  Synthetic polypeptide

SEQ ID NO: 15336 - protein, 38 aa, Artificial Sequence
  Synthetic polypeptide
YLGTVSSLQPIISGLDCLCLLNTPEFIHGFMPCCRQIF

SEQ ID NO: 15337 - protein, 38 aa, Artificial Sequence; identical to SEQ ID NO: 15336
  Synthetic polypeptide

SEQ ID NO: 15338 - protein, 38 aa, Artificial Sequence; identical to SEQ ID NO: 15336
  Synthetic polypeptide

SEQ ID NO: 15339 - protein, 30 aa, Artificial Sequence
  Synthetic polypeptide
CEQQNLLHRRGGTRQLWQELRAEIWLLPVP

SEQ ID NO: 15340 - protein, 30 aa, Artificial Sequence; identical to SEQ ID NO: 15339
  Synthetic polypeptide

SEQ ID NO: 15341 - protein, 30 aa, Artificial Sequence; identical to SEQ ID NO: 15339
  Synthetic polypeptide

SEQ ID NO: 15342 - protein, 30 aa, Artificial Sequence; identical to SEQ ID NO: 15339
  Synthetic polypeptide

SEQ ID NO: 15343 - protein, 30 aa, Artificial Sequence; identical to SEQ ID NO: 15339
  Synthetic polypeptide

SEQ ID NO: 15344 - protein, 30 aa, Artificial Sequence; identical to SEQ ID NO: 15339
  Synthetic polypeptide

SEQ ID NO: 15345 - protein, 264 aa, Artificial Sequence
  Synthetic polypeptide
SQHLGRRITRAQKIKTSVSNKISCTVEGAPASFGKSFAQKSGYFLCLSSLGSLENPQENVVADIQIVVDKSPLPLGFSPVCDPMDSKASVSKKKRMCVKLLPLGATDTAVFDVRLSGKTKTVPGYLRIGDMGGFAIWCKKAKAPRPVPKPRGLSRDMQGLSLDAASQPSKGGLLERTASRLGSRASTLRRNDSIYEASSLYGISAMDGVPFTLHPRFEGKSCSPLAFSAFGDLTIKSLADIEEEYNYGFVVEKTAAARLPPSVS

SEQ ID NO: 15346 - protein, 264 aa, Artificial Sequence; identical to SEQ ID NO: 15345
  Synthetic polypeptide

SEQ ID NO: 15347 - protein, 34 aa, Artificial Sequence
  Synthetic polypeptide
ATKSPAPSRGHPPALARASRRNLATSCALVLWAA

SEQ ID NO: 15348 - protein, 34 aa, Artificial Sequence; identical to SEQ ID NO: 15347
  Synthetic polypeptide

SEQ ID NO: 15349 - protein, 34 aa, Artificial Sequence; identical to SEQ ID NO: 15347
  Synthetic polypeptide

SEQ ID NO: 15350 - protein, 34 aa, Artificial Sequence; identical to SEQ ID NO: 15347
  Synthetic polypeptide

SEQ ID NO: 15351 - protein, 34 aa, Artificial Sequence; identical to SEQ ID NO: 15347
  Synthetic polypeptide

SEQ ID NO: 15352 - protein, 34 aa, Artificial Sequence; identical to SEQ ID NO: 15347
  Synthetic polypeptide

SEQ ID NO: 15353 - protein, 131 aa, Artificial Sequence
  Synthetic polypeptide
SQHLGRRITRAQKIKTSVSNKISCTVEGAPASFGKSFAQKSGYFLCLSSLGSLENPQENVVADIQIVVDKSPLPLGFSPVCDPMDSSFAHAASSAWGTFSLLFVAHSPSSVRCHLHPSLPLLFWAHNPSAA

SEQ ID NO: 15354 - protein, 224 aa, Artificial Sequence
  Synthetic polypeptide
SQHLGRRITRAQKIKTSVSNKISCTVEGAPASFGKSFAQKSGYFLCLSSLGSLENPQENVVADIQIVVDKSPLPLGFSPVCDPMDSKASVSKKKRMCVKLLPLGATDTAVFDVRLSGKTKTVPGYLRIGKGGLLERTASRLGSRASTLRRNDSIYEASSLYGISAMDGVPFTLHPRFEGKSCSPLAFSAFGDLTIKSLADIEEEYNYGFVVEKTAAARLPPSVS

SEQ ID NO: 15355 - protein, 264 aa, Artificial Sequence
  Synthetic polypeptide
SQHLGRRITRAQKIKTSVSNKISCTVEGAPASFGKSFAQKSGYFLCLSSLGSLENPQENVVADIQIVVDKSPLPLGFSPVCDPMDSKASVSKKKRMCVKLLPLGATDTAVFDVRLSGKTKTVPGYLRIGDMGGFAIWCKKAKAPRPVPKPRGLSRDMQGLSLDAASQPSKGGLLERTASRLGSRASTLRRNDSIYEASSLYGISAMDGVPFTLHPRFEGKSCSPLAGLPSSRNTLKAARQTHIRCLESGGFGCSPRTSLALRLT

SEQ ID NO: 15356 - protein, 190 aa, Artificial Sequence
  Synthetic polypeptide
SQHLGRRITRAQKIKTSVSNKISCTVEGAPASFGKSFAQKSGYFLCLSSLGSLENPQENVVADIQIVVDKSPLPLGFSPVCDPMDSRTWAALPSGARRPRPRGQCPSPEVSAGTCRASLWMQPASQVRAASWSGQRQGWALGHPLCGGMTPSTRPPASMASQPWMGFPSHSTHDLRARAAAPWPSLLLGT

SEQ ID NO: 15357 - protein, 65 aa, Artificial Sequence
  Synthetic polypeptide
GRTRWLTPVIPALWETEAGRSRGQEIETILANKHCPSMPCYFSRSRQAQQLLPSSARAPWFWWLC

SEQ ID NO: 15358 - protein, 65 aa, Artificial Sequence; identical to SEQ ID NO: 15357
  Synthetic polypeptide

SEQ ID NO: 15359 - protein, 72 aa, Artificial Sequence
  Synthetic polypeptide
SQHFGRPRRADHEVRRSRPSWLTSTVHLCLATFRDRDRRSSCFHPRLGHPGSGGCADPHSPPGCPGCPPWAP

SEQ ID NO: 15360 - protein, 72 aa, Artificial Sequence; identical to SEQ ID NO: 15359
  Synthetic polypeptide

SEQ ID NO: 15361 - protein, 157 aa, Artificial Sequence
  Synthetic polypeptide
QALSIYALLLFEIETGAAAASILGSGTLVLVAVLTHTLLRAARAARRGLHELSPPSFEDDLARPAEVSKASPRAQPQQGIHRRTPYSTCPEPGDPFGSMATATAPAALEGGWESSLPASRMHRTLSAGLGHWDGVTHEMRRMLGHRPGSMGKDSTLV

SEQ ID NO: 15362 - protein, 107 aa, Artificial Sequence
  Synthetic polypeptide
QALSIYALLLFEIETGAAAASILGSGTLVLVAVLTHTLLRAARAARRGLHELSPPSFEDDLARPAEVSKASPRAQPQQGIHRRTPYSTCPEPGDPFGSMATATAPAA

SEQ ID NO: 15363 - protein, 24 aa, Artificial Sequence
  Synthetic polypeptide
PGAVAHAVILAIWEAKGGYGPQHG

SEQ ID NO: 15364 - protein, 541 aa, Artificial Sequence
  Synthetic polypeptide
QFGRPRVATDHNMDNTSTVLREWLVAVKSLYHSVEWRPAEEPRSYPDEEGPKHWSDSRYEHVMKLRQAALKSARDMWADYILFVDADNLILNPDTLSLLIAENKTVVAPMLDSRAAYSNFWCGMTSQGYYKRTPAYIPIRKRDRRGCFAVPMVHSTFLIDLRKAASRNLAFYPPHPDYTWSFDDIIVFAFSCKQAEVQMYVCNKEEYGFLPVPLRAHSTLQDEAESFMHVQLEVMVKHPPAEPSRFISAPTKTPDKMGFDEVFMINLRRRQDRRERMLRALQAQEIECRLVEAVDGKAMNTSQVEALGIQMLPGYRDPYHGRPLTKGELGCFLSHYNIWKEVVDRGLQKSLVFEDDLRFEIFFKRRLMNLMRDVEREGLDWDLIYVGRKRMQVEHPEKAVPRVRNLVEADYSYWTLAYVISLQGARKLLAAEPLSKMLPVDEFLPVMFDKHPVSEYKAHFSLRNLHAFSVEPLLIYPTHYTGDDGYVSDTETSVVWNNEHVKTDWDRAKSQKMREQQALSREAKNSDVLQSPLDSAARDEL

SEQ ID NO: 15365 - protein, 36 aa, Artificial Sequence
  Synthetic polypeptide
GCSGSRSNPSNLGGQGWLRTTTWITRQLCCGSGWWP

SEQ ID NO: 15366 - protein, 43 aa, Artificial Sequence
  Synthetic polypeptide
WDNSEIKVQPDRGPERSQPTHIILGSAPIPIPAESDDISQDPC

SEQ ID NO: 15367 - protein, 43 aa, Artificial Sequence; identical to SEQ ID NO: 15366
  Synthetic polypeptide

SEQ ID NO: 15368 - protein, 43 aa, Artificial Sequence; identical to SEQ ID NO: 15366
  Synthetic polypeptide

SEQ ID NO: 15369 - protein, 5 aa, Artificial Sequence
  Synthetic polypeptide
DKSPT

SEQ ID NO: 15370 - protein, 5 aa, Artificial Sequence
  Synthetic polypeptide
DKSPT

SEQ ID NO: 15371 - protein, 5 aa, Artificial Sequence
  Synthetic polypeptide
DKSPT

SEQ ID NO: 15372 - protein, 185 aa, Artificial Sequence
  Synthetic polypeptide
AWQQCRDPRAGERPELREYKVVGRCLPTPKCHTPPLYRMRIFAPNHVVAKSRFWYFVSQLKKMKKSSGEIVYCGQVFEKSPLRVKNFGIWLRYDSRSGTHNMYREYRDLTTAGAVTQCYRDMGARHRARAHSIQIMKVEEIAASKCRRPAVKQFHDSKIKFPLPHRVLRRQHKPRFTTKRPNTFF

SEQ ID NO: 15373 - protein, 20 aa, Artificial Sequence
  Synthetic polypeptide
RGNSAGIPGLGRDLSYESTR

SEQ ID NO: 15374 - protein, 20 aa, Artificial Sequence
  Synthetic polypeptide
RGNSAGIPGLGRDLSYESTR

SEQ ID NO: 15375 - protein, 163 aa, Artificial Sequence
  Synthetic polypeptide
AWQQCRDPRAGERPELREYKVVGRCLPTPKCHTPPLYRMRIFAPNHVVAKSRFWYFVSQLKKMKKSSGEIVYCGQVFEKSPLRVKNFGIWLRYDSRSGTHNMYREYRDLTTAGAVTQCYRDMGARHRARAHSIQIMKVEEIAASKCRRPHKPRFTTKRPNTFF

SEQ ID NO: 15376 - protein, 146 aa, Artificial Sequence
  Synthetic polypeptide
AWQQCRDPRAGERPELREYKLKKMKKSSGEIVYCGQVFEKSPLRVKNFGIWLRYDSRSGTHNMYREYRDLTTAGAVTQCYRDMGARHRARAHSIQIMKVEEIAASKCRRPAVKQFHDSKIKFPLPHRVLRRQHKPRFTTKRPNTFF

SEQ ID NO: 15377 - protein, 20 aa, Artificial Sequence
  Synthetic polypeptide
RGNSAGIPGLGRDLSYESTS

SEQ ID NO: 15378 - protein, 51 aa, Artificial Sequence
  Synthetic polypeptide
RLWDLRAHPSEDNDFYINYKDIDLASQPVYCNLQSLGQAPMDEEEYVIPGH

SEQ ID NO: 15379 - protein, 51 aa, Artificial Sequence; identical to SEQ ID NO: 15378
  Synthetic polypeptide

SEQ ID NO: 15380 - protein, 65 aa, Artificial Sequence
  Synthetic polypeptide
IIRLHTQMAEVQIPALPLEGCGILGLTLQRTMTFTSTTRTSTWLPSLSTVTCSHWARPQWMKRST

SEQ ID NO: 15381 - protein, 65 aa, Artificial Sequence; identical to SEQ ID NO: 15380
  Synthetic polypeptide

SEQ ID NO: 15382 - protein, 423 aa, Artificial Sequence
  Synthetic polypeptide
SPRANSCPPSSMASCAEPSEPSAPLPAGVPPLEDFEVLDGVEDAEGEEEEEEEEEEEDDLSELPPLEDMGQPPAEEAEQPGALAREFLAAMEPEPAPAPAPEEWLDILGNGLLRKKTLVPGPPGSSRPVKGQVVTVHLQTSLENGTRVQEEPELVFTLGDCDVIQALDLSVPLMDVGETAMVTADSKYCYGPQGRSPYIPPHAALCLEVTLKTAVDGPDLEMLTGQERVALANRKRECGNAHYQRADFVLAANSYDLAIKAITSSAKVDMTFEEEAQLLQLKVKCLNNLAASQLKLDHYRAALRSCSLVLEHQPDNIKALFRKGKVLAQQGEYSEAIPILRAALKLEPSNKTIHAELSKLVKKHAAQRSTETALYRKMLGNPSRLPAKCPGKGAWSIPWKWLFGATAVALGGVALSVVIAARN

SEQ ID NO: 15383 - protein, 59 aa, Artificial Sequence
  Synthetic polypeptide
APGPIPVPPAAWHRVLNPLSPLPHCPPGSHRSRTSRYWMGLRMQRVRRKRRRKRRKRMT

SEQ ID NO: 15384 - protein, 15 aa, Artificial Sequence
  Synthetic polypeptide
PQGQFLSPQQHGIVC

SEQ ID NO: 15385 - protein, 7 aa, Artificial Sequence
  Synthetic polypeptide
PGPQRSH

SEQ ID NO: 15386 - protein, 50 aa, Artificial Sequence
  Synthetic polypeptide
CWEWWRAPVIPATLEAEVGGSIEPWRLCHSSSLDHREATEERPGEGQALL

SEQ ID NO: 15387 - protein, 40 aa, Artificial Sequence
  Synthetic polypeptide
SQLLWRLRWEDPLSLGGCATALAWTTEKPLRNGLVKDKRF

SEQ ID NO: 15388 - protein, 32 aa, Artificial Sequence
  Synthetic polypeptide
DRAQWLAPVIPALWEAKVPQCGHPCALPARYQ

SEQ ID NO: 15389 - protein, 32 aa, Artificial Sequence; identical to SEQ ID NO: 15388
  Synthetic polypeptide

SEQ ID NO: 15390 - protein, 32 aa, Artificial Sequence; identical to SEQ ID NO: 15388
  Synthetic polypeptide

SEQ ID NO: 15391 - protein, 32 aa, Artificial Sequence; identical to SEQ ID NO: 15388
  Synthetic polypeptide

SEQ ID NO: 15392 - protein, 161 aa, Artificial Sequence
  Synthetic polypeptide
SQHFGRPRYHNVGILVLFLHDISDVQLEFTKLNIYFKSRGGSYHRLHALAADLGCLSFGFSWFWFRLYWFPLKVLYATSHCSLRTVPDIPFYFFFNALLLLLTLMNLYWFLYIVAFAAKVLTGQVHELKDLREYDTAEAQSLKPSKAEKPLRNGLVKDKRF

SEQ ID NO: 15393 - protein, 113 aa, Artificial Sequence
  Synthetic polypeptide
PGTVARACNPSTLGGQGTTMWASLCSSCTISVTCSLSSPSSTFTSSPAAAPTIGCMPWQQTWAASASASAGSGSASTGSRSRSCMPPVTAVCARCLTSPSTSSSMRSCCCSPL

SEQ ID NO: 15394 - protein, 113 aa, Artificial Sequence; identical to SEQ ID NO: 15393
  Synthetic polypeptide

SEQ ID NO: 15395 - protein, 113 aa, Artificial Sequence; identical to SEQ ID NO: 15393
  Synthetic polypeptide

SEQ ID NO: 15396 - protein, 113 aa, Artificial Sequence; identical to SEQ ID NO: 15393
  Synthetic polypeptide

SEQ ID NO: 15397 - protein, 148 aa, Artificial Sequence
  Synthetic polypeptide
SQHFGRPRYHNVGILVLFLHDISDVQLEFTKLNIYFKSRGGSYHRLHALAADLGCLSFGFSWFWFRLYWFPLKVLYATSHCSLRTVPDIPFYFFFNALLLLLTLMNLYWFLYIVAFAAKVLTGQVHELKDLREYDTAEAQSLKPSKAE

SEQ ID NO: 15398 - protein, 148 aa, Artificial Sequence; identical to SEQ ID NO: 15397
  Synthetic polypeptide

SEQ ID NO: 15399 - protein, 174 aa, Artificial Sequence
  Synthetic polypeptide
SQHFGRPRYHNVGILVLFLHDISDVQLEFTKLNIYFKSRGGSYHRLHALAADLGCLSFGFSWFWFRLYWFPLKVLYATSHCSLRTVPDIPFYFFFNALLLLLTLMNLYWFLYIVAFAAKVLTGQVHELKDLREYDTAEAQSLKPSKAEEAVAQSSVTFFGTGGARCRHLTHPGL

SEQ ID NO: 15400 - protein, 138 aa, Artificial Sequence
  Synthetic polypeptide
GWSQWLTPVIPALREAEAGGSCEGGEKLQDAYYIFQEMADKCSPTLLLLNGQAACHMAQGRWEAAEGLLQEALDKDSGYPETLVNLIVLSQHLGKPPEVTNRYLSQLKDAHRSHPFIKEYQAKENDFDRLVLQYAPSA

SEQ ID NO: 15401 - protein, 138 aa, Artificial Sequence; identical to SEQ ID NO: 15400
  Synthetic polypeptide

SEQ ID NO: 15402 - protein, 138 aa, Artificial Sequence; identical to SEQ ID NO: 15400
  Synthetic polypeptide

SEQ ID NO: 15403 - protein, 63 aa, Artificial Sequence
  Synthetic polypeptide
SQHFGRPRRVDHVRVVRSCRMPTTSSRRWLTSARPPCCCSMGRRPATWPRAAGRPLRACCRRR

SEQ ID NO: 15404 - protein, 63 aa, Artificial Sequence; identical to SEQ ID NO: 15403
  Synthetic polypeptide

SEQ ID NO: 15405 - protein, 63 aa, Artificial Sequence; identical to SEQ ID NO: 15403
  Synthetic polypeptide

SEQ ID NO: 15406 - protein, 63 aa, Artificial Sequence; identical to SEQ ID NO: 15403
  Synthetic polypeptide

SEQ ID NO: 15407 - protein, 73 aa, Artificial Sequence
  Synthetic polypeptide
GWSQWLTPVIPALREAEAGGSCEGGEKLQDAYYIFQEMADKCSPTLLLLNGQAACHMAQGRWEAAEGLLQEAL

SEQ ID NO: 15408 - protein, 174 aa, Artificial Sequence
  Synthetic polypeptide
GQVQWFMPAIPALLEAKQFENWRENQPDNFFAGGEDCVVMVAHESGRWNDVPCNYNLPYVCKKGTVLCGPPPAVENASLIGARKAKYNVHATVRYQCNEGFAQHHVATIRCRSNGKWDRPQIVCTKPRRSHRMRRHHHHHQHHHQHHHHKSRKERRKHKKHPTEDWEKDEGNFC

SEQ ID NO: 15409 - protein, 174 aa, Artificial Sequence; identical to SEQ ID NO: 15408
  Synthetic polypeptide

SEQ ID NO: 15410 - protein, 38 aa, Artificial Sequence
  Synthetic polypeptide
ARCSGSCLQSQHFWRPSNLRTGERTSRTISSRVARTVW

SEQ ID NO: 15411 - protein, 38 aa, Artificial Sequence; identical to SEQ ID NO: 15410
  Synthetic polypeptide

SEQ ID NO: 15412 - protein, 38 aa, Artificial Sequence; identical to SEQ ID NO: 15410
  Synthetic polypeptide

SEQ ID NO: 15413 - protein, 18 aa, Artificial Sequence
  Synthetic polypeptide
PGAVVHACNPSTFGGQAI

SEQ ID NO: 15414 - protein, 18 aa, Artificial Sequence
  Synthetic polypeptide
PGAVVHACNPSTFGGQAI

SEQ ID NO: 15415 - protein, 18 aa, Artificial Sequence
  Synthetic polypeptide
PGAVVHACNPSTFGGQAI

SEQ ID NO: 15416 - protein, 113 aa, Artificial Sequence
  Synthetic polypeptide
GQVQWFMPAIPALLEAKQFENWRENQPDNFFAGGEDCVVMVAHESGRWNDVPCNYNLPYVCKKGTARRSHRMRRHHHHHQHHHQHHHHKSRKERRKHKKHPTEDWEKDEGNFC

SEQ ID NO: 15417 - protein, 548 aa, Artificial Sequence
  Synthetic polypeptide
QNILLGPKTLTSLGPLQFRDVAIEFSLEEWHCLDTAQRNLYRNVMLENYRNLVFLGIVVSKPDLITCLEQGKKPLTMKKHEMVANPSVTCSHFARDLWPEQSIKDSFQKVTLRRYENYGHDNLQFKKGCESVDECKVHKRGYNGLNQYLTTTQSKIFQCDKYVKVIHKFSNSNRHKIRHTGKKPFKCIECGKAFNQSSTLTTHKKIHTGEKPFKCEECGKAFNWSSHLTTHKRIHTGEKRYKCEDCGKAFSRFSYLTAHKIIHSGEKPYKCEECGKAFKRSSNLTTHKIIHTGEKPYKCEECGKAFKRSSILTAHKIIHSGEKPYKCEECGKAFKHPSVLTTHKRIHTGEKPYKCEECGRAFKYFSSLTTHKIIHSGEKPYKCEECGKAFNWSSHLTTHKRIHTGEKPYKCEECGEAFKYSSSLTTHKIIHTGQQPFKCEECGKAFKCFSILTTHKRIHTGEKPYKCEECGKAFNSSSHLTAHKRIHTGEKPYKCERCGKAFKRSFILTRHKRIHTGEKPYKCEECGKGFKCPSTLTTHKVIHTGEKL

SEQ ID NO: 15418 - protein, 12 aa, Artificial Sequence
  Synthetic polypeptide
HHWGHCNLETWP

SEQ ID NO: 15419 - protein, 12 aa, Artificial Sequence
  Synthetic polypeptide
HHWGHCNLETWP

SEQ ID NO: 15420 - protein, 12 aa, Artificial Sequence
  Synthetic polypeptide
HHWGHCNLETWP

SEQ ID NO: 15421 - protein, 17 aa, Artificial Sequence
  Synthetic polypeptide
KYPSWAKNIDIIGAIAI

SEQ ID NO: 15422 - protein, 17 aa, Artificial Sequence
  Synthetic polypeptide
KYPSWAKNIDIIGAIAI

SEQ ID NO: 15423 - protein, 17 aa, Artificial Sequence
  Synthetic polypeptide
KYPSWAKNIDIIGAIAI

SEQ ID NO: 15424 - protein, 23 aa, Artificial Sequence
  Synthetic polypeptide
QNILLGPKTLTSLGPLQFRDVAI

SEQ ID NO: 15425 - protein, 143 aa, Artificial Sequence
  Synthetic polypeptide
QNILLGPKTLTSLGPLQFRDVAIEFSLEEWHCLDTAQRNLYRNVMLENYRNLVFLGIVVSKPDLITCLEQGKKPLTMKKHEMVANPSETGFHHVGKGGLKLLTSDDLPASASQSTGITGMRHPARPNCVGFYVGRTDHKLWLR

SEQ ID NO: 15426 - protein, 1206 aa, Artificial Sequence
  Synthetic polypeptide
GRAQWLMPVILALWEAEASRSPEAKYISQCIDEIKQELKQDNIAVKANAVCKLTYLQMLGYDISWAAFNIIEVMSASKFTFKRIGYLAASQSFHEGTDVIMLTTNQIRKDLSSPSQYDTGVALTGLSCFVTPDLARDLANDIMTLMSHTKPYIRKKAVLIMYKVFLKYPESLRPAFPRLKEKLEDPDPGVQSAAVNVICELARRNPKNYLSLAPLFFKLMTSSTNNWVLIKIIKLFGALTPLEPRLGKKLIEPLTNLIHSTSAMSLLYECVNTVIAVLISLSSGMPNHSASIQLCVQKLRILIEDSDQNLKYLGLLAMSKILKTHPKSVQSHKDLILQCLDDKDESIRLRALDLLYGMVSKKNLMEIVKKLMTHVDKAEGTTYRDELLTKIIDICSQSNYQYITNFEWYISILVELTRLEGTRHGHLIAAQMLDVAIRVKAIRKFAVSQMSALLDSAHLLASSTQRNGICEVLYAAAWICGEFSEHLQEPHHTLEAMLRPRVTTLPGHIQAVYVQNVVKLYASILQQKEQAGEAEGAQAVTQLMVDRLPQFVQSADLEVQERASCILQLVKHIQKLQAKDVPVAEEVSALFAGELNPVAPKAQKKVPVPEGLDLDAWINEPLSDSESEDERPRAVFHEEEQRRPKHRPSEADEEELARRREARKQEQANNPFYIKSSPSPQKRYQDTPGVEHIPVVQIDLSVPLKVPGLPMSDQYVKLEEERRHRQKLEKDKRRKKRKEKEKKGKRRHSSLPTESDEDIAPAQQVDIVTEEMPENALPSDEDDKDPNDPYRALDIDLDKPLADSEKLPIQKHRNTETSKSPEKDVPMVEKKSKKPKKKEKKHKEKERDKEKKKEKEKKAEDLDFWLSTTPPPAPAPAPAPVPSTGELSVNTVTTPKDECEDAKTEAQGEEDDAEGQDQDKKSPKPKKKKHRKEKEERTKGKKKSKKQPPGSEEAAGEPVQNGAPEEEQLPPESSYSLLAENSYVKMTCDIRGSLQEDSQVTVAIVLENRSSSILKGMELSVLDSLNARMARPQGSSVHDGVPVPFQLPPGVSNEAQYVFTIQSIVMAQKLKGTLSFIAKNDEGATHEKLDFRLHFSCSSYLITTPCYSDAFAKLLESGDLSMSSIKVDGIRMSFQNLLAKICFHHHFSVVERVDSCASMYSRSIQGHHVCLLVKKGENSVSVDGKCSDSTLLSNLLEEMKATLAKC

SEQ ID NO: 15427 - protein, 37 aa, Artificial Sequence
  Synthetic polypeptide
AGRSGSCLLSWHFGRLRRADHLRQNTYLSALMRSSRS

SEQ ID NO: 15428 - protein, 37 aa, Artificial Sequence; identical to SEQ ID NO: 15427
  Synthetic polypeptide

SEQ ID NO: 15429 - protein, 37 aa, Artificial Sequence; identical to SEQ ID NO: 15427
  Synthetic polypeptide

SEQ ID NO: 15430 - protein, 37 aa, Artificial Sequence; identical to SEQ ID NO: 15427
  Synthetic polypeptide

SEQ ID NO: 15431 - protein, 1103 aa, Artificial Sequence
  Synthetic polypeptide
GRAQWLMPVILALWEAEASRSPEAKYISQCIDEIKQELKQDNIAVKANAVCKLTYLQMLGYDISWAAFNIIEVMSASKFTFKRIGYLAASQSFHEGTDVIMLTTNQIRKDLSSPSQYDTGVALTGLSCFVTPDLARDLANDIMTLMSHTKPYIRKKAKLIEPLTNLIHSTSAMSLLYECVNTVIAVLISLSSGMPNHSASIQLCVQKLRILIEDSDQNLKYLGLLAMSKILKTHPKSVQSHKDLILQCLDDKDESIRLRALDLLYGMVSKKNLMEIVKKLMTHVDKAEGTTYRDELLTKIIDICSQSNYQYITNFEWYISILVELTRLEGTRHGHLIAAQMLDVAIRVKAIRKFAVSQMSALLDSAHLLASSTQRNGICEVLYAAAWICGEFSEHLQEPHHTLEAMLRPRVTTLPGHIQAVYVQNVVKLYASILQQKEQAGEAEGAQAVTQLMVDRLPQFVQSADLEVQERASCILQLVKHIQKLQAKDVPVAEEVSALFAGELNPVAPKAQKKVPVPEGLDLDAWINEPLSDSESEDERPRAVFHEEEQRRPKHRPSEADEEELARRREARKQEQANNPFYIKSSPSPQKRYQDTPGVEHIPVVQIDLSVPLKVPGLPMSDQYVKLEEERRHRQKLEKDKRRKKRKEKEKKGKRRHSSLPTESDEDIAPAQQVDIVTEEMPENALPSDEDDKDPNDPYRALDIDLDKPLADSEKLPIQKHRNTETSKSPEKDVPMVEKKSKKPKKKEKKHKEKERDKEKKKEKEKKAEDLDFWLSTTPPPAPAPAPAPVPSTDECEDAKTEAQGEEDDAEGQDQDKKSPKPKKKKHRKEKEERTKGKKKSKKQPPGSEEAAGEPVQNGAPEEEQLPPESSYSLLAENSYVKMTCDIRGSLQEDSQVTVAIVLENRSSSILKGMELSVLDSLNARMARPQGSSVHDGVPVPFQLPPGVSNEAQYVFTIQSIVMAQKLKGTLSFIAKNDEGATHEKLDFRLHFSCSSYLITTPCYSDAFAKLLESGDLSMSSIKVDGIRMSFQNLLAKICFHHHFSVVERVDSCASMYSRSIQGHHVCLLVKKGENSVSVDGKCSDSTLLSNLLEEMKATLAKC

SEQ ID NO: 15432 - protein, 975 aa, Artificial Sequence
  Synthetic polypeptide
GRAQWLMPVILALWEAEASRSPEAKYISQCIDEIKQELKQDNIAVKANAVCKLTYLQMLGYDISWAAFNIIEVMSASKFTFKRIGYLAASQSFHEGTDVIMLTTNQILLISLSSGMPNHSASIQLCVQKLRILIEDSDQNLKYLGLLAMSKILKTHPKSVQSHKDLILQCLDDKDESIRLRALDLLYGMVSKKNLMEIVKKLMTHVDKAEGTTYRDELLTKIIDICSQSNYQYITNFEWYISILVELTRLEGTRHGHLIAAQMLDVAIRVKAIRKFAVSQMSALLDSAHLLASSTQRNGICEVLYAAAWICGEFSEHLQEPHHTLEAMLRPRVTTLPGHIQAVYVQNVVKLYASILQQKEQAGEAEGAQAVTQLMVDRLPQFVQSADLEVQERASCILQLVKHIQKLQAKDVPVAEEVSALFAGELNPVAPKAQKKVPVPEGLDLDAWINEPLSDSESEDERPRAVFHEEEQRRPKHRPSEADEEELARRREARKQEQANNPFYIKSSPSPQKRYQDTPGVEHIPVVQIDLSVPLKVPGLPMSDQYVKLEEERRHRQKLEKDKRRKKRKEKEKKGKRRHSSLPTESDEDIAPAQQVDIVTEEMPENALPSDEDDKDPNDPYRALDIDLDKPLADSEKLPIQKHRNTETSKSPEKDVPMVEKKSKKPKKKEKKHKEKERDKEKKKEKEKKKSPKPKKKKHRKEKEERTKGKKKSKKQPPGSEEAAGEPVQNGAPEEEQLPPESSYSLLAENSYVKMTCDIRGSLQEDSQVTVAIVLENRSSSILKGMELSVLDSLNARMARPQGSSVHDGVPVPFQLPPGVSNEAQYVFTIQSIVMAQKLKGTLSFIAKNDEGATHEKLDFRLHFSCSSYLITTPCYSDAFAKLLESGDLSMSSIKVDGIRMSFQNLLAKICFHHHFSVVERVDSCASMYSRSIQGHHVCLLVKKGENSVSVDGKCSDSTLLSNLLEEMKATLAKC

SEQ ID NO: 15433 - protein, 1144 aa, Artificial Sequence
  Synthetic polypeptide
GRAQWLMPVILALWEAEASRSPEAKYISQCIDEIKQELKQDNIAVKANAVCKLTYLQMLGYDISWAAFNIIEVMSASKFTFKRIGYLAASQSFHEGTDVIMLTTNQIRKDLSSPSQYDTGVALTGLSCFVTPDLARDLANDIMTLMSHTKPYIRKKAVLIMYKVFLKYPESLRPAFPRLKEKLEDPDPGVQSAAVNVICELARRNPKNYLSLAPLFFKLMTSSTNNWVLIKIIKLFGALTPLEPRLGKKLIEPLTNLIHSTSAMSLLYECVNTVIAVLISLSSGMPNHSASIQLCVQKLRILIEDSDQNLKYLGLLAMSKILKTHPKSVQSHKDLILQCLDDKDESIRLRALDLLYGMVSKKNLMEIVKKLMTHVDKAEGTTYRDELLTKIIDICSQSNYQYITNFEWYISILVELTRLEGTRHGHLIAAQMLDVAIRVKAIRKFAVSQMSALLDSAHLLASSTQRNGICEVLYAAAWICGEFSEHLQEPHHTLEAMLRPRVTTLPGHIQAVYVQNVVKLYASILQQKEQAGEAEGAQAVTQLMVDRLPQFVQSADLEVQERASCILQLVKHIQKLQAKDVPVAEEVSALFAGELNPVAPKAQKKVPVPEGLDLDAWINEPLSDSESEDERPRAVFHEEEQRRPKHRPSEADEEELARRREARKQEQANNPFYIKSSPSPQKRYQDTPGVEHIPVVQIDLSVPLKVPGLPMSDQYVKLEEERRHRQKLEKDKRRKKRKEKEKKGKRRHSSLPTESDEDIAPAQQVDIVTEEMPENALPSDEDDKDPNDPYRALDIDLDKPLADSEKLPIQKHRNTETSKSPEKDVPMVEKKSKKPKKKEKKHKEKERDKEKKKEKEKKKSPKPKKKKHRKEKEERTKGKKKSKKQPPGSEEAAGEPVQNGAPEEEQLPPESSYSLLAENSYVKMTCDIRGSLQEDSQVTVAIVLENRSSSILKGMELSVLDSLNARMARPQGSSVHDGVPVPFQLPPGVSNEAQYVFTIQSIVMAQKLKGTLSFIAKNDEGATHEKLDFRLHFSCSSYLITTPCYSDAFAKLLESGDLSMSSIKVDGIRMSFQNLLAKICFHHHFSVVERVDSCASMYSRSIQGHHVCLLVKKGENSVSVDGKCSDSTLLSNLLEEMKATLAKC

SEQ ID NO: 15434 - protein, 46 aa, Artificial Sequence
  Synthetic polypeptide
PYLSCRIALRMNEAAVFRHLVPGVYCLGVRCRGPEPCRTCYCYYWT

SEQ ID NO: 15435 - protein, 98 aa, Artificial Sequence
  Synthetic polypeptide
CLAYTALGCGAGVQSHVGPVTVTTGPDSVTAADAAGLCRVLRAVGWGGSECRLTPHPYKFHVEPYGETGWLLTRAAASPPNSAPSLSTRTTLHGSVDI

SEQ ID NO: 15436 - protein, 127 aa, Artificial Sequence
  Synthetic polypeptide
SSCVSTLSAWRILPWGAVQGSRAMSDLLLLLLDLTLLLLLMLLGFAGYSGQLAGVAVSAGSPPIPTSSMWSPMVRLGGFSPELQHLPQTLLHRCPLGQPCMGVLTFRDVALEFSLEEWQCLDTAQQN

SEQ ID NO: 15437 - protein, 54 aa, Artificial Sequence
  Synthetic polypeptide
TMAKSLPSLDLSFSSCKMAVCAGTTLLEVGTAAATHSPVLPGGLCPLRGLHPRV

SEQ ID NO: 15438 - protein, 54 aa, Artificial Sequence; identical to SEQ ID NO: 15437
  Synthetic polypeptide

SEQ ID NO: 15439 - protein, 54 aa, Artificial Sequence; identical to SEQ ID NO: 15437
  Synthetic polypeptide

SEQ ID NO: 15440 - protein, 54 aa, Artificial Sequence; identical to SEQ ID NO: 15437
  Synthetic polypeptide

SEQ ID NO: 15441 - protein, 126 aa, Artificial Sequence
  Synthetic polypeptide
PWLNHSLPWTSVFPAVKWLYVQARLCWKWARLLRPTVQFFLVAFALYVGYTRVSDYKHHWSDVLVGLLQGALVAALTVCYISDFFKARPPQHCLKEEELERKPSLSLTLTLGEADHNHYGYPHSSS

SEQ ID NO: 15442 - protein, 126 aa, Artificial Sequence; identical to SEQ ID NO: 15441
  Synthetic polypeptide

SEQ ID NO: 15443 - protein, 126 aa, Artificial Sequence; identical to SEQ ID NO: 15441
  Synthetic polypeptide

SEQ ID NO: 15444 - protein, 77 aa, Artificial Sequence
  Synthetic polypeptide
NGCMCRHDSVGSGHGCCDPQSSSSWWPLPSTWATPACLITNTTGAMSLLASCRGHWWLPSLSATSQTSSKPDPHSTV

SEQ ID NO: 15445 - protein, 77 aa, Artificial Sequence; identical to SEQ ID NO: 15444
  Synthetic polypeptide

SEQ ID NO: 15446 - protein, 77 aa, Artificial Sequence; identical to SEQ ID NO: 15444
  Synthetic polypeptide

SEQ ID NO: 15447 - protein, 80 aa, Artificial Sequence
  Synthetic polypeptide
PWLNHSLPWTSVFPAVKWLYVQARLCWKWARLLRPTVQFFLVAFALYVGYTRVSDYKHHWSDVLVGLLQGALVAALTVSF

SEQ ID NO: 15448 - protein, 61 aa, Artificial Sequence
  Synthetic polypeptide
NGCMCRHDSVGSGHGCCDPQSSSSWWPLPSTWATPACLITNTTGAMSLLASCRGHWWLPSL

SEQ ID NO: 15449 - protein, 525 aa, Artificial Sequence
  Synthetic polypeptide
GRAWWLTPVIPALWEAEANGSLEDQPSEPPSPATTPCGKVPICIPARRDLVDSPASLASSLGSPLPRAKELILNDLPASTPASKSCDSSPPQDASTPGPSSASHLCQLAAKPAPSTDSVALRSPLTLSSPFTTSFSLGSHSTLNGDLSVPSSYVSLHLSPQVSSSVVYGRSPVMAFESHPHLRGSSVSSSLPSIPGGKPAYSFHVSADGQMQPVPFPSDALVGAGIPRHARQLHTLAHGEVVCAVTISGSTQHVYTGGKGCVKVWDVGQPGAKTPVAQLDCLNRDNYIRSCKLLPDGRSLIVGGEASTLSIWDLAAPTPRIKAELTSSAPACYALAVSPDAKVCFSCCSDGNIVVWDLQNQTMVRQFQGHTDGASCIDISDYGTRLWTGGLDNTVRCWDLREGRQLQQHDFSSQIFSLGHCPNQDWLAVGMESSNVEILHVRKPEKYQLHLHESCVLSLKFASCGRWFVSTGKDNLLNAWRTPYGASIFQSKESSSVLSCDISRNNKYIVTGSGDKKATVYEVVY

SEQ ID NO: 15450 - protein, 525 aa, Artificial Sequence; identical to SEQ ID NO: 15449
  Synthetic polypeptide

SEQ ID NO: 15451 - protein, 525 aa, Artificial Sequence; identical to SEQ ID NO: 15449
  Synthetic polypeptide

SEQ ID NO: 15452 - protein, 525 aa, Artificial Sequence; identical to SEQ ID NO: 15449
  Synthetic polypeptide

SEQ ID NO: 15453 - protein, 63 aa, Artificial Sequence
  Synthetic polypeptide
SQHFGRLRRMDHLRTNPQSPPARLPPPAERYPSAFLPVGTWWTVQPPWPLALAHRCLEPRSSS

SEQ ID NO: 15454 - protein, 63 aa, Artificial Sequence; identical to SEQ ID NO: 15453
  Synthetic polypeptide

SEQ ID NO: 15455 - protein, 63 aa, Artificial Sequence; identical to SEQ ID NO: 15453
  Synthetic polypeptide

SEQ ID NO: 15456 - protein, 63 aa, Artificial Sequence; identical to SEQ ID NO: 15453
  Synthetic polypeptide

SEQ ID NO: 15457 - protein, 63 aa, Artificial Sequence; identical to SEQ ID NO: 15453
  Synthetic polypeptide

SEQ ID NO: 15458 - protein, 63 aa, Artificial Sequence; identical to SEQ ID NO: 15453
  Synthetic polypeptide

SEQ ID NO: 15459 - protein, 474 aa, Artificial Sequence
  Synthetic polypeptide
GRAWWLTPVIPALWEAEANGSLEDQPSEPPSPATTPCGKVPICIPARRDLVDSPASLASSLGSPLPRAKELILNDLPASTPASKSCDSSPPQDASTPGPSSASHLCQLAAKPAPSTDSVALRSPLTLSSPFTTSFSLGSHSTLNGDLSVPSSYVSLHLSPQVSSSVVYGRSPVMAFESHPHLRGSSVSSSLPSIPGGKPAYSFHVSADGQMQPVPFPSDALVGAGIPRHARQLHTLAHGEVVCAVTISGSTQHVYTGGKGCVKVWDVGQPGAKTPVAQLDCLNRDNYIRSCKLLPDGRSLIVGGEASTLSIWDLAAPTPRIKAELTSSAPACYALAVSPDAKVCFSCCSDGNIVVWDLQNQTMVRQFQGHTDGASCIDISDYGTRLWTGGLDNTVRCWDLREGRQLQQHDFSSQIFSLGHCPNQDWLAVGMESSNVEILHVRKPEKYQLHLHESCVLSLKFASCVQGVVLSPEL

SEQ ID NO: 15460 - protein, 474 aa, Artificial Sequence; identical to SEQ ID NO: 15459
  Synthetic polypeptide

SEQ ID NO: 15461 - protein, 32 aa, Artificial Sequence
  Synthetic polypeptide
GRAWWLTPVIPALWEAEANGSLEDQPSEPPSP

SEQ ID NO: 15462 - protein, 23 aa, Artificial Sequence
  Synthetic polypeptide
SQHFGRLRRMDHLRTNPQSPPAR

SEQ ID NO: 15463 - protein, 112 aa, Artificial Sequence
  Synthetic polypeptide
QLALEPHGFELHGSLIHGFPSISATPRQEDQPLLFLLSLLNVKMMRTKTFRMIHFHLMNSLLAGEAESSRGLLPRAQPVPRGAGLADNSSGVHGLWRPSVQPRRDPVTELQC

SEQ ID NO: 15464 - protein, 543 aa, Artificial Sequence
  Synthetic polypeptide
IASSLGRQSPRVVSCLEHSLCPGEPGLQTTAVVSMGSGDHQFNLAEILSQNYSVRGECEEASRCPDKPKEELEKDFISQSNDMPFDELLALYGYEASDPISDRESEGGDVAPNLPDMTLDKEQIAKDLLSGEEEEETQSSADDLTPSVTSHEASDLFPNRSGSRFLADEDREPGSSASSDTEEDSLPANKCKKEIMVGPQFQADLSNLHLNRHCEKIYENEDQLLWDPSVLPEREVEEFLYRAVKRRWHEMAGPQLPEGEAVKDSEQALYELVKCNFNVEEALRRLRFNVKVIRDGLCAWSEEECRNFEHGFRVHGKNFHLIQANKVRTRSVGECVEYYYLWKKSERYDYFAQQTRLGRRKYVPSGTTDADQDLDGSDPDGPGRPRPEQDTLTGMRTDPLSVDGTAGGLDEPGVASDGLPSSEPGPCSFQQLDESPAVPLSHRPPALADPASYQPAVTAPEPDASPRLAVDFALPKELPLISSHVDLSGDPEETVAPAQVALSVTEFGLIGIGDVNPFLAAHPTCPAPGLHSEPLSHCNVMTC

SEQ ID NO: 15465 - protein, 70 aa, Artificial Sequence
  Synthetic polypeptide
LDVVGCGGRHRLRPAVLPLHLQPLPGLWGGHARVGCPPLLRPVHRDLPVWLGLHTDLPPQPHPGARHQRP

SEQ ID NO: 15466 - protein, 70 aa, Artificial Sequence; identical to SEQ ID NO: 15465
  Synthetic polypeptide

SEQ ID NO: 15467 - protein, 70 aa, Artificial Sequence; identical to SEQ ID NO: 15465
  Synthetic polypeptide

SEQ ID NO: 15468 - protein, 70 aa, Artificial Sequence; identical to SEQ ID NO: 15465
  Synthetic polypeptide

SEQ ID NO: 15469 - protein, 70 aa, Artificial Sequence; identical to SEQ ID NO: 15465
  Synthetic polypeptide

SEQ ID NO: 15470 - protein, 393 aa, Artificial Sequence
  Synthetic polypeptide
NPIPTKNTNISWMWWDVAAGTVCVLLSFPFIFSPCLGCGAATPEWAALLYYGPFIVIFQFGWASTQISHLSLIPELVTNDHEKVELTALRYAFTVVANITVYGAAWLLLHLQGSSRVEPTQDISISDQLGGQDVPVFRNLSLLVVGVGAVFSLLFHLGTRERRRPHAEEPGEHTPLLAPATAQPLLLWKHWLREPAFYQVGILYMTTRLIVNLSQTYMAMYLTYSLHLPKKFIATIPLVMYLSGFLSSFLMKPINKCIGRNMTYFSGLLVILAFAAWVALAEGLGVAVYAAAVLLGAGCATILVTSLAMTADLIGPHTNSGAFVYGSMSFLDKVANGLAVMAIQSLHPCPSELCCRACVSFYHWAMVAVTGGVGVAAALCLCSLLLWPTRLRR

SEQ ID NO: 15471 - protein, 81 aa, Artificial Sequence
  Synthetic polypeptide
SEHFGRPRQEDHLRLGVRLQPGQRGETPSLPKIQTLAGCGGMWRQAPSASCCPSPSSSAPAWAVGRPRPSGLPSSTTARSS

SEQ ID NO: 15472 - protein, 81 aa, Artificial Sequence; identical to SEQ ID NO: 15471
  Synthetic polypeptide

SEQ ID NO: 15473 - protein, 81 aa, Artificial Sequence; identical to SEQ ID NO: 15471
  Synthetic polypeptide

SEQ ID NO: 15474 - protein, 81 aa, Artificial Sequence; identical to SEQ ID NO: 15471
  Synthetic polypeptide

SEQ ID NO: 15475 - protein, 81 aa, Artificial Sequence; identical to SEQ ID NO: 15471
  Synthetic polypeptide

SEQ ID NO: 15476 - protein, 458 aa, Artificial Sequence
  Synthetic polypeptide
NPIPTKNTNISWMWWDVAAGTVCVLLSFPFIFSPCLGCGAATPEWAALLYYGPFIVIFQFGWASTQISHLSLIPELVTNDHEKVELTALRYAFTVVANITVYGAAWLLLHLQGSSRVEPTQDISISDQLGGQDVPVFRNLSLLVVGVGAVFSLLFHLGTRERRRPHAEEPGEHTPLLAPATAQPLLLWKHWLREPAFYQVGILYMTTRLIVNLSQTYMAMYLTYSLHLPKKFIATIPLVMYLSGFLSSFLMKPINKCIGRNMTYFSGLLVILAFAAWVALAEGLGVAVYAAAVLLGAGCATILVTSLAMTADLIGPHTNSGAFVYGSMSFLDKVANGLAVMAIQSLHPCPSELCCRACVSFYHWAMVAVTGGVGVAAALCLCSLLLWPTRLRRSFLAWRRGRGEDKGPGYSWIPTVLVQPPRPTSPFLWEAPLAWRCTRKKWSGAGTKPWPREDWGTH

SEQ ID NO: 15477 - protein, 400 aa, Artificial Sequence
  Synthetic polypeptide
NPIPTKNTNISWMWWDVAAGTVCVLLSFPFIFSPCLGCGAATPEWAALLYYGPFIVIFQFGWASTQISHLSLIPELVTNDHEKVELTALRYAFTVVANITVYGAAWLLLHLQGSSRVEPTQDISISDQLGGQDVPVFRNLSLLVVGVGAVFSLLFHLGTRERRRPHAEEPGEHTPLLAPATAQPLLLWKHWLREPAFYQVGILYMTTRLIVNLSQTYMAMYLTYSLHLPKKFIATIPLVMYLSGFLSSFLMKPINKCIGRNMTYFSGLLVILAFAAWVALAEGLGVAVYAAAVLLGAGCATILVTSLAMTADLIGPHTNSGAFVYGSMSFLDKVANGLAVMAIQSLHPCPSELCCRACVSFYHWAMVAVTGGVGVAAALCLCSLLLWPTRLRRWDRDARP

SEQ ID NO: 15478 - protein, 400 aa, Artificial Sequence; identical to SEQ ID NO: 15477
  Synthetic polypeptide

SEQ ID NO: 15479 - protein, 81 aa, Artificial Sequence
  Synthetic polypeptide
NPIPTKNTNISWMWWDVAAGTVCVLLSFPFIFSPCLGCGAATPEWAALLYYGPFIVIFQFGWASTQISHLSLIPELVTNDH

SEQ ID NO: 15480 - protein, 78 aa, Artificial Sequence
  Synthetic polypeptide
QYIIYLNIAKRYFKCSHHTQRDSISRTPRWRLCGIVSWGTGCALAQKPGVYTKVSDFREWIFQAIKTHSEASGMVTQL

SEQ ID NO: 15481 - protein, 78 aa, Artificial Sequence; identical to SEQ ID NO: 15480
  Synthetic polypeptide

SEQ ID NO: 15482 - protein, 78 aa, Artificial Sequence; identical to SEQ ID NO: 15480
  Synthetic polypeptide

SEQ ID NO: 15483 - protein, 29 aa, Artificial Sequence
  Synthetic polypeptide
TLLKDILSVLTTHKGTASLGRHVGGCVAL

SEQ ID NO: 15484 - protein, 29 aa, Artificial Sequence
  Synthetic polypeptide
TLLKDILSVLTTHKGTASLGRHVGGCVAL

SEQ ID NO: 15485 - protein, 29 aa, Artificial Sequence
  Synthetic polypeptide
TLLKDILSVLTTHKGTASLGRHVGGCVAL

SEQ ID NO: 15486 - protein, 41 aa, Artificial Sequence
  Synthetic polypeptide
VFSPHTKGQHLSDATLAAVWHCELGHWLCPGPEARRLHQSQ

SEQ ID NO: 15487 - protein, 41 aa, Artificial Sequence; identical to SEQ ID NO: 15486
  Synthetic polypeptide

SEQ ID NO: 15488 - protein, 41 aa, Artificial Sequence; identical to SEQ ID NO: 15486
  Synthetic polypeptide

SEQ ID NO: 15489 - protein, 62 aa, Artificial Sequence
  Synthetic polypeptide
SYHWTQHFHSQDRRIHPACVPPSCRPGPGGWQDLYRDGLGQHAVLWPTGRGTPGGSSPHNQQ

SEQ ID NO: 15490 - protein, 62 aa, Artificial Sequence; identical to SEQ ID NO: 15489
  Synthetic polypeptide

SEQ ID NO: 15491 - protein, 62 aa, Artificial Sequence; identical to SEQ ID NO: 15489
  Synthetic polypeptide

SEQ ID NO: 15492 - protein, 177 aa, Artificial Sequence
  Synthetic polypeptide
CSQFGKFASISPRSIHKVTIGPNTSTPRTGEYIQPVCLPAAGQALVDGKICTVTGWGNTQYYGQQAGVLQEARVPIISNDVCNGADFYGNQIKPKMFCAGYPEGGIDACQGDSGGPFVCEDSISRTPRWRLCGIVSWGTGCALAQKPGVYTKVSDFREWIFQAIKTHSEASGMVTQL

SEQ ID NO: 15493 - protein, 177 aa, Artificial Sequence; identical to SEQ ID NO: 15492
  Synthetic polypeptide

SEQ ID NO: 15494 - protein, 177 aa, Artificial Sequence; identical to SEQ ID NO: 15492
  Synthetic polypeptide

SEQ ID NO: 15495 - protein, 52 aa, Artificial Sequence
  Synthetic polypeptide
AANLENLPAFPQEVYIKLPLDPTLPLPGQENTSSLCASQLPARPWWMARSVP

SEQ ID NO: 15496 - protein, 52 aa, Artificial Sequence; identical to SEQ ID NO: 15495
  Synthetic polypeptide

SEQ ID NO: 15497 - protein, 52 aa, Artificial Sequence; identical to SEQ ID NO: 15495
  Synthetic polypeptide

SEQ ID NO: 15498 - protein, 61 aa, Artificial Sequence
  Synthetic polypeptide
VSATMPSPPSDFPSPTPLIFLQTTYLCLTLHDRSCLLTGTASRLAGSSALGFCAPWASSSS

SEQ ID NO: 15499 - protein, 61 aa, Artificial Sequence; identical to SEQ ID NO: 15498
  Synthetic polypeptide

SEQ ID NO: 15500 - protein, 61 aa, Artificial Sequence; identical to SEQ ID NO: 15498
  Synthetic polypeptide

SEQ ID NO: 15501 - protein, 61 aa, Artificial Sequence; identical to SEQ ID NO: 15498
  Synthetic polypeptide

SEQ ID NO: 15502 - protein, 61 aa, Artificial Sequence; identical to SEQ ID NO: 15498
  Synthetic polypeptide

SEQ ID NO: 15503 - protein, 61 aa, Artificial Sequence; identical to SEQ ID NO: 15498
  Synthetic polypeptide

SEQ ID NO: 15504 - protein, 61 aa, Artificial Sequence; identical to SEQ ID NO: 15498
  Synthetic polypeptide

SEQ ID NO: 15505 - protein, 61 aa, Artificial Sequence; identical to SEQ ID NO: 15498
  Synthetic polypeptide

SEQ ID NO: 15506 - protein, 61 aa, Artificial Sequence; identical to SEQ ID NO: 15498
  Synthetic polypeptide

SEQ ID NO: 15507 - protein, 61 aa, Artificial Sequence; identical to SEQ ID NO: 15498
  Synthetic polypeptide

SEQ ID NO: 15508 - protein, 61 aa, Artificial Sequence; identical to SEQ ID NO: 15498
  Synthetic polypeptide

SEQ ID NO: 15509 - protein, 61 aa, Artificial Sequence; identical to SEQ ID NO: 15498
  Synthetic polypeptide

SEQ ID NO: 15510 - protein, 61 aa, Artificial Sequence; identical to SEQ ID NO: 15498
  Synthetic polypeptide

SEQ ID NO: 15511 - protein, 61 aa, Artificial Sequence; identical to SEQ ID NO: 15498
  Synthetic polypeptide

SEQ ID NO: 15512 - protein, 90 aa, Artificial Sequence
  Synthetic polypeptide
LSISHPTYFSSNHLSLPDPARQIVFADWHSLQVGGLICAGVLCAMGIIIVMSEWRSSGEQAGRGWGSPPLTTQLSPTGAKCKCKFGQKSG

SEQ ID NO: 15513 - protein, 90 aa, Artificial Sequence; identical to SEQ ID NO: 15512
  Synthetic polypeptide

SEQ ID NO: 15514 - protein, 81 aa, Artificial Sequence
  Synthetic polypeptide
LSISHPTYFSSNHLSLPDPARQIVFADWHSLQVGGLICAGVLCAMGIIIVMSAKCKCKFGQKSGHHPGETPPLITPGSAQS

SEQ ID NO: 15515 - protein, 81 aa, Artificial Sequence; identical to SEQ ID NO: 15514
  Synthetic polypeptide

SEQ ID NO: 15516 - protein, 81 aa, Artificial Sequence; identical to SEQ ID NO: 15514
  Synthetic polypeptide

SEQ ID NO: 15517 - protein, 81 aa, Artificial Sequence; identical to SEQ ID NO: 15514
  Synthetic polypeptide

SEQ ID NO: 15518 - protein, 81 aa, Artificial Sequence; identical to SEQ ID NO: 15514
  Synthetic polypeptide

SEQ ID NO: 15519 - protein, 81 aa, Artificial Sequence; identical to SEQ ID NO: 15514
  Synthetic polypeptide

SEQ ID NO: 15520 - protein, 81 aa, Artificial Sequence; identical to SEQ ID NO: 15514
  Synthetic polypeptide

SEQ ID NO: 15521 - protein, 81 aa, Artificial Sequence; identical to SEQ ID NO: 15514
  Synthetic polypeptide

SEQ ID NO: 15522 - protein, 81 aa, Artificial Sequence; identical to SEQ ID NO: 15514
  Synthetic polypeptide

SEQ ID NO: 15523 - protein, 107 aa, Artificial Sequence
  Synthetic polypeptide
LSISHPTYFSSNHLSLPDPARQIVFADWHSLQVGGLICAGVLCAMGIIIVMSEWRSSGEQAGRGWGSPPLTTQLSPTGAKCKCKFGQKSGHHPGETPPLITPGSAQS

SEQ ID NO: 15524 - protein, 107 aa, Artificial Sequence; identical to SEQ ID NO: 15523
  Synthetic polypeptide

SEQ ID NO: 15525 - protein, 64 aa, Artificial Sequence
  Synthetic polypeptide
LSISHPTYFSSNHLSLPDPARQIVFADWHSLQVGGLICAGVLCAMGIIIVMSAKCKCKFGQKSG

SEQ ID NO: 15526 - protein, 321 aa, Artificial Sequence
  Synthetic polypeptide
PRPGRAPAPRPRPRPRGLQAGAAMIPSGRGPGSKWRPPARGGPGASRPRPPASAAPPASGAAGHDKGPEAEEGVELQEGGDGPGAEEQTAVAITSVQQAAFGDHNIQYQFRTETNGGQAVIQNPFSNGGSPAAEAVSGEARFAYFPASSVGDTTAVSVQTTDQSLQAGGQFYVMMTPQDVLQTGTQRTIAPRTHPYSPKIDGTRTPRDERRRAQHNEVERRRRDKINNWIVQLSKIIPDCNADNSKTGASKGGILSKACDYIRELRQTNQRMQETFKEAERLQMDNELLRQQIEELKNENALLRAQLQQHNLEMVGEGTRQ

SEQ ID NO: 15527 - protein, 95 aa, Artificial Sequence
  Synthetic polypeptide
SRAAAGPAQNGGRRRGGDLAPPAPGPRPRRRPRPQARPATTRDPRRRRASSCRKAGTAQERRSRQRWPSPASSRRRSATTTSSTSSAQRQMEDRL

SEQ ID NO: 15528 - protein, 199 aa, Artificial Sequence
  Synthetic polypeptide
PARPCPRAPAPAPAPRPAGRGRHDPERPRARLKMEAAGAGGTWRLPPPAPGLGGAPGLRRGRPRQGTRGGGGRRAAGRRGRPRSGGADSGGHHQRPAGGVRRPQHPVPVPHRDKWRTGCDPKSLQQWWQSGGRGCQRGGTICLFPSVQCGRYYGCVRTDHRPELAGWRPVLRHDDAPGCASDRNTEDDRPPDTPLLSKN

SEQ ID NO: 15529 - protein, 388 aa, Artificial Sequence
  Synthetic polypeptide
PRPGRAPAPRPRPRPRGLQAGAAMIPSGRGPGSKWRPPARGGPGASRPRPPASAAPPASGAAGHDKGPEAEEGVELQEGGDGPGAEEQTAVAITSVQQAAFGDHNIQYQFRTETNGGQVTYRVVQVTDGQLDGQGDTAGAVSVVSTAAFAGGQQAVTQVGVDGAAQRPGPAAASVPPGPAAPFPLAVIQNPFSNGGSPAAEAVSGEARFAYFPASSVGDTTAVSVQTTDQSLQAGGQFYVMMTPQDVLQTGTQRTIAPRTHPYSPKIDGTRTPRDERRRAQHNEVERRRRDKINNWIVQLSKIIPDCNADNSKTGASKGGILSKACDYIRELRQTNQRMQETFKEAERLQMDNELLRQQIEELKNENALLRAQLQQHNLEMVGEGTRQ

SEQ ID NO: 15530 - protein, 94 aa, Artificial Sequence
  Synthetic polypeptide
SRAAAGPAQNGGRRRGGDLAPPAPGPRPRRRPRPQARPATTRDPRRRRASSCRKAGTAQERRSRQRWPSPASSRRRSATTTSSTSSAQRQMEDR

SEQ ID NO: 15531 - protein, 94 aa, Artificial Sequence; identical to SEQ ID NO: 15530
  Synthetic polypeptide

SEQ ID NO: 15532 - protein, 94 aa, Artificial Sequence; identical to SEQ ID NO: 15530
  Synthetic polypeptide

SEQ ID NO: 15533 - protein, 94 aa, Artificial Sequence; identical to SEQ ID NO: 15530
  Synthetic polypeptide

SEQ ID NO: 15534 - protein, 126 aa, Artificial Sequence
  Synthetic polypeptide
PARPCPRAPAPAPAPRPAGRGRHDPERPRARLKMEAAGAGGTWRLPPPAPGLGGAPGLRRGRPRQGTRGGGGRRAAGRRGRPRSGGADSGGHHQRPAGGVRRPQHPVPVPHRDKWRTGDIPRSPGD

SEQ ID NO: 15535 - protein, 126 aa, Artificial Sequence; identical to SEQ ID NO: 15534
  Synthetic polypeptide

SEQ ID NO: 15536 - protein, 126 aa, Artificial Sequence; identical to SEQ ID NO: 15534
  Synthetic polypeptide

SEQ ID NO: 15537 - protein, 126 aa, Artificial Sequence; identical to SEQ ID NO: 15534
  Synthetic polypeptide

SEQ ID NO: 15538 - protein, 380 aa, Artificial Sequence
  Synthetic polypeptide
PRPGRAPAPRPRPRPRGLQAGAAMIPSGRGPGSKWRPPARGGPGASRPRPPASAAPPASGAAGHDKGPEAEEGVELQEGGDGPGAEEQTAVAITSVQQAAFGDHNIQYQFRTETNGGQVTYRVVQVTDGQLDGQGDTAGAVSVVSTAAFAGGQQAVTQVGVDGAAQRPGPAAASVPPGPAAPFPLAVIQNPFSNGGSPAAEAVSGEARFAYFPASSVGDTTAVSVQTTDQSLQAGGQFYVMMTPQDVLQTGTQRTIAPRTHPYSPKIDGTRTPRDERRRAQHNEVERRRRDKINNWIVQLSKIIPDCNADNSKTGAACDYIRELRQTNQRMQETFKEAERLQMDNELLRQQIEELKNENALLRAQLQQHNLEMVGEGTRQ

SEQ ID NO: 15539 - protein, 257 aa, Artificial Sequence
  Synthetic polypeptide
PRPGRAPAPRPRPRPRGLQAGAAMIPSGRGPGSKWRPPARGGPGASRPRPPASAAPPASGAAGHDKGPEAEEGVELQEGGDGPGAEEQTAVAITSVQQAAFGDHNIQYQFRTETNGGQTGTQRTIAPRTHPYSPKIDGTRTPRDERRRAQHNEVERRRRDKINNWIVQLSKIIPDCNADNSKTGASKGGILSKACDYIRELRQTNQRMQETFKEAERLQMDNELLRQQIEELKNENALLRAQLQQHNLEMVGEGTRQ

SEQ ID NO: 15540 - protein, 200 aa, Artificial Sequence
  Synthetic polypeptide
SRAAAGPAQNGGRRRGGDLAPPAPGPRPRRRPRPQARPATTRDPRRRRASSCRKAGTAQERRSRQRWPSPASSRRRSATTTSSTSSAQRQMEDRQEHRGRSPPGHTLTLQKLMEPEHPEMRGEEPSTTKWSGGGGTRSTTGSSSFRKSFQTVTQTTARRERVKEGSCPRPAITSGSCARPTSACRRPSKRPSGCRWTTSS

SEQ ID NO: 15541 - protein, 135 aa, Artificial Sequence
  Synthetic polypeptide
PARPCPRAPAPAPAPRPAGRGRHDPERPRARLKMEAAGAGGTWRLPPPAPGLGGAPGLRRGRPRQGTRGGGGRRAAGRRGRPRSGGADSGGHHQRPAGGVRRPQHPVPVPHRDKWRTDRNTEDDRPPDTPLLSKN

SEQ ID NO: 15542 - protein, 156 aa, Artificial Sequence
  Synthetic polypeptide
PRPGRAPAPRPRPRPRGLQAGAAMIPSGRGPGSKWRPPARGGPGASRPRPPASAAPPASGAAGHDKGPEAEEGVELQEGECLPGRPRPGRAGGARRGPDRAPTLLGPRRGRPRSGGADSGGHHQRPAGGVRRPQHPVPVPHRDKWRTGDIPRSPGD

SEQ ID NO: 15543 - protein, 132 aa, Artificial Sequence
  Synthetic polypeptide
SRAAAGPAQNGGRRRGGDLAPPAPGPRPRRRPRPQARPATTRDPRRRRASSCRKVSACRAGRARGGLGALGAALTVPRPSSAPGGDGPGAEEQTAVAITSVQQAAFGDHNIQYQFRTETNGGQVTYRVVQVT

SEQ ID NO: 15544 - protein, 78 aa, Artificial Sequence
  Synthetic polypeptide
PARPCPRAPAPAPAPRPAGRGRHDPERPRARLKMEAAGAGGTWRLPPPAPGLGGAPGLRRGRPRQGTRGGGGRRAAGR

SEQ ID NO: 15545 - protein, 393 aa, Artificial Sequence
  Synthetic polypeptide
PRPGRAPAPRPRPRPRGLQAGAAMIPSGRGPGSKWRPPARGGPGASRPRPPASAAPPASGAAGHDKGPEAEEGVELQEGGDGPGAEEQTAVAITSVQQAAFGDHNIQYQFRTETNGGQVTYRVVQVTDGQLDGQGDTAGAVSVVSTAAFAGGQQAVTQVGVDGAAQRPGPAAASVPPGPAAPFPLAVIQNPFSNGGSPAAEAVSGEARFAYFPASSVGDTTAVSVQTTDQSLQAGGQFYVMMTPQDVLQTGTQRTIAPRTHPYSPKIDGTRTPRDERRRAQHNEVERRRRDKINNWIVQLSKIIPDCNADNSKTGASKGGILSKACDYIRELRQTNQRMQETFKEAERLQMDNELLRQQVGAGPGAGQGPGAPDARRWPSAPLTSVVSARSRS

SEQ ID NO: 15546 - protein, 216 aa, Artificial Sequence
  Synthetic polypeptide
PRPGRAPAPRPRPRPRGLQAGAAMIPSGRGPGSKWRPPARGGPGASRPRPPASAAPPASGAAGHDKGPEAEEGVELQEGGDGPGAEEQTAVAITSVQQAAFGDHNIQYQFRTETNGGQVTYRVVQVTDGQLDGQGDTAGAVSVVSTAAFAGGQQAVTQVGVDGAAQRPGPAAASVPPGPAAPFPLVGALPPLGGGGREWRGDTGSALGEPRGWGRC

SEQ ID NO: 15547 - protein, 45 aa, Artificial Sequence
  Synthetic polypeptide
LLTWPHANAFSSLGLRFLCDVGMMTIPTTKVYQKETSFPQLGCLS

SEQ ID NO: 15548 - protein, 45 aa, Artificial Sequence; identical to SEQ ID NO: 15547
  Synthetic polypeptide

SEQ ID NO: 15549 - protein, 34 aa, Artificial Sequence
  Synthetic polypeptide
QFPPQKSIKRKLPFLNWDAFPKLKGLRSATPDAQ

SEQ ID NO: 15550 - protein, 34 aa, Artificial Sequence; identical to SEQ ID NO: 15549
  Synthetic polypeptide

SEQ ID NO: 15551 - protein, 27 aa, Artificial Sequence
  Synthetic polypeptide
CGDDDNSHHKSLSKGNFLSSTGMPFLS

SEQ ID NO: 15552 - protein, 27 aa, Artificial Sequence
  Synthetic polypeptide
CGDDDNSHHKSLSKGNFLSSTGMPFLS

SEQ ID NO: 15553 - protein, 33 aa, Artificial Sequence
  Synthetic polypeptide
INCQSLNMERLHIMIWISGFFQKLWTREALASR

SEQ ID NO: 15554 - protein, 33 aa, Artificial Sequence; identical to SEQ ID NO: 15553
  Synthetic polypeptide

SEQ ID NO: 15555 - protein, 33 aa, Artificial Sequence; identical to SEQ ID NO: 15553
  Synthetic polypeptide

SEQ ID NO: 15556 - protein, 33 aa, Artificial Sequence; identical to SEQ ID NO: 15553
  Synthetic polypeptide

SEQ ID NO: 15557 - protein, 33 aa, Artificial Sequence; identical to SEQ ID NO: 15553
  Synthetic polypeptide

SEQ ID NO: 15558 - protein, 33 aa, Artificial Sequence; identical to SEQ ID NO: 15553
  Synthetic polypeptide

SEQ ID NO: 15559 - protein, 33 aa, Artificial Sequence; identical to SEQ ID NO: 15553
  Synthetic polypeptide

SEQ ID NO: 15560 - protein, 33 aa, Artificial Sequence; identical to SEQ ID NO: 15553
  Synthetic polypeptide

SEQ ID NO: 15561 - protein, 33 aa, Artificial Sequence; identical to SEQ ID NO: 15553
  Synthetic polypeptide

SEQ ID NO: 15562 - protein, 33 aa, Artificial Sequence; identical to SEQ ID NO: 15553
  Synthetic polypeptide

SEQ ID NO: 15563 - protein, 19 aa, Artificial Sequence
  Synthetic polypeptide
FGFLVSFKNFGPEKLSHPV

SEQ ID NO: 15564 - protein, 19 aa, Artificial Sequence
  Synthetic polypeptide
FGFLVSFKNFGPEKLSHPV

SEQ ID NO: 15565 - protein, 19 aa, Artificial Sequence
  Synthetic polypeptide
FGFLVSFKNFGPEKLSHPV

SEQ ID NO: 15566 - protein, 19 aa, Artificial Sequence
  Synthetic polypeptide
FGFLVSFKNFGPEKLSHPV

SEQ ID NO: 15567 - protein, 19 aa, Artificial Sequence
  Synthetic polypeptide
FGFLVSFKNFGPEKLSHPV

SEQ ID NO: 15568 - protein, 19 aa, Artificial Sequence
  Synthetic polypeptide
FGFLVSFKNFGPEKLSHPV

SEQ ID NO: 15569 - protein, 19 aa, Artificial Sequence
  Synthetic polypeptide
FGFLVSFKNFGPEKLSHPV

SEQ ID NO: 15570 - protein, 19 aa, Artificial Sequence
  Synthetic polypeptide
FGFLVSFKNFGPEKLSHPV

SEQ ID NO: 15571 - protein, 19 aa, Artificial Sequence
  Synthetic polypeptide
FGFLVSFKNFGPEKLSHPV

SEQ ID NO: 15572 - protein, 19 aa, Artificial Sequence
  Synthetic polypeptide
FGFLVSFKNFGPEKLSHPV

SEQ ID NO: 15573 - protein, 31 aa, Artificial Sequence
  Synthetic polypeptide
LSKFKHGETSHNDLDFWFLSKTLDQRSSRIP

SEQ ID NO: 15574 - protein, 31 aa, Artificial Sequence; identical to SEQ ID NO: 15573
  Synthetic polypeptide

SEQ ID NO: 15575 - protein, 31 aa, Artificial Sequence; identical to SEQ ID NO: 15573
  Synthetic polypeptide

SEQ ID NO: 15576 - protein, 31 aa, Artificial Sequence; identical to SEQ ID NO: 15573
  Synthetic polypeptide

SEQ ID NO: 15577 - protein, 31 aa, Artificial Sequence; identical to SEQ ID NO: 15573
  Synthetic polypeptide

SEQ ID NO: 15578 - protein, 31 aa, Artificial Sequence; identical to SEQ ID NO: 15573
  Synthetic polypeptide

SEQ ID NO: 15579 - protein, 31 aa, Artificial Sequence; identical to SEQ ID NO: 15573
  Synthetic polypeptide

SEQ ID NO: 15580 - protein, 31 aa, Artificial Sequence; identical to SEQ ID NO: 15573
  Synthetic polypeptide

SEQ ID NO: 15581 - protein, 31 aa, Artificial Sequence; identical to SEQ ID NO: 15573
  Synthetic polypeptide

SEQ ID NO: 15582 - protein, 31 aa, Artificial Sequence; identical to SEQ ID NO: 15573
  Synthetic polypeptide

SEQ ID NO: 15583 - protein, 30 aa, Artificial Sequence
  Synthetic polypeptide
INCQSLNMERLHIMIWISGFFQKLWTREAL

SEQ ID NO: 15584 - protein, 15 aa, Artificial Sequence
  Synthetic polypeptide
FGFLVSFKNFGPEKL

SEQ ID NO: 15585 - protein, 28 aa, Artificial Sequence
  Synthetic polypeptide
LSKFKHGETSHNDLDFWFLSKTLDQRSS

SEQ ID NO: 15586 - protein, 29 aa, Artificial Sequence
  Synthetic polypeptide
LTPVNPALWEAKIWTHRSPGPARLHGEGC

SEQ ID NO: 15587 - protein, 29 aa, Artificial Sequence
  Synthetic polypeptide
LTPVNPALWEAKIWTHRSPGPARLHGEGC

SEQ ID NO: 15588 - protein, 29 aa, Artificial Sequence
  Synthetic polypeptide
LTPVNPALWEAKIWTHRSPGPARLHGEGC

SEQ ID NO: 15589 - protein, 334 aa, Artificial Sequence
  Synthetic polypeptide
TQHFGRPRFGRIGRLVLRACMEKGVKVVAVNDPFIDPEYMVYMFKYDSTHGRYKGSVEFRNGQLVVDNHEISVYQCKEPKQIPWRAVGSPYVVESTGVYLSIQAASDHISAGAQRVVISAPSPDAPMFVMGVNENDYNPGSMNIVSNASCTTNCLAPLAKVIHERFGIVEGLMTTVHSYTATQKTVDGPSRKAWRDGRGAHQNIIPASTGAAKAVTKVIPELKGKLTGMAFRVPTPDVSVVDLTCRLAQPAPYSAIKEAVKAAAKGPMAGILAYTEDEVVSTDFLGDTHSSIFDAKAGIALNDNFVKLISWYDNEYGYSHRVVDLLRYMFSRDK

SEQ ID NO: 15590 - protein, 33 aa, Artificial Sequence
  Synthetic polypeptide
HTCKPSTLGGQDLDASVAWSCAPAWRRVLRWWL

SEQ ID NO: 15591 - protein, 33 aa, Artificial Sequence; identical to SEQ ID NO: 15590
  Synthetic polypeptide

SEQ ID NO: 15592 - protein, 33 aa, Artificial Sequence; identical to SEQ ID NO: 15590
  Synthetic polypeptide

SEQ ID NO: 15593 - protein, 30 aa, Artificial Sequence
  Synthetic polypeptide
TQHFGRPRFGRIGRLVLRACMEKGVKVVAV

SEQ ID NO: 15594 - protein, 173 aa, Artificial Sequence
  Synthetic polypeptide
TQHFGRPRFGRIGRLVLRACMEKGVKVVAVNDPFIDPEYMVYMFKYDSTHGRYKGSVEFRNGQLVVDNHEISVYQCKEPKQIPWRAVGSPYVVESTGVYLSIQAASDHISAGAQRVVISAPSPDAPMFVMGVNENDYNPGSMNIVSNASCTTNCLAPLAKVIHERFGIVEGLM

SEQ ID NO: 15595 - protein, 6 aa, Artificial Sequence
  Synthetic polypeptide
ARSVGS

SEQ ID NO: 15596 - protein, 6 aa, Artificial Sequence
  Synthetic polypeptide
ARSVGS

SEQ ID NO: 15597 - protein, 6 aa, Artificial Sequence
  Synthetic polypeptide
ARSVGS

SEQ ID NO: 15598 - protein, 33 aa, Artificial Sequence
  Synthetic polypeptide
PGPSEVRAGSCCDPPAGRNPGTRPEPGADGARH

SEQ ID NO: 15599 - protein, 33 aa, Artificial Sequence; identical to SEQ ID NO: 15598
  Synthetic polypeptide

SEQ ID NO: 15600 - protein, 33 aa, Artificial Sequence; identical to SEQ ID NO: 15598
  Synthetic polypeptide

SEQ ID NO: 15601 - protein, 218 aa, Artificial Sequence
  Synthetic polypeptide
QVRRKLELEAAVTRLRAEIQELDQSLELMERDTEAQDTAMEQARQHTQDTQRRALLLRAQAGAMRRQQHTLRDPMQRLQNQLRRLQDMERKAKVDVTFGSLTSAALGLEPVVLRDVRTACTLRAQFLQNLLLPQAKRGSLPTPHDDHFGTSYQQWLSSVETLLTNHPPGHVLAALEHLAAEREAEIRSLCSGDGLGDTEISRRAGGLWVCWSPSGAPS

SEQ ID NO: 15602 - protein, 218 aa, Artificial Sequence; identical to SEQ ID NO: 15601
  Synthetic polypeptide

SEQ ID NO: 15603 - protein, 561 aa, Artificial Sequence
  Synthetic polypeptide
QVRRKLELEAAVTRLRAEIQELDQSLELMERDTEAQDTAMEQARQHTQDTQRRALLLRAQAGAMRRQQHTLRDPMQRLQNQLRRLQDMERKAKVDVTFGSLTSAALGLEPVVLRDVRTACTLRAQFLQNLLLPQAKRGSLPTPHDDHFGTSYQQWLSSVETLLTNHPPGHVLAALEHLAAEREAEIRSLCSGDGLGDTEISRPQAPDQSDSSQTLPSMVHLIQEGWRTVGVLVSQRSTLLKERQVLTQRLQGLVEEVERRVLGSSERQVLILGLRRCCLWTELKALHDQSQELQDAAGHRQLLLRELQAKQQRILHWRQLVEETQEQVRLLIKGNSASKTRLCRSPGEVLALVQRKVVPTFEAVAPQSRELLRCLEEEVRHLPHILLGTLLRHRPGELKPLPTVLPSIHQLHPASPRGSSFIALSHKLGLPPGKASELLLPAAASLRQDLLLLQDQRSLWCWDLLHMKTSLPPGLPTQELLQIQASQEKQQKENLGQALKRLEKLLKQALERIPELQGIVGDWWEQPGQAALSEELCQGLSLPQWRLRWVQAQGALQKLCS

SEQ ID NO: 15604 - protein, 38 aa, Artificial Sequence
  Synthetic polypeptide
GQAWWHTPVIPALWEAKELQGQRSDVYSDLNTQRPYYK

SEQ ID NO: 15605 - protein, 38 aa, Artificial Sequence; identical to SEQ ID NO: 15604
  Synthetic polypeptide

SEQ ID NO: 15606 - protein, 38 aa, Artificial Sequence; identical to SEQ ID NO: 15604
  Synthetic polypeptide

SEQ ID NO: 15607 - protein, 38 aa, Artificial Sequence; identical to SEQ ID NO: 15604
  Synthetic polypeptide

SEQ ID NO: 15608 - protein, 38 aa, Artificial Sequence; identical to SEQ ID NO: 15604
  Synthetic polypeptide

SEQ ID NO: 15609 - protein, 29 aa, Artificial Sequence
  Synthetic polypeptide
SQHFGRPRSSRVRGRMSTATSTHRGRITN

SEQ ID NO: 15610 - protein, 29 aa, Artificial Sequence
  Synthetic polypeptide
SQHFGRPRSSRVRGRMSTATSTHRGRITN

SEQ ID NO: 15611 - protein, 29 aa, Artificial Sequence
  Synthetic polypeptide
SQHFGRPRSSRVRGRMSTATSTHRGRITN

SEQ ID NO: 15612 - protein, 29 aa, Artificial Sequence
  Synthetic polypeptide
SQHFGRPRSSRVRGRMSTATSTHRGRITN

SEQ ID NO: 15613 - protein, 29 aa, Artificial Sequence
  Synthetic polypeptide
SQHFGRPRSSRVRGRMSTATSTHRGRITN

SEQ ID NO: 15614 - protein, 38 aa, Artificial Sequence
  Synthetic polypeptide
PGMVAHTCNPSTLGGQGAPGSEVGCLQRPQHTEAVLQM

SEQ ID NO: 15615 - protein, 38 aa, Artificial Sequence; identical to SEQ ID NO: 15614
  Synthetic polypeptide

SEQ ID NO: 15616 - protein, 38 aa, Artificial Sequence; identical to SEQ ID NO: 15614
  Synthetic polypeptide

SEQ ID NO: 15617 - protein, 38 aa, Artificial Sequence; identical to SEQ ID NO: 15614
  Synthetic polypeptide

SEQ ID NO: 15618 - protein, 38 aa, Artificial Sequence; identical to SEQ ID NO: 15614
  Synthetic polypeptide

SEQ ID NO: 15619 - protein, 55 aa, Artificial Sequence
  Synthetic polypeptide
GQAQLLTPLIPALWGAEEAATRKQRITETESPYQELQGQRSDVYSDLNTQRPYYK

SEQ ID NO: 15620 - protein, 55 aa, Artificial Sequence; identical to SEQ ID NO: 15619
  Synthetic polypeptide

SEQ ID NO: 15621 - protein, 55 aa, Artificial Sequence; identical to SEQ ID NO: 15619
  Synthetic polypeptide

SEQ ID NO: 15622 - protein, 46 aa, Artificial Sequence
  Synthetic polypeptide
FQHFGGLRRQRPGNSVSLRPSRLIRSSRVRGRMSTATSTHRGRITN

SEQ ID NO: 15623 - protein, 46 aa, Artificial Sequence; identical to SEQ ID NO: 15622
  Synthetic polypeptide

SEQ ID NO: 15624 - protein, 46 aa, Artificial Sequence; identical to SEQ ID NO: 15622
  Synthetic polypeptide

SEQ ID NO: 15625 - protein, 10 aa, Artificial Sequence
  Synthetic polypeptide
GGSDPETAYH

SEQ ID NO: 15626 - protein, 10 aa, Artificial Sequence
  Synthetic polypeptide
GGSDPETAYH

SEQ ID NO: 15627 - protein, 10 aa, Artificial Sequence
  Synthetic polypeptide
GGSDPETAYH

SEQ ID NO: 15628 - protein, 26 aa, Artificial Sequence
  Synthetic polypeptide
SQHFGRPRRADHLKSGVQDQPGQHGG

SEQ ID NO: 15629 - protein, 26 aa, Artificial Sequence
  Synthetic polypeptide
SQHFGRPRRADHLKSGVQDQPGQHGG

SEQ ID NO: 15630 - protein, 26 aa, Artificial Sequence
  Synthetic polypeptide
SQHFGRPRRADHLKSGVQDQPGQHGG

SEQ ID NO: 15631 - protein, 933 aa, Artificial Sequence
  Synthetic polypeptide
SQEFKISLANMVADMEELTIWEQHTATLSKDPRRGFGIAISGGRDRPGGSMVVSDVVPGGPAEGRLQTGDHIVMVNGVSMENATSAFAIQILKTCTKMANITVKRPRRIHLPATKASPSSPGRQDSDEDDGPQRVEEVDQGRGYDGDSSSGSGRSWDERSRRPRPGRRGRAGSHGRRSPGGGSEANGLALVSGFKRLPRQDVQMKPVKSVLVKRRDSEEFGVKLGSQIFIKHITDSGLAARHRGLQEGDLILQINGVSSQNLSLNDTRRLIEKSEGKLSLLVLRDRGQFLVNIPPAVSDSDSSPLEDISDLASELSQAPPSHIPPPPRHAQRSPEASQTDSPVESPRLRRESSVDSRTISEPDEQRSELPRESSYDIYRVPSSQSMEDRGYSPDTRVVRFLKGKSIGLRLAGGNDVGIFVSGVQAGSPADGQGIQEGDQILQVNDVPFQNLTREEAVQFLLGLPPGEEMELVTQRKQDIFWKMVQSRVGDSFYIRTHFELEPSPPSGLGFTRGDVFHVLDTLHPGPGQSHARGGHWLAVRMGRDLREQERGIIPNQSRAEQLASLEAAQRAVGVGPGSSAGSNARAEFWRLRGLRRGAKKTTQRSREDLSALTRQGRYPPYERVVLREASFKRPVVILGPVADIAMQKLTAEMPDQFEIAETVSRTDSPSKIIKLDTVRVIAEKDKHALLDVTPSAIERLNYVQYYPIVVFFIPESRPALKALRQWLAPASRRSTRRLYAQAQKLRKHSSHLFTATIPLNGTSDTWYQELKAIIREQQTRPIWTAEDQLDGSLEDNLDLPHHGLADSSADLSCDSRVNSDYETDGEGGAYTDGEGYTDGEGGPYTDVDDEPPAPALARSSEPVQADESQSPRDRGRISAHQGAQVDSRHPQGQWRQDSMRTYEREALKKKFMRVHDAESSDEDGYDWGPATDL

SEQ ID NO: 15632 - protein, 933 aa, Artificial Sequence; identical to SEQ ID NO: 15631
  Synthetic polypeptide

SEQ ID NO: 15633 - protein, 39 aa, Artificial Sequence
  Synthetic polypeptide
MVWRLTPVIPALWEAKAGGSLEVRSSRSAWPTWWLTWRS

SEQ ID NO: 15634 - protein, 39 aa, Artificial Sequence; identical to SEQ ID NO: 15633
  Synthetic polypeptide

SEQ ID NO: 15635 - protein, 39 aa, Artificial Sequence; identical to SEQ ID NO: 15633
  Synthetic polypeptide

SEQ ID NO: 15636 - protein, 947 aa, Artificial Sequence
  Synthetic polypeptide
SQEFKISLANMVADMEELTIWEQHTATLSKDPRRGFGIAISGGRDRPGGSMVVSDVVPGGPAEGRLQTGDHIVMVNGVSMENATSAFAIQILKTCTKMANITVKRPRRIHLPATKASPSSPGRQDSDEDDGPQRVEEVDQGRGYDGDSSSGSGRSWDERSRRPRPGRRGRAGSHGRRSPGGGSEANGLALVSGFKRLPRQDVQMKPVKSVLVKRRDSEEFGVKLGSQIFIKHITDSGLAARHRGLQEGDLILQINGVSSQNLSLNDTRRLIEKSEGKLSLLVLRDRGQFLVNIPPAVSDSDSSPLEEGVTMADEMSSPPADISDLASELSQAPPSHIPPPPRHAQRSPEASQTDSPVESPRLRRESSVDSRTISEPDEQRSELPRESSYDIYRVPSSQSMEDRGYSPDTRVVRFLKGKSIGLRLAGGNDVGIFVSGVQAGSPADGQGIQEGDQILQVNDVPFQNLTREEAVQFLLGLPPGEEMELVTQRKQDIFWKMVQSRVGDSFYIRTHFELEPSPPSGLGFTRGDVFHVLDTLHPGPGQSHARGGHWLAVRMGRDLREQERGIIPNQSRAEQLASLEAAQRAVGVGPGSSAGSNARAEFWRLRGLRRGAKKTTQRSREDLSALTRQGRYPPYERVVLREASFKRPVVILGPVADIAMQKLTAEMPDQFEIAETVSRTDSPSKIIKLDTVRVIAEKDKHALLDVTPSAIERLNYVQYYPIVVFFIPESRPALKALRQWLAPASRRSTRRLYAQAQKLRKHSSHLFTATIPLNGTSDTWYQELKAIIREQQTRPIWTAEDQLDGSLEDNLDLPHHGLADSSADLSCDSRVNSDYETDGEGGAYTDGEGYTDGEGGPYTDVDDEPPAPALARSSEPVQADESQSPRDRGRISAHQGAQVDSRHPQGQWRQDSMRTYEREALKKKFMRVHDAESSDEDGYDWGPATDL

SEQ ID NO: 15637 - protein, 204 aa, Artificial Sequence
  Synthetic polypeptide
HFGRPRYNPENLATLERYVETQAKENAYDLEANLAVLKLYQFNPAFFQTTVTAQILLKALTNLPHTDFTLCKCMIDQAHQEERPIRQILYLGDLLETCHFQAFWQALDENMDLLEGITGFEDSVRKFICHVVGITYQHIDRWLLAEMLGDLSDSQLKVWMSKYGWSADESGQIFICSQEESIKPKNIVEKIDFDSVSSIMASSQ

SEQ ID NO: 15638 - protein, 29 aa, Artificial Sequence
  Synthetic polypeptide
MGVVAHACDPSTLGGRGTILRTWPPWSAM

SEQ ID NO: 15639 - protein, 29 aa, Artificial Sequence
  Synthetic polypeptide
MGVVAHACDPSTLGGRGTILRTWPPWSAM

SEQ ID NO: 15640 - protein, 29 aa, Artificial Sequence
  Synthetic polypeptide
MGVVAHACDPSTLGGRGTILRTWPPWSAM

SEQ ID NO: 15641 - protein, 29 aa, Artificial Sequence
  Synthetic polypeptide
MGVVAHACDPSTLGGRGTILRTWPPWSAM

SEQ ID NO: 15642 - protein, 29 aa, Artificial Sequence
  Synthetic polypeptide
MGVVAHACDPSTLGGRGTILRTWPPWSAM

SEQ ID NO: 15643 - protein, 16 aa, Artificial Sequence
  Synthetic polypeptide
WLTPVILALWEAEVQS

SEQ ID NO: 15644 - protein, 16 aa, Artificial Sequence
  Synthetic polypeptide
WLTPVILALWEAEVQS

SEQ ID NO: 15645 - protein, 16 aa, Artificial Sequence
  Synthetic polypeptide
WLTPVILALWEAEVQS

SEQ ID NO: 15646 - protein, 16 aa, Artificial Sequence
  Synthetic polypeptide
WLTPVILALWEAEVQS

SEQ ID NO: 15647 - protein, 16 aa, Artificial Sequence
  Synthetic polypeptide
WLTPVILALWEAEVQS

SEQ ID NO: 15648 - protein, 123 aa, Artificial Sequence
  Synthetic polypeptide
HFGRPRYNPENLATLERYVETQAKENAYDLEANLAVLKLYQFNPAFFQTTVTAQILLKALTNLPHTDFTLCKCMIDQAHQEERPIRQILYLGDLLETCHFQAFWVCPASWPPPSNFRCLIKMC

SEQ ID NO: 15649 - protein, 197 aa, Artificial Sequence
  Synthetic polypeptide
HFGRPRYNPENLATLERYVETQAKENAYDLEANLAVLKLYQFNPAFFQTTVTAQILLKALTNLPHTDFTLCKCMIDQAHQEERPIRQILYLGDLLETCHFQAFWQALDENMDLLEGITGFEDSVRKFICHVVGITYQHIDRWLLAEMLGDLSDSQLKVWMSKYGWSADESGQIFICSQEESIKPKNIVEKIDFDSEW

SEQ ID NO: 15650 - protein, 126 aa, Artificial Sequence
  Synthetic polypeptide
HFGRPRYNPENLATLERYVETQAKENAYDLEANLAVLKLYQFNPAFFQTTVTAQILLKALTNLPHTDFTLCKCMIDQAHQEERPIRQILYLGDLLETCHFQAFWASLFRFLLLNRMCWLGMVAHTC

SEQ ID NO: 15651 - protein, 178 aa, Artificial Sequence
  Synthetic polypeptide
HFGRPRYNPENLATLERYVETQAKENAYDLEANLAVLKLYQFNPAFFQTTVTAQILLKALTNLPHTDFTLCKCMIDQAHQEERPIRQILYLGDLLETCHFQAFWQALDENMDLLEGITGFEDSVRKYSQLKVWMSKYGWSADESGQIFICSQEESIKPKNIVEKIDFDSVSSIMASSQ

SEQ ID NO: 15652 - protein, 874 aa, Artificial Sequence
  Synthetic polypeptide
GSGEKLPEFTPQPSRLRTFTAWCNSHLRKAGTQIENIDEDFRDGLKLMLLLEVISGERLPKPERGKMRVHKINNVNKALDFIASKGVKLVSIGAEEIVDGNAKMTLGMIWTIILRFAIQDISVEETSAKEGLLLWCQRKTAPYKNVNVQNFHISWKDGLAFNALIHRHRPELIEYDKLRKDDPVTNLNNAFEVAEKYLDIPKMLDAEDIVNTARPDEKAIMTYVSSFYHAFSGAQKAETAANRICKVLAVNQENEHLMEDYEKLASDLLEWIRRTIPWLEDRVPQKTIQEMQQKLEDFRDYRRVHKPPKVQEKCQLEINFNTLQTKLRLSNRPAFMPSEGKMVSDINNGWQHLEQAEKGYEEWLLNEIRRLERLDHLAEKFRQKASIHEAWTDGKEAMLKHRDYETATLSDIKALIRKHEAFESDLAAHQDRVEQIAAIAQELNELDYYDSHNVNTRCQKICDQWDALGSLTHSRREALEKTEKQLEAIDQLHLEYAKRAAPFNNWMESAMEDLQDMFIVHTIEEIEGLISAHDQFKSTLPDADREREAILAIHKEAQRIAESNHIKLSGSNPYTTVTPQIINSKWEKVQQLVPKRDHALLEEQSKQQSNEHLRRQFASQANVVGPWIQTKMEEIGRISIEMNGTLEDQLSHLKQYERSIVDYKPNLDLLEQQHQLIQEALIFDNKHTNYTMEHIRVGWEQLLTTIARTINEVENQILTRDAKGISQEQMQEFRASFNHFDKDHGGALGPEEFKACLISLGYDVENDRQGEAEFNRIMSLVDPNHSGLVTFQAFIDFMSRETTDTDTADQVIASFKVLAGDKNFITAEELRRELPPDQAEYCIARMAPYQGPDAVPGALDYKSFSTALYGESDL

SEQ ID NO: 15653 - protein, 66 aa, Artificial Sequence
  Synthetic polypeptide
ALEKNCLSSLPSPAASGPSRHGATPTCGRQAHRSRTLMRTSETGSSSCCSWRSYQGSGYLSRSGGR

SEQ ID NO: 15654 - protein, 29 aa, Artificial Sequence
  Synthetic polypeptide
VHSPAQPPQDLHGMVQLPPAEGRHTDREH

SEQ ID NO: 15655 - protein, 29 aa, Artificial Sequence
  Synthetic polypeptide
VHSPAQPPQDLHGMVQLPPAEGRHTDREH

SEQ ID NO: 15656 - protein, 29 aa, Artificial Sequence
  Synthetic polypeptide
VHSPAQPPQDLHGMVQLPPAEGRHTDREH

SEQ ID NO: 15657 - protein, 484 aa, Artificial Sequence
  Synthetic polypeptide
GSGEKLPEFTPQPSRLRTFTAWCNSHLRKAGTQIENIDEDFRDGLKLMLLLEVHELDYYDSHNVNTRCQKICDQWDALGSLTHSRREALEKTEKQLEAIDQLHLEYAKRAAPFNNWMESAMEDLQDMFIVHTIEEIEGLISAHDQFKSTLPDADREREAILAIHKEAQRIAESNHIKLSGSNPYTTVTPQIINSKWEKVQQLVPKRDHALLEEQSKQQSNEHLRRQFASQANVVGPWIQTKMEEIGRISIEMNGTLEDQLSHLKQYERSIVDYKPNLDLLEQQHQLIQEALIFDNKHTNYTMEHIRVGWEQLLTTIARTINEVENQILTRDAKGISQEQMQEFRASFNHFDKDHGGALGPEEFKACLISLGYDVENDRQGEAEFNRIMSLVDPNHSGLVTFQAFIDFMSRETTDTDTADQVIASFKVLAGDKNFITAEELRRELPPDQAEYCIARMAPYQGPDAVPGALDYKSFSTALYGESDL

SEQ ID NO: 15658 - protein, 80 aa, Artificial Sequence
  Synthetic polypeptide
ALEKNCLSSLPSPAASGPSRHGATPTCGRQAHRSRTLMRTSETGSSSCCSWRFTSWITTTPTMSTPGARRSVTSGTPSAL

SEQ ID NO: 15659 - protein, 65 aa, Artificial Sequence
  Synthetic polypeptide
GSGEKLPEFTPQPSRLRTFTAWCNSHLRKAGTQIENIDEDFRDGLKLMLLLEVISEELSWQTGPP

SEQ ID NO: 15660 - protein, 57 aa, Artificial Sequence
  Synthetic polypeptide
ALEKNCLSSLPSPAASGPSRHGATPTCGRQAHRSRTLMRTSETGSSSCCSWRSYQRS

SEQ ID NO: 15661 - protein, 57 aa, Artificial Sequence
  Synthetic polypeptide
SQHFGRSRPSRHGATPTCGRQAHRSRTLMRTSETGSSSCCSWRSYQGSGYLSRSGGR

SEQ ID NO: 15662 - protein, 36 aa, Artificial Sequence
  Synthetic polypeptide
PGVVAHACNPSTLGGRDLHGMVQLPPAEGRHTDREH

SEQ ID NO: 15663 - protein, 36 aa, Artificial Sequence; identical to SEQ ID NO: 15662
  Synthetic polypeptide

SEQ ID NO: 15664 - protein, 36 aa, Artificial Sequence; identical to SEQ ID NO: 15662
  Synthetic polypeptide

SEQ ID NO: 15665 - protein, 873 aa, Artificial Sequence
  Synthetic polypeptide
RVWWLTPVIPALWEVETFTAWCNSHLRKAGTQIENIDEDFRDGLKLMLLLEVISGERLPKPERGKMRVHKINNVNKALDFIASKGVKLVSIGAEEIVDGNAKMTLGMIWTIILRFAIQDISVEETSAKEGLLLWCQRKTAPYKNVNVQNFHISWKDGLAFNALIHRHRPELIEYDKLRKDDPVTNLNNAFEVAEKYLDIPKMLDAEDIVNTARPDEKAIMTYVSSFYHAFSGAQKAETAANRICKVLAVNQENEHLMEDYEKLASDLLEWIRRTIPWLEDRVPQKTIQEMQQKLEDFRDYRRVHKPPKVQEKCQLEINFNTLQTKLRLSNRPAFMPSEGKMVSDINNGWQHLEQAEKGYEEWLLNEIRRLERLDHLAEKFRQKASIHEAWTDGKEAMLKHRDYETATLSDIKALIRKHEAFESDLAAHQDRVEQIAAIAQELNELDYYDSHNVNTRCQKICDQWDALGSLTHSRREALEKTEKQLEAIDQLHLEYAKRAAPFNNWMESAMEDLQDMFIVHTIEEIEGLISAHDQFKSTLPDADREREAILAIHKEAQRIAESNHIKLSGSNPYTTVTPQIINSKWEKVQQLVPKRDHALLEEQSKQQSNEHLRRQFASQANVVGPWIQTKMEEIGRISIEMNGTLEDQLSHLKQYERSIVDYKPNLDLLEQQHQLIQEALIFDNKHTNYTMEHIRVGWEQLLTTIARTINEVENQILTRDAKGISQEQMQEFRASFNHFDKDHGGALGPEEFKACLISLGYDVENDRQGEAEFNRIMSLVDPNHSGLVTFQAFIDFMSRETTDTDTADQVIASFKVLAGDKNFITAEELRRELPPDQAEYCIARMAPYQGPDAVPGALDYKSFSTALYGESDL

SEQ ID NO: 15666 - protein, 71 aa, Artificial Sequence
  Synthetic polypeptide
SQHFGRSRPSRHGATPTCGRQAHRSRTLMRTSETGSSSCCSWRFTSWITTTPTMSTPGARRSVTSGTPSAL

SEQ ID NO: 15667 - protein, 483 aa, Artificial Sequence
  Synthetic polypeptide
RVWWLTPVIPALWEVETFTAWCNSHLRKAGTQIENIDEDFRDGLKLMLLLEVHELDYYDSHNVNTRCQKICDQWDALGSLTHSRREALEKTEKQLEAIDQLHLEYAKRAAPFNNWMESAMEDLQDMFIVHTIEEIEGLISAHDQFKSTLPDADREREAILAIHKEAQRIAESNHIKLSGSNPYTTVTPQIINSKWEKVQQLVPKRDHALLEEQSKQQSNEHLRRQFASQANVVGPWIQTKMEEIGRISIEMNGTLEDQLSHLKQYERSIVDYKPNLDLLEQQHQLIQEALIFDNKHTNYTMEHIRVGWEQLLTTIARTINEVENQILTRDAKGISQEQMQEFRASFNHFDKDHGGALGPEEFKACLISLGYDVENDRQGEAEFNRIMSLVDPNHSGLVTFQAFIDFMSRETTDTDTADQVIASFKVLAGDKNFITAEELRRELPPDQAEYCIARMAPYQGPDAVPGALDYKSFSTALYGESDL

SEQ ID NO: 15668 - protein, 48 aa, Artificial Sequence
  Synthetic polypeptide
SQHFGRSRPSRHGATPTCGRQAHRSRTLMRTSETGSSSCCSWRSYQRS

SEQ ID NO: 15669 - protein, 64 aa, Artificial Sequence
  Synthetic polypeptide
RVWWLTPVIPALWEVETFTAWCNSHLRKAGTQIENIDEDFRDGLKLMLLLEVISEELSWQTGPP

SEQ ID NO: 15670 - protein, 214 aa, Artificial Sequence
  Synthetic polypeptide
PKGIDLMDMASDILQPKGDDVARISWYLRDIITRYQETFNVIERCPKPVIAAVHGGCIGGGVDLVTACDIRYCAQDAFFQVKEVDVGLAADVGTLQRLPKVIGNQSLVNELAFTARKMMADEALGSGLVSRVFPDKEVMLDAALALAAEISSKSPVAVQSTKVNLLYSRDHSVAESLNYVASWNMSMLQTQDLVKSVQATTENKELKTVTFSKL

SEQ ID NO: 15671 - protein, 5 aa, Artificial Sequence
  Synthetic polypeptide
PKVLT

SEQ ID NO: 15672 - protein, 5 aa, Artificial Sequence
  Synthetic polypeptide
PKVLT

SEQ ID NO: 15673 - protein, 5 aa, Artificial Sequence
  Synthetic polypeptide
PKVLT

SEQ ID NO: 15674 - protein, 5 aa, Artificial Sequence
  Synthetic polypeptide
PKVLT

SEQ ID NO: 15675 - protein, 5 aa, Artificial Sequence
  Synthetic polypeptide
PKVLT

SEQ ID NO: 15676 - protein, 3 aa, Artificial Sequence
  Synthetic polypeptide
QRY

SEQ ID NO: 15677 - protein, 3 aa, Artificial Sequence
  Synthetic polypeptide
QRY

SEQ ID NO: 15678 - protein, 3 aa, Artificial Sequence
  Synthetic polypeptide
QRY

SEQ ID NO: 15679 - protein, 3 aa, Artificial Sequence
  Synthetic polypeptide
QRY

SEQ ID NO: 15680 - protein, 3 aa, Artificial Sequence
  Synthetic polypeptide
QRY

SEQ ID NO: 15681 - protein, 156 aa, Artificial Sequence
  Synthetic polypeptide
PKGIDLMDMASDILQPKGDDVARISWYLRDIITRYQETFNVIERCPKPVIAAVHGGCIGGGVDLVTACDIRYCAQDAFFQVKEVDVGLAADVGTLQRLPKVIGNQSRVFPDKEVMLDAALALAAEISSKSPVAVQSTKVNLLYSRDHSVAESLNYV

SEQ ID NO: 15682 - protein, 67 aa, Artificial Sequence
  Synthetic polypeptide
PKGIDLMDMASDILQPKGDDVARISWYLRDIITRYQETFNVIERCPKPVIAAVHGGCIGGGESAAIL

SEQ ID NO: 15683 - protein, 37 aa, Artificial Sequence
  Synthetic polypeptide
PKGIDLMDMASDILQPKGDDVARISWYLRDIITRYQE

SEQ ID NO: 15684 - protein, 37 aa, Artificial Sequence; identical to SEQ ID NO: 15683
  Synthetic polypeptide

SEQ ID NO: 15685 - protein, 122 aa, Artificial Sequence
  Synthetic polypeptide
GASPPGSHPVREGGGGSAPRPASRPVREVRGASARPPLLGSEEPLCPASRPVREGGGGVRPRPASRPVREGGGGVSPPSGQPPGPGGRWGGQPPARPAAPSGRRTTMTRTKPLPPQLSTSGA

SEQ ID NO: 15686 - protein, 122 aa, Artificial Sequence; identical to SEQ ID NO: 15685
  Synthetic polypeptide

SEQ ID NO: 15687 - protein, 122 aa, Artificial Sequence; identical to SEQ ID NO: 15685
  Synthetic polypeptide

SEQ ID NO: 15688 - protein, 122 aa, Artificial Sequence; identical to SEQ ID NO: 15685
  Synthetic polypeptide

SEQ ID NO: 15689 - protein, 77 aa, Artificial Sequence
  Synthetic polypeptide
GAPLPGRPYWEVRSPSARPAAPSGREVGGSGPARPAAPSGREVGGSAPRLASRPVREGGGGVSPPPGQPPRPGGELR

SEQ ID NO: 15690 - protein, 77 aa, Artificial Sequence; identical to SEQ ID NO: 15689
  Synthetic polypeptide

SEQ ID NO: 15691 - protein, 77 aa, Artificial Sequence; identical to SEQ ID NO: 15689
  Synthetic polypeptide

SEQ ID NO: 15692 - protein, 77 aa, Artificial Sequence; identical to SEQ ID NO: 15689
  Synthetic polypeptide

SEQ ID NO: 15693 - protein, 561 aa, Artificial Sequence
  Synthetic polypeptide
GAPLPGQPPRPGGRWGGQAPPGQPPRPGGRWGGQPPVWPAARSGREVGGSAPRPASRPVREENYDDPHKTPASPVVHIRGLIDGVVEADLVEALQEFGPISYVVVMPKKRQALVEFEDVLGACNAVNYAADNQIYIAGHPAFVNYSTSQKISRPGDSDDSRSVNSVLLFTILNPIYSITTDVLYTICNPCGPVQRIVIFRKNGVQAMVEFDSVQSAQRAKASLNGADIYSGCCTLKIEYAKPTRLNVFKNDQDTWDYTNPNLSGQGDPGSNPNKRQRQPPLLGDHPAEYGGPHGGYHSHYHDEGYGPPPPHYEGRRMGPPVGGHRRGPSRYGPQYGHPPPPPPPPEYGPHADSPVLMVYGLDQSKMNCDRVFNVFCLYGNVEKVKFMKSKPGAAMVEMADGYAVDRAITHLNNNFMFGQKLNVCVSKQPAIMPGQSYGLEDGSCSYKDFSESRNNRFSTPEQAAKNRIQHPSNVLHFFNAPLEVTEENFFEICDELGVKRPSSVKVFSGKSERSSSGLLEWESKSDALETLGFLNHYQMKNPNGPYPYTLKLCFSTAQHAS

SEQ ID NO: 15694 - protein, 561 aa, Artificial Sequence; identical to SEQ ID NO: 15693
  Synthetic polypeptide

SEQ ID NO: 15695 - protein, 260 aa, Artificial Sequence
  Synthetic polypeptide
GAPLPGQPPRPGGRWGGQAPPGQPPRPGGRWGGQPPVWPAARSGREVGGSAPRPASRPVREENYDDPHKTPASPVVHIRGLIDGVVEADLVEALQEFGPISYVVVMPKKRQALVEFEDVLGACNAVNYAADNQIYIAGHPAFVNYSTSQKISRPGDSDDSRSVNSVLLFTILNPIYSITTDVLYTICNPCGPVQRIVIFRKNGVQAMVEFDSVQSAQRAKASLNGADIYSGCCTLKIEYAKPTRLNVFKNDQDTWDYTNP

SEQ ID NO: 15696 - protein, 235 aa, Artificial Sequence
  Synthetic polypeptide
GAPLPGQPPRPGGRWGGQAPPGQPPRPGGRWGGQPPVWPAARSGREVGGSAPRPASRPVREENYDDPHKTPASPVVHIRGLIDGVVEADLVEALQEFGPISYVVVMPKKRQALVEFEDVLGACNAVNYAADNQIYIAGHPAFVNYSTSQKISRPGDSDDSRSVNSVLLFTILNPIYSITTDVLYTICNPCGPVQRIVIFRKNGVQAMVEFDSVQSAQRAKASLNGADIYSGCCTL

SEQ ID NO: 15697 - protein, 528 aa, Artificial Sequence
  Synthetic polypeptide
GASPPGSHPVREGGGGSAPRPASRPVREENYDDPHKTPASPVVHIRGLIDGVVEADLVEALQEFGPISYVVVMPKKRQALVEFEDVLGACNAVNYAADNQIYIAGHPAFVNYSTSQKISRPGDSDDSRSVNSVLLFTILNPIYSITTDVLYTICNPCGPVQRIVIFRKNGVQAMVEFDSVQSAQRAKASLNGADIYSGCCTLKIEYAKPTRLNVFKNDQDTWDYTNPNLSGQGDPGSNPNKRQRQPPLLGDHPAEYGGPHGGYHSHYHDEGYGPPPPHYEGRRMGPPVGGHRRGPSRYGPQYGHPPPPPPPPEYGPHADSPVLMVYGLDQSKMNCDRVFNVFCLYGNVEKVKFMKSKPGAAMVEMADGYAVDRAITHLNNNFMFGQKLNVCVSKQPAIMPGQSYGLEDGSCSYKDFSESRNNRFSTPEQAAKNRIQHPSNVLHFFNAPLEVTEENFFEICDELGVKRPSSVKVFSGKSERSSSGLLEWESKSDALETLGFLNHYQMKNPNGPYPYTLKLCFSTAQHAS

SEQ ID NO: 15698 - protein, 528 aa, Artificial Sequence; identical to SEQ ID NO: 15697
  Synthetic polypeptide

SEQ ID NO: 15699 - protein, 63 aa, Artificial Sequence
  Synthetic polypeptide
EVRSLSTRQPPRLGSEEHLRPAATPSGREVGGQPPARPAAPSGRRTTMTRTKPLPPQLSTSGA

SEQ ID NO: 15700 - protein, 63 aa, Artificial Sequence; identical to SEQ ID NO: 15699
  Synthetic polypeptide

SEQ ID NO: 15701 - protein, 63 aa, Artificial Sequence; identical to SEQ ID NO: 15699
  Synthetic polypeptide

SEQ ID NO: 15702 - protein, 63 aa, Artificial Sequence; identical to SEQ ID NO: 15699
  Synthetic polypeptide

SEQ ID NO: 15703 - protein, 45 aa, Artificial Sequence
  Synthetic polypeptide
GASPPGSRPVWEVRSISARQPPRPGGRWGVSPPPGQPPRPGGELR

SEQ ID NO: 15704 - protein, 45 aa, Artificial Sequence; identical to SEQ ID NO: 15703
  Synthetic polypeptide

SEQ ID NO: 15705 - protein, 45 aa, Artificial Sequence; identical to SEQ ID NO: 15703
  Synthetic polypeptide

SEQ ID NO: 15706 - protein, 45 aa, Artificial Sequence; identical to SEQ ID NO: 15703
  Synthetic polypeptide

SEQ ID NO: 15707 - protein, 227 aa, Artificial Sequence
  Synthetic polypeptide
GASPPGSHPVREGGGGSAPRPASRPVREENYDDPHKTPASPVVHIRGLIDGVVEADLVEALQEFGPISYVVVMPKKRQALVEFEDVLGACNAVNYAADNQIYIAGHPAFVNYSTSQKISRPGDSDDSRSVNSVLLFTILNPIYSITTDVLYTICNPCGPVQRIVIFRKNGVQAMVEFDSVQSAQRAKASLNGADIYSGCCTLKIEYAKPTRLNVFKNDQDTWDYTNP

SEQ ID NO: 15708 - protein, 202 aa, Artificial Sequence
  Synthetic polypeptide
GASPPGSHPVREGGGGSAPRPASRPVREENYDDPHKTPASPVVHIRGLIDGVVEADLVEALQEFGPISYVVVMPKKRQALVEFEDVLGACNAVNYAADNQIYIAGHPAFVNYSTSQKISRPGDSDDSRSVNSVLLFTILNPIYSITTDVLYTICNPCGPVQRIVIFRKNGVQAMVEFDSVQSAQRAKASLNGADIYSGCCTL

SEQ ID NO: 15709 - protein, 59 aa, Artificial Sequence
  Synthetic polypeptide
EVRSVSARPPIVWDVGSASAPPPRLGCEERLCPAATPSGRRTTMTRTKPLPPQLSTSGA

SEQ ID NO: 15710 - protein, 59 aa, Artificial Sequence; identical to SEQ ID NO: 15709
  Synthetic polypeptide

SEQ ID NO: 15711 - protein, 59 aa, Artificial Sequence; identical to SEQ ID NO: 15709
  Synthetic polypeptide

SEQ ID NO: 15712 - protein, 59 aa, Artificial Sequence; identical to SEQ ID NO: 15709
  Synthetic polypeptide

SEQ ID NO: 15713 - protein, 41 aa, Artificial Sequence
  Synthetic polypeptide
GASLPGRPSSGMWGVPLPRRPVWDVRSASARPPPRLGGELR

SEQ ID NO: 15714 - protein, 41 aa, Artificial Sequence; identical to SEQ ID NO: 15713
  Synthetic polypeptide

SEQ ID NO: 15715 - protein, 41 aa, Artificial Sequence; identical to SEQ ID NO: 15713
  Synthetic polypeptide

SEQ ID NO: 15716 - protein, 41 aa, Artificial Sequence; identical to SEQ ID NO: 15713
  Synthetic polypeptide

SEQ ID NO: 15717 - protein, 512 aa, Artificial Sequence
  Synthetic polypeptide
GAPLPGRHPVWEENYDDPHKTPASPVVHIRGLIDGVVEADLVEALQEFGPISYVVVMPKKRQALVEFEDVLGACNAVNYAADNQIYIAGHPAFVNYSTSQKISRPGDSDDSRSVNSVLLFTILNPIYSITTDVLYTICNPCGPVQRIVIFRKNGVQAMVEFDSVQSAQRAKASLNGADIYSGCCTLKIEYAKPTRLNVFKNDQDTWDYTNPNLSGQGDPGSNPNKRQRQPPLLGDHPAEYGGPHGGYHSHYHDEGYGPPPPHYEGRRMGPPVGGHRRGPSRYGPQYGHPPPPPPPPEYGPHADSPVLMVYGLDQSKMNCDRVFNVFCLYGNVEKVKFMKSKPGAAMVEMADGYAVDRAITHLNNNFMFGQKLNVCVSKQPAIMPGQSYGLEDGSCSYKDFSESRNNRFSTPEQAAKNRIQHPSNVLHFFNAPLEVTEENFFEICDELGVKRPSSVKVFSGKSERSSSGLLEWESKSDALETLGFLNHYQMKNPNGPYPYTLKLCFSTAQHAS

SEQ ID NO: 15718 - protein, 512 aa, Artificial Sequence; identical to SEQ ID NO: 15717
  Synthetic polypeptide

SEQ ID NO: 15719 - protein, 211 aa, Artificial Sequence
  Synthetic polypeptide
GAPLPGRHPVWEENYDDPHKTPASPVVHIRGLIDGVVEADLVEALQEFGPISYVVVMPKKRQALVEFEDVLGACNAVNYAADNQIYIAGHPAFVNYSTSQKISRPGDSDDSRSVNSVLLFTILNPIYSITTDVLYTICNPCGPVQRIVIFRKNGVQAMVEFDSVQSAQRAKASLNGADIYSGCCTLKIEYAKPTRLNVFKNDQDTWDYTNP

SEQ ID NO: 15720 - protein, 186 aa, Artificial Sequence
  Synthetic polypeptide
GAPLPGRHPVWEENYDDPHKTPASPVVHIRGLIDGVVEADLVEALQEFGPISYVVVMPKKRQALVEFEDVLGACNAVNYAADNQIYIAGHPAFVNYSTSQKISRPGDSDDSRSVNSVLLFTILNPIYSITTDVLYTICNPCGPVQRIVIFRKNGVQAMVEFDSVQSAQRAKASLNGADIYSGCCTL

SEQ ID NO: 15721 - protein, 48 aa, Artificial Sequence
  Synthetic polypeptide
EHLGSGACSTWFEAASLRSCGSAGRRARARSTQPSSSRSAACHPAGVG

SEQ ID NO: 15722 - protein, 48 aa, Artificial Sequence; identical to SEQ ID NO: 15721
  Synthetic polypeptide

SEQ ID NO: 15723 - protein, 48 aa, Artificial Sequence; identical to SEQ ID NO: 15721
  Synthetic polypeptide

SEQ ID NO: 15724 - protein, 48 aa, Artificial Sequence; identical to SEQ ID NO: 15721
  Synthetic polypeptide

SEQ ID NO: 15725 - protein, 48 aa, Artificial Sequence; identical to SEQ ID NO: 15721
  Synthetic polypeptide

SEQ ID NO: 15726 - protein, 94 aa, Artificial Sequence
  Synthetic polypeptide
STWALEPAAPGLKRPVCDRAEVPAEGHGQGVRSQVHQEAPPVIQPAWGEPGGDRAGGEHPAGDPAPQHHHPARHLREQDGRGPHPGAGLWRGAL

SEQ ID NO: 15727 - protein, 94 aa, Artificial Sequence; identical to SEQ ID NO: 15726
  Synthetic polypeptide

SEQ ID NO: 15728 - protein, 94 aa, Artificial Sequence; identical to SEQ ID NO: 15726
  Synthetic polypeptide

SEQ ID NO: 15729 - protein, 94 aa, Artificial Sequence; identical to SEQ ID NO: 15726
  Synthetic polypeptide

SEQ ID NO: 15730 - protein, 94 aa, Artificial Sequence; identical to SEQ ID NO: 15726
  Synthetic polypeptide

SEQ ID NO: 15731 - protein, 11 aa, Artificial Sequence
  Synthetic polypeptide
ALCEYSLVPGG

SEQ ID NO: 15732 - protein, 11 aa, Artificial Sequence
  Synthetic polypeptide
ALCEYSLVPGG

SEQ ID NO: 15733 - protein, 11 aa, Artificial Sequence
  Synthetic polypeptide
ALCEYSLVPGG

SEQ ID NO: 15734 - protein, 11 aa, Artificial Sequence
  Synthetic polypeptide
ALCEYSLVPGG

SEQ ID NO: 15735 - protein, 11 aa, Artificial Sequence
  Synthetic polypeptide
ALCEYSLVPGG

SEQ ID NO: 15736 - protein, 757 aa, Artificial Sequence
  Synthetic polypeptide
GHECAGQAERSANIHWSLGGDVASDGDFLIFEGNRYSRKGFLFKSFAMSAVITEGVKPTLSELEKFEDQPEGIDLEVVTESTGKEREHNFQPGDNVEVCEGELINLQGKILSVDGNKITIMPKHEDLKDMLEFPAQELRKYFKMGDHVKVIAGRFEGDTGLIVRVEENFVILFSDLTMHELKVLPRDLQLCSETASGVDVGGQHEWGELVQLDPQTVGVIVRLERETFQVLNMYGKVVTVRHQAVTRKKDNRFAVALDSEQNNIHVKDIVKVIDGPHSGREGEIRHLFRSFAFLHCKKLVENGGMFVCKTRHLVLAGGSKPRDVTNFTVGGFAPMSPRISSPMHPSAGGQRGGFGSPGGGSGGMSRGRGRRDNELIGQTVRISQGPYKGYIGVVKDATESTARVELHSTCQTISVDRQRLTTVGSRRPGGMTSTYGRTPMYGSQTPMYGSGSRTPMYGSQTPLQDGSRTPHYGSQTPLHDGSRTPAQSGAWDPNNPNTPSRAEEEYEYAFDDEPTPSPQAYGGTPNPQTPGYPDPSSPQVNPQYNPQTPGTPAMYNTDQFSPYAAPSPQGSYQPSPSPQSYHQVAPSPAGYQNTHSPASYHPTPSPMAYQASPSPSPVGYSPMTPGAPSPGGYNPHTPGSGIEQNSSDWVTTDIQVKVRDTYLDTQVVGQTGVIRSVTGGMCSVYLKDSEKVVSISSEHLEPITPTKNNKVKVILGEDREATGVLLSIDGEDGIVRMDLDEQLKILNLRFLGKLLEA

SEQ ID NO: 15737 - protein, 757 aa, Artificial Sequence; identical to SEQ ID NO: 15736
  Synthetic polypeptide

SEQ ID NO: 15738 - protein, 757 aa, Artificial Sequence; identical to SEQ ID NO: 15736
  Synthetic polypeptide

SEQ ID NO: 15739 - protein, 757 aa, Artificial Sequence; identical to SEQ ID NO: 15736
  Synthetic polypeptide

SEQ ID NO: 15740 - protein, 757 aa, Artificial Sequence; identical to SEQ ID NO: 15736
  Synthetic polypeptide

SEQ ID NO: 15741 - protein, 73 aa, Artificial Sequence
  Synthetic polypeptide
ACIPSPGNDEQLLMPQIWGRACEVMSVQARLSALRIFTGPWGVMLPLMVTSSSLRGTVTAGRAFCSRASPCLL

SEQ ID NO: 15742 - protein, 73 aa, Artificial Sequence; identical to SEQ ID NO: 15741
  Synthetic polypeptide

SEQ ID NO: 15743 - protein, 73 aa, Artificial Sequence; identical to SEQ ID NO: 15741
  Synthetic polypeptide

SEQ ID NO: 15744 - protein, 73 aa, Artificial Sequence; identical to SEQ ID NO: 15741
  Synthetic polypeptide

SEQ ID NO: 15745 - protein, 73 aa, Artificial Sequence; identical to SEQ ID NO: 15741
  Synthetic polypeptide

SEQ ID NO: 15746 - protein, 71 aa, Artificial Sequence
  Synthetic polypeptide
GRARWLTPVIPALWEAEAGGSRGQETETILANTETTRWTKMVPRFLMSSTMIQFWYSSCAGHTNISKIIDR

SEQ ID NO: 15747 - protein, 71 aa, Artificial Sequence; identical to SEQ ID NO: 15746
  Synthetic polypeptide

SEQ ID NO: 15748 - protein, 71 aa, Artificial Sequence; identical to SEQ ID NO: 15746
  Synthetic polypeptide

SEQ ID NO: 15749 - protein, 36 aa, Artificial Sequence
  Synthetic polypeptide
SQHFGRPRRADHEVRRRRPSWLTRKQPGGRKWCQDS

SEQ ID NO: 15750 - protein, 36 aa, Artificial Sequence; identical to SEQ ID NO: 15749
  Synthetic polypeptide

SEQ ID NO: 15751 - protein, 36 aa, Artificial Sequence; identical to SEQ ID NO: 15749
  Synthetic polypeptide

SEQ ID NO: 15752 - protein, 36 aa, Artificial Sequence; identical to SEQ ID NO: 15749
  Synthetic polypeptide

SEQ ID NO: 15753 - protein, 36 aa, Artificial Sequence; identical to SEQ ID NO: 15749
  Synthetic polypeptide

SEQ ID NO: 15754 - protein, 36 aa, Artificial Sequence; identical to SEQ ID NO: 15749
  Synthetic polypeptide

SEQ ID NO: 15755 - protein, 36 aa, Artificial Sequence; identical to SEQ ID NO: 15749
  Synthetic polypeptide

SEQ ID NO: 15756 - protein, 268 aa, Artificial Sequence
  Synthetic polypeptide
HGNNPVDENGAKIPDEFDNDPILVQQLRRTYKYFKDYRQMIIEPTSPCLLPDPLQEPYYQPPYTLVLELTGVLLHPEWSLATGWRFKKRPGIETLFQQLAPLYEIVIFTSETGMTAFPLIDSVDPHGFISYRLFRDATRYMDGHHVKDISCLNRDPARVVVVDCKKEAFRLQPYNGVALRPWDGNSDDRVLLDLSAFLKTIALNGVEDVRTVLEHYALEDDPLAAFKQRQSRLEQEEQQRLAELSKSNKQNLFLGSLTSRLWPRSKQP

SEQ ID NO: 15757 - protein, 268 aa, Artificial Sequence; identical to SEQ ID NO: 15756
  Synthetic polypeptide

SEQ ID NO: 15758 - protein, 88 aa, Artificial Sequence
  Synthetic polypeptide
GRARWLTPVIPALWEAEAGGSRGQETETILANTETTRWTKMVPRFLMSSTMMIIEPTSPCLLPDPLQEPYYQPPYTLVLELTGVLLHP

SEQ ID NO: 15759 - protein, 88 aa, Artificial Sequence; identical to SEQ ID NO: 15758
  Synthetic polypeptide

SEQ ID NO: 15760 - protein, 56 aa, Artificial Sequence
  Synthetic polypeptide
HGNNPVDENGAKIPDEFDNDDHRAHQPLPSPRPSAGTVLPATLHARFGAHRRPLAS

SEQ ID NO: 15761 - protein, 56 aa, Artificial Sequence; identical to SEQ ID NO: 15760
  Synthetic polypeptide

SEQ ID NO: 15762 - protein, 56 aa, Artificial Sequence; identical to SEQ ID NO: 15760
  Synthetic polypeptide

SEQ ID NO: 15763 - protein, 197 aa, Artificial Sequence
  Synthetic polypeptide
GRARWLTPVIPALWEAEAGGSRGQETETILANTETTRWTKMVPRFLMSSTMMIIEPTSPCLLPDPLQEPYYQPPYTLVLELTGVLLHPEWSLATGWRFKKRPGIETLFQQLAPLYEIVIFTSETGMTAFPLIDSVDPHGFISYRLFRDATRYMDGHHVKDISCLNRDPARVVVVDCKKEAFRLQPYNGVALRPWDGN

SEQ ID NO: 15764 - protein, 44 aa, Artificial Sequence
  Synthetic polypeptide
GRARWLTPVIPALWEAEAGGSRGQETETILANTETTRWTKMVPR

SEQ ID NO: 15765 - protein, 44 aa, Artificial Sequence; identical to SEQ ID NO: 15764
  Synthetic polypeptide

SEQ ID NO: 15766 - protein, 71 aa, Artificial Sequence
  Synthetic polypeptide
SQHFGRPRRADHEVRRRRPSWLTRKQPGGRKWCQDDHRAHQPLPSPRPSAGTVLPATLHARFGAHRRPLAS

SEQ ID NO: 15767 - protein, 172 aa, Artificial Sequence
  Synthetic polypeptide
HGNNPVDENGAKMIIEPTSPCLLPDPLQEPYYQPPYTLVLELTGVLLHPEWSLATGWRFKKRPGIETLFQQLAPLYEIVIFTSETGMTAFPLIDSVDPHGFISYRLFRDATRYMDGHHVKDISCLNRDPARVVVVDCKKEAFRLQPYNGVALRPWDGNSDDRVLLDLSAFLK

SEQ ID NO: 15768 - protein, 64 aa, Artificial Sequence
  Synthetic polypeptide
GRARWLTPVIPALWEAEAGGSRGQETETILANTETTRWTKMVPRFLMSSTMRQSFTMLARMVLI

SEQ ID NO: 15769 - protein, 35 aa, Artificial Sequence
  Synthetic polypeptide
HGNNPVDENGAKIPDEFDNETEFHHVGQDGLDLTS

SEQ ID NO: 15770 - protein, 78 aa, Artificial Sequence
  Synthetic polypeptide
SQHFGRPRRADHEVRRRRPSWLTRKQPGGRKWCQGEGERDRGLARSPSLWIPDEFDNDPILVQQLRRTYKYFKDYRQM

SEQ ID NO: 15771 - protein, 55 aa, Artificial Sequence
  Synthetic polypeptide
HGNNPVDENGAKVRGKETEALPGVLVCGFLMSSTMIQFWYSSCAGHTNISKIIDR

SEQ ID NO: 15772 - protein, 147 aa, Artificial Sequence
  Synthetic polypeptide
HGNNPVDENGAKIPDEFDNDPILVQQLRRTYKYFKDYRQMIIEPTSPCLLPDPLQEPYYQPPYTLVLELTGVLLHPEWSLATGWRFKKRPGIETLFQQLAPLYEIVIFTSETGMTAFPLIDSVDPHGFISYRLFRDATRYMDGHHVK

SEQ ID NO: 15773 - protein, 120 aa, Artificial Sequence
  Synthetic polypeptide
RVCLPTRPGSVSRAGSGSDSSLCPPRPAQGWPQTMVDVIFADVAQPDQTRIVALNAHTFLRNGGHFVISIKANCIDSTASAEAVFASEVKKMQQENMKPQEQLTLEPYERDHAVVVGVYR

SEQ ID NO: 15774 - protein, 45 aa, Artificial Sequence
  Synthetic polypeptide
TLTCLFDDVSVSPPDLGASRGQGPGLTRLYVPHARPRAGHRQWWM

SEQ ID NO: 15775 - protein, 45 aa, Artificial Sequence; identical to SEQ ID NO: 15774
  Synthetic polypeptide

SEQ ID NO: 15776 - protein, 45 aa, Artificial Sequence; identical to SEQ ID NO: 15774
  Synthetic polypeptide

SEQ ID NO: 15777 - protein, 45 aa, Artificial Sequence; identical to SEQ ID NO: 15774
  Synthetic polypeptide

SEQ ID NO: 15778 - protein, 45 aa, Artificial Sequence; identical to SEQ ID NO: 15774
  Synthetic polypeptide

SEQ ID NO: 15779 - protein, 22 aa, Artificial Sequence
  Synthetic polypeptide
LVSMSPTPGPGLATDNGGCDLC

SEQ ID NO: 15780 - protein, 22 aa, Artificial Sequence
  Synthetic polypeptide
LVSMSPTPGPGLATDNGGCDLC

SEQ ID NO: 15781 - protein, 22 aa, Artificial Sequence
  Synthetic polypeptide
LVSMSPTPGPGLATDNGGCDLC

SEQ ID NO: 15782 - protein, 22 aa, Artificial Sequence
  Synthetic polypeptide
LVSMSPTPGPGLATDNGGCDLC

SEQ ID NO: 15783 - protein, 22 aa, Artificial Sequence
  Synthetic polypeptide
LVSMSPTPGPGLATDNGGCDLC

SEQ ID NO: 15784 - protein, 127 aa, Artificial Sequence
  Synthetic polypeptide
RVCLPTRPGSVSRAGSGSDSSLCPPRPAQGWPQTMVDVIFADVAQPDQTRIVALNAHTFLRNGGHFVISIKANCIDSTASAEAVFASEVKKMQQENMKPQEQLTLEPYERDHAVVVGVYRPPPKVKN

SEQ ID NO: 15785 - protein, 112 aa, Artificial Sequence
  Synthetic polypeptide
RVCLPTRPGSVSRAGSGSDSSLCPPRPAQGWPQTMVDVIFADVAQPDQTRIVALNAHTFLRNGGHFVISIKANCIDSTASAEAVFASEVKKMQQENMKPQEQLTLEPYERDH

SEQ ID NO: 15786 - protein, 103 aa, Artificial Sequence
  Synthetic polypeptide
RVCLPTRPGSVSRAGSGSDSSLCPPRPAQGWPQTMVDVIFADVAQPDQTRIVALNAHTFLRNGGHFVISIKANCIDSTASAEAVFASEVKKMQQENMKPQEQL

SEQ ID NO: 15787 - protein, 71 aa, Artificial Sequence
  Synthetic polypeptide
RVCLPTRPGSVSRAGSGSDSSLCPPRPAQGWPQTMVDVIFADVAQPDQTRIVALNAHTFLRNGGHFVISIK

SEQ ID NO: 15788 - protein, 195 aa, Artificial Sequence
  Synthetic polypeptide
MAPCLLQEGDDKIEYRAWNPFRSKLAAAILGGVDQIHIKPGAKVLYLGAASGTTVSHVSDIVGPDGLVYAVEFSHRSGRDLINLAKKRTNIIPVIEDARHPHKYRMLIAMVDVIFADVAQPDQTRIVALNAHTFLRNGGHFVISIKANCIDSTASAEAVFASEVKKMQQENMKPQEQLTLEPYERDHAVVVGVYR

SEQ ID NO: 15789 - protein, 26 aa, Artificial Sequence
  Synthetic polypeptide
LEWPLASFRKEMTKLSTEPGTPSAPS

SEQ ID NO: 15790 - protein, 26 aa, Artificial Sequence
  Synthetic polypeptide
LEWPLASFRKEMTKLSTEPGTPSAPS

SEQ ID NO: 15791 - protein, 26 aa, Artificial Sequence
  Synthetic polypeptide
LEWPLASFRKEMTKLSTEPGTPSAPS

SEQ ID NO: 15792 - protein, 26 aa, Artificial Sequence
  Synthetic polypeptide
LEWPLASFRKEMTKLSTEPGTPSAPS

SEQ ID NO: 15793 - protein, 26 aa, Artificial Sequence
  Synthetic polypeptide
LEWPLASFRKEMTKLSTEPGTPSAPS

SEQ ID NO: 15794 - protein, 26 aa, Artificial Sequence
  Synthetic polypeptide
LEWPLASFRKEMTKLSTEPGTPSAPS

SEQ ID NO: 15795 - protein, 26 aa, Artificial Sequence
  Synthetic polypeptide
LEWPLASFRKEMTKLSTEPGTPSAPS

SEQ ID NO: 15796 - protein, 26 aa, Artificial Sequence
  Synthetic polypeptide
LEWPLASFRKEMTKLSTEPGTPSAPS

SEQ ID NO: 15797 - protein, 24 aa, Artificial Sequence
  Synthetic polypeptide
SLSLSWECPSSDNLNGPLPPSGRR

SEQ ID NO: 15798 - protein, 24 aa, Artificial Sequence
  Synthetic polypeptide
SLSLSWECPSSDNLNGPLPPSGRR

SEQ ID NO: 15799 - protein, 24 aa, Artificial Sequence
  Synthetic polypeptide
SLSLSWECPSSDNLNGPLPPSGRR

SEQ ID NO: 15800 - protein, 24 aa, Artificial Sequence
  Synthetic polypeptide
SLSLSWECPSSDNLNGPLPPSGRR

SEQ ID NO: 15801 - protein, 24 aa, Artificial Sequence
  Synthetic polypeptide
SLSLSWECPSSDNLNGPLPPSGRR

SEQ ID NO: 15802 - protein, 24 aa, Artificial Sequence
  Synthetic polypeptide
SLSLSWECPSSDNLNGPLPPSGRR

SEQ ID NO: 15803 - protein, 24 aa, Artificial Sequence
  Synthetic polypeptide
SLSLSWECPSSDNLNGPLPPSGRR

SEQ ID NO: 15804 - protein, 24 aa, Artificial Sequence
  Synthetic polypeptide
SLSLSWECPSSDNLNGPLPPSGRR

SEQ ID NO: 15805 - protein, 24 aa, Artificial Sequence
  Synthetic polypeptide
SLSLSWECPSSDNLNGPLPPSGRR

SEQ ID NO: 15806 - protein, 202 aa, Artificial Sequence
  Synthetic polypeptide
MAPCLLQEGDDKIEYRAWNPFRSKLAAAILGGVDQIHIKPGAKVLYLGAASGTTVSHVSDIVGPDGLVYAVEFSHRSGRDLINLAKKRTNIIPVIEDARHPHKYRMLIAMVDVIFADVAQPDQTRIVALNAHTFLRNGGHFVISIKANCIDSTASAEAVFASEVKKMQQENMKPQEQLTLEPYERDHAVVVGVYRPPPKVKN

SEQ ID NO: 15807 - protein, 10 aa, Artificial Sequence
  Synthetic polypeptide
MAPCLLQEGD

SEQ ID NO: 15808 - protein, 12 aa, Artificial Sequence
  Synthetic polypeptide
LEWPLASFRKEM

SEQ ID NO: 15809 - protein, 187 aa, Artificial Sequence
  Synthetic polypeptide
MAPCLLQEGDDKIEYRAWNPFRSKLAAAILGGVDQIHIKPGAKVLYLGAASGTTVSHVSDIVGPDGLVYAVEFSHRSGRDLINLAKKRTNIIPVIEDARHPHKYRMLIAMVDVIFADVAQPDQTRIVALNAHTFLRNGGHFVISIKANCIDSTASAEAVFASEVKKMQQENMKPQEQLTLEPYERDH

SEQ ID NO: 15810 - protein, 178 aa, Artificial Sequence
  Synthetic polypeptide
MAPCLLQEGDDKIEYRAWNPFRSKLAAAILGGVDQIHIKPGAKVLYLGAASGTTVSHVSDIVGPDGLVYAVEFSHRSGRDLINLAKKRTNIIPVIEDARHPHKYRMLIAMVDVIFADVAQPDQTRIVALNAHTFLRNGGHFVISIKANCIDSTASAEAVFASEVKKMQQENMKPQEQL

SEQ ID NO: 15811 - protein, 146 aa, Artificial Sequence
  Synthetic polypeptide
MAPCLLQEGDDKIEYRAWNPFRSKLAAAILGGVDQIHIKPGAKVLYLGAASGTTVSHVSDIVGPDGLVYAVEFSHRSGRDLINLAKKRTNIIPVIEDARHPHKYRMLIAMVDVIFADVAQPDQTRIVALNAHTFLRNGGHFVISIK

SEQ ID NO: 15812 - protein, 72 aa, Artificial Sequence
  Synthetic polypeptide
MAPCLLQEGDDKIEYRAWNPFRSKLAAAILGGVDQIHIKPGAKVLYLGAASGTTVSHVSDIVGPDGLVYAVE

SEQ ID NO: 15813 - protein, 64 aa, Artificial Sequence
  Synthetic polypeptide
MAPCLLQEGDDKIEYRAWNPFRSKLAAAILGGVDQIHIKPGAKVLYLGAASGTTVSHVSDIVGP

SEQ ID NO: 15814 - protein, 51 aa, Artificial Sequence
  Synthetic polypeptide
MAPCLLQEGDDKIEYRAWNPFRSKLAAAILGGVDQIHIKPGAKVLYLGAAS

SEQ ID NO: 15815 - protein, 55 aa, Artificial Sequence
  Synthetic polypeptide
LCDLGQAPYLSERVPAHQLKQGSYQILLPYRAVVRITECLAQCLACTSGCCCGSC

SEQ ID NO: 15816 - protein, 55 aa, Artificial Sequence; identical to SEQ ID NO: 15815
  Synthetic polypeptide

SEQ ID NO: 15817 - protein, 22 aa, Artificial Sequence
  Synthetic polypeptide
HSAWPALRGAAVGAADGGGPLP

SEQ ID NO: 15818 - protein, 22 aa, Artificial Sequence
  Synthetic polypeptide
HSAWPALRGAAVGAADGGGPLP

SEQ ID NO: 15819 - protein, 701 aa, Artificial Sequence
  Synthetic polypeptide
ACTCSSAKAGVIPNPSALQGCCEDYRVPSTVPGLHFGVLLWELLTGEVPYREIDALAVAYGVAMNKLTLPIPSTCPEPFARLLEECWDPDPHGRPDFGSILKRLEVIEQSALFQMPLESFHSLQEDWKLEIQHMFDDLRTKEKELRSREEELLRAAQEQRFQEEQLRRREQELAEREMDIVERELHLLMCQLSQEKPRVRKRKGNFKRSRLLKLREGGSHISLPSGFEHKITVQASPTLDKRKGSDGASPPASPSIIPRLRAIRLTPVDCGGSSSGSSSGGSGTWSRGGPPKKEELVGGKKKGRTWGPSSTLQKERVGGEERLKGLGEGSKQWSSSAPNLGKSPKHTPIAPGFASLNEMEEFAEAEDGGSSVPPSPYSTPSYLSVPLPAEPSPGARAPWEPTPSAPPARWGHGARRRCDLALLGCATLLGAVGLGADVAEARAADGEEQRRWLDGLFFPRAGRFPRGLSPPARPHGRREDVGPGLGLAPSATLVSLSSVSDCNSTRSLLRSDSDEAAPAAPSPPPSPPAPTPTPSPSTNPLVDLELESFKKDPRQSLTPTHVTAACAVSRGHRRTPSDGALGQRGPPEPAGHGPGPRDLLDFPRLPDPQALFPARRRPPEFPGRPTTLTFAPRPRPAASRPRLDPWKLVSFGRTLTISPPSRPDTPESPGPPSVQPTLLDMDMEGQNQDSTVPLCGAHGSH

SEQ ID NO: 15820 - protein, 177 aa, Artificial Sequence
  Synthetic polypeptide
ACTCSSAKAGVIPNPSALQGCCEDYRVPSTVPGLHFGVLLWELLTGEVPYREIDALAVAYGVAMNKLTLPIPSTCPEPFARLLEECWDPDPHGRPDFGSILKRLEVIEQSALFQMPLESFHSLQEDWKLEIQHMFDDLRTKEKALSIRSQSRPLQLWISGKDPMGPAPLQAPASSPG

SEQ ID NO: 15821 - protein, 122 aa, Artificial Sequence
  Synthetic polypeptide
SLLWLPAALRTKSRFFPMASKALPGWPQPTSPGLSLTYPSSPLEQNWPPPEDVEPPLTSERLFSVYPLSSLFLQGLVQRSCFLWEAPQPPRLGWMLPLSFCTPLGLSPSRPCLWSHHSLNAS

SEQ ID NO: 15822 - protein, 122 aa, Artificial Sequence; identical to SEQ ID NO: 15821
  Synthetic polypeptide

SEQ ID NO: 15823 - protein, 122 aa, Artificial Sequence; identical to SEQ ID NO: 15821
  Synthetic polypeptide

SEQ ID NO: 15824 - protein, 122 aa, Artificial Sequence; identical to SEQ ID NO: 15821
  Synthetic polypeptide

SEQ ID NO: 15825 - protein, 122 aa, Artificial Sequence; identical to SEQ ID NO: 15821
  Synthetic polypeptide

SEQ ID NO: 15826 - protein, 122 aa, Artificial Sequence; identical to SEQ ID NO: 15821
  Synthetic polypeptide

SEQ ID NO: 15827 - protein, 122 aa, Artificial Sequence; identical to SEQ ID NO: 15821
  Synthetic polypeptide

SEQ ID NO: 15828 - protein, 122 aa, Artificial Sequence; identical to SEQ ID NO: 15821
  Synthetic polypeptide

SEQ ID NO: 15829 - protein, 122 aa, Artificial Sequence; identical to SEQ ID NO: 15821
  Synthetic polypeptide

SEQ ID NO: 15830 - protein, 122 aa, Artificial Sequence; identical to SEQ ID NO: 15821
  Synthetic polypeptide

SEQ ID NO: 15831 - protein, 122 aa, Artificial Sequence; identical to SEQ ID NO: 15821
  Synthetic polypeptide

SEQ ID NO: 15832 - protein, 122 aa, Artificial Sequence; identical to SEQ ID NO: 15821
  Synthetic polypeptide

SEQ ID NO: 15833 - protein, 122 aa, Artificial Sequence; identical to SEQ ID NO: 15821
  Synthetic polypeptide

SEQ ID NO: 15834 - protein, 122 aa, Artificial Sequence; identical to SEQ ID NO: 15821
  Synthetic polypeptide

SEQ ID NO: 15835 - protein, 122 aa, Artificial Sequence; identical to SEQ ID NO: 15821
  Synthetic polypeptide

SEQ ID NO: 15836 - protein, 122 aa, Artificial Sequence; identical to SEQ ID NO: 15821
  Synthetic polypeptide

SEQ ID NO: 15837 - protein, 122 aa, Artificial Sequence; identical to SEQ ID NO: 15821
  Synthetic polypeptide

SEQ ID NO: 15838 - protein, 122 aa, Artificial Sequence; identical to SEQ ID NO: 15821
  Synthetic polypeptide

SEQ ID NO: 15839 - protein, 482 aa, Artificial Sequence
  Synthetic polypeptide
ASVLRVPSKFPFPSGLSSEKLLPLGSPPTPQAGLDATSELLHTSRLVPIAALSMEPSLSECQLMKTERPRPNTFVIRCLQWTTVIERTFHVDSPDEREEWMRAIQMVANSLKQRAPGEDPMDYKCGSPSDSSTTEEMEVAVSKARAKVTMNDFDYLKLLGKGTFGKVILVREKATGRYYAMKILRKEVIIAKDEVAHTVTESRVLQNTRHPFLTALKYAFQTHDRLCFVMEYANGGELFFHLSRERVFTEERARFYGAEIVSALEYLHSRDVVYRDIKLENLMLDKDGHIKITDFGLCKEGISDGATMKTFCGTPEYLAPEVLEDNDYGRAVDWWGLGVVMYEMMCGRLPFYNQDHERLFELILMEEIRFPRTLSPEAKSLLAGLLKKDPKQRLGGGPSDAKEVMEHRFFLSINWQDVVQKKLLPPFKPQVTSEVDTRYFDDEFTAQSITITPPDRYDSLGLLELDQRTHFPQFSYSASIRE

SEQ ID NO: 15840 - protein, 482 aa, Artificial Sequence; identical to SEQ ID NO: 15839
  Synthetic polypeptide

SEQ ID NO: 15841 - protein, 439 aa, Artificial Sequence
  Synthetic polypeptide
ASVLRVPSKFPFPSGLSSEKLLPLGSPPTPQAGLDATSELLHTSRLVPIAALSMEPSLSECQLMKTERPRPNTFVIRCLQWTTVIERTFHVDSPDEREEWMRAIQMVANSLKQRAPGEDPMDYKCGSPSDSSTTEEMEVAVSKARAKVTMNDFDYLKLLGKGTFGKVILVREKATGRYYAMKILRKEVIIAKDEVAHTVTESRVLQNTRHPFLTALKYAFQTHDRLCFVMEYANGGELFFHLSRERVFTEERARFYGAEIVSALEYLHSRDVVYRDIKVLEDNDYGRAVDWWGLGVVMYEMMCGRLPFYNQDHERLFELILMEEIRFPRTLSPEAKSLLAGLLKKDPKQRLGGGPSDAKEVMEHRFFLSINWQDVVQKKLLPPFKPQVTSEVDTRYFDDEFTAQSITITPPDRYDSLGLLELDQRTHFPQFSYSASIRE

SEQ ID NO: 15842 - protein, 97 aa, Artificial Sequence
  Synthetic polypeptide
ASVLRVPSKFPFPSGLSSEKLLPLGSPPTPQAGLDATSELLHTSRLVPIAALSMEPSLSECQLMKTERPRPNTFVIRCLQWTTVIERTFHVDSPDES

SEQ ID NO: 15843 - protein, 185 aa, Artificial Sequence
  Synthetic polypeptide
ASVLRVPSKFPFPSGLSSEKLLPLGSPPTPQAGLDATSELLHTSRLVPIAALSMEPSLSECQLMKTERPRPNTFVIRCLQWTTVIERTFHVDSPDEREEWMRAIQMVANSLKQRAPGEDPMDYKCGSPSDSSTTEEMEVAVSKARAKVTMNDFDYLKLLGKGTFGKVILVREKATGRYYAMKILR

SEQ ID NO: 15844 - protein, 158 aa, Artificial Sequence
  Synthetic polypeptide
ASVLRVPSKFPFPSGLSSEKLLPLGSPPTPQAGLDATSELLHTSRLVPIAALSMEPSLSECQLMKTERPRPNTFVIRCLQWTTVIERTFHVDSPDEREEWMRAIQMVANSLKQRAPGEDPMDYKCGSPSDSSTTEEMEVAVSKARAKVTMNDFDYLKL

SEQ ID NO: 15845 - protein, 152 aa, Artificial Sequence
  Synthetic polypeptide
ASVLRVPSKFPFPSGLSSEKLLPLGSPPTPQAGLDATSELLHTSRLVPIAALSMEPSLSECQLMKTERPRPNTFVIRCLQWTTVIERTFHVDSPDEREEWMRAIQMVANSLKQRAPGEDPMDYKCGSPSDSSTTEEMEVAVSKARAKVTMND

SEQ ID NO: 15846 - protein, 135 aa, Artificial Sequence
  Synthetic polypeptide
ASVLRVPSKFPFPSGLSSEKLLPLGSPPTPQAGLDATSELLHTSRLVPIAALSMEPSLSECQLMKTERPRPNTFVIRCLQWTTVIERTFHVDSPDEREEWMRAIQMVANSLKQRAPGEDPMDYKCGSPSDSSTTE

SEQ ID NO: 15847 - protein, 134 aa, Artificial Sequence
  Synthetic polypeptide
ASVLRVPSKFPFPSGLSSEKLLPLGSPPTPQAGLDATSELLHTSRLVPIAALSMEPSLSECQLMKTERPRPNTFVIRCLQWTTVIERTFHVDSPDEREEWMRAIQMVANSLKQRAPGEDPMDYKCGSPSDSSTT

SEQ ID NO: 15848 - protein, 133 aa, Artificial Sequence
  Synthetic polypeptide
ASVLRVPSKFPFPSGLSSEKLLPLGSPPTPQAGLDATSELLHTSRLVPIAALSMEPSLSECQLMKTERPRPNTFVIRCLQWTTVIERTFHVDSPDEREEWMRAIQMVANSLKQRAPGEDPMDYKCGSPSDSST

SEQ ID NO: 15849 - protein, 131 aa, Artificial Sequence
  Synthetic polypeptide
ASVLRVPSKFPFPSGLSSEKLLPLGSPPTPQAGLDATSELLHTSRLVPIAALSMEPSLSECQLMKTERPRPNTFVIRCLQWTTVIERTFHVDSPDEREEWMRAIQMVANSLKQRAPGEDPMDYKCGSPSDS

SEQ ID NO: 15850 - protein, 120 aa, Artificial Sequence
  Synthetic polypeptide
ASVLRVPSKFPFPSGLSSEKLLPLGSPPTPQAGLDATSELLHTSRLVPIAALSMEPSLSECQLMKTERPRPNTFVIRCLQWTTVIERTFHVDSPDEREEWMRAIQMVANSLKQRAPGEDP

SEQ ID NO: 15851 - protein, 116 aa, Artificial Sequence
  Synthetic polypeptide
ASVLRVPSKFPFPSGLSSEKLLPLGSPPTPQAGLDATSELLHTSRLVPIAALSMEPSLSECQLMKTERPRPNTFVIRCLQWTTVIERTFHVDSPDEREEWMRAIQMVANSLKQRAP

SEQ ID NO: 15852 - protein, 108 aa, Artificial Sequence
  Synthetic polypeptide
ASVLRVPSKFPFPSGLSSEKLLPLGSPPTPQAGLDATSELLHTSRLVPIAALSMEPSLSECQLMKTERPRPNTFVIRCLQWTTVIERTFHVDSPDEREEWMRAIQMVA

SEQ ID NO: 15853 - protein, 100 aa, Artificial Sequence
  Synthetic polypeptide
ASVLRVPSKFPFPSGLSSEKLLPLGSPPTPQAGLDATSELLHTSRLVPIAALSMEPSLSECQLMKTERPRPNTFVIRCLQWTTVIERTFHVDSPDEREEW

SEQ ID NO: 15854 - protein, 97 aa, Artificial Sequence
  Synthetic polypeptide
ASVLRVPSKFPFPSGLSSEKLLPLGSPPTPQAGLDATSELLHTSRLVPIAALSMEPSLSECQLMKTERPRPNTFVIRCLQWTTVIERTFHVDSPDER

SEQ ID NO: 15855 - protein, 96 aa, Artificial Sequence
  Synthetic polypeptide
ASVLRVPSKFPFPSGLSSEKLLPLGSPPTPQAGLDATSELLHTSRLVPIAALSMEPSLSECQLMKTERPRPNTFVIRCLQWTTVIERTFHVDSPDE

SEQ ID NO: 15856 - protein, 68 aa, Artificial Sequence
  Synthetic polypeptide
ASVLRVPSKFPFPSGLSSEKLLPLGSPPTPQAGLDATSELLHTSRLVPIAALSMEPSLSECQLMKTER

SEQ ID NO: 15857 - protein, 55 aa, Artificial Sequence
  Synthetic polypeptide
QQFLTLLHGRITWEALPISGPSLGQVLQNLRAPQGAPLHSQGPWWRVTQATGSGT

SEQ ID NO: 15858 - protein, 55 aa, Artificial Sequence; identical to SEQ ID NO: 15857
  Synthetic polypeptide

SEQ ID NO: 15859 - protein, 55 aa, Artificial Sequence; identical to SEQ ID NO: 15857
  Synthetic polypeptide

SEQ ID NO: 15860 - protein, 35 aa, Artificial Sequence
  Synthetic polypeptide
ARYFRTSELPRGLHSTAKGHGGVLPRQRARVRKAR

SEQ ID NO: 15861 - protein, 35 aa, Artificial Sequence; identical to SEQ ID NO: 15860
  Synthetic polypeptide

SEQ ID NO: 15862 - protein, 35 aa, Artificial Sequence; identical to SEQ ID NO: 15860
  Synthetic polypeptide

SEQ ID NO: 15863 - protein, 158 aa, Artificial Sequence
  Synthetic polypeptide
NYLGSFTNFRPFLRPGTSEPQSSPGGSTPQPRAMVACYPGNGLGYVRHVDNPHGDGRCITCIYYLNQNWDVKVHGGLLQIFPEGRPVVANIEPLFDRLLIFWSDRRNPHEVKPAYATRYAITVWYFDAKERAAAKDKYQLASGQKGVQVPVSQPPTPT

SEQ ID NO: 15864 - protein, 158 aa, Artificial Sequence; identical to SEQ ID NO: 15863
  Synthetic polypeptide

SEQ ID NO: 15865 - protein, 158 aa, Artificial Sequence; identical to SEQ ID NO: 15863
  Synthetic polypeptide

SEQ ID NO: 15866 - protein, 39 aa, Artificial Sequence
  Synthetic polypeptide
HRKEVRQRLREIERREAGRWGRGQEKDRRMREEDAERAV

SEQ ID NO: 15867 - protein, 283 aa, Artificial Sequence
  Synthetic polypeptide
GRKMQKELFELFSGFLKYFPGAHRQVYKNLQEINAYIGHSVEKHRETLDPSAPKDLIDTYLLHMEKEKSNAHSEFSHQNLNLNTLSLFFAGTETTSTTLRYGFLLMLKYPHVAERVYREIEQVIGPHRPPELHDRAKMPYTEAVIYEIQRFSDLLPMGVPHIVTQHTSFRGYIIPKDTEVFLILSTALHDPHYFEKPDAFNPDHFLDANGALKKTEAFIPFSLGKRICLGEGIARAELFLFFTTILQNFSMASPVAPEDIDLTPQECGVGKIPPTYQIRFLPR

SEQ ID NO: 15868 - protein, 51 aa, Artificial Sequence
  Synthetic polypeptide
GRQWVTQKGSETETKRDRKERGREMGQRPRKRQKDEGGRCRKSCLSSSLAS

SEQ ID NO: 15869 - protein, 46 aa, Artificial Sequence
  Synthetic polypeptide
GRAPSGSACDPALWEAEAGGSLGARSLRAAWATWAEQDILFLLRSP

SEQ ID NO: 15870 - protein, 46 aa, Artificial Sequence; identical to SEQ ID NO: 15869
  Synthetic polypeptide

SEQ ID NO: 15871 - protein, 705 aa, Artificial Sequence
  Synthetic polypeptide
EQPGQRGLNKTSSFSCEAHNAKGVTTSRTATITVLPQQPRNLHLVSRQPTELEVAWTPGLSGIYPLTHCTLQAVLSNDGMGIQAGEPDPPEEPLTSQASVPPHQLRLGSLHPHTPYHIRVACTSSQGPSSWTHWLPVETPEGVPLGPPENISATRNGSQAFVHWQEPRAPLQGTLLGYRLAYQGQDTPEVLMDIGLRQEVTLELQGDGSVSNLTVCVAAYTAAGDGPWSLPVPLEAWRPGQAQPVHQLVKEPSTPAFSWPWWYVLLGAVVAAACVLILALFLVHRRKKETRYGEVFEPTVERGELVVRYRVRKSYSRRTTEATLNSLGISEELKEKLRDVMVDRHKVALGKTLGEGEFGAVMEGQLNQDDSILKVAVKTMKIAICTRSELEDFLSEAVCMKEFDHPNVMRLIGVCFQGSERESFPAPVVILPFMKHGDLHSFLLYSRLGDQPVYLPTQMLVKFMADIASGMEYLSTKRFIHRDLAARNCMLNENMSVCVADFGLSKKIYNGDYYRQGRIAKMPVKWIAIESLADRVYTSKSDVWSFGVTMWEIATRGQTPYPGVENSEIYDYLRQGNRLKQPADCLDGLYALMSRCWELNPQDRPSFTELREDLENTLKALPPAQEPDEILYVNMDEGGGYPEPPGAAGGADPPTQPDPKDSCSCLTAAEVHPAGRYVLCPSTTPSPAQPADRGSPAAPGQEDGA

SEQ ID NO: 15872 - protein, 34 aa, Artificial Sequence
  Synthetic polypeptide
PGTEWLCLRSSTLGGRGGRIAWGQKFESSLGNVG

SEQ ID NO: 15873 - protein, 34 aa, Artificial Sequence; identical to SEQ ID NO: 15872
  Synthetic polypeptide

SEQ ID NO: 15874 - protein, 696 aa, Artificial Sequence
  Synthetic polypeptide
EQPGQRGLNKTSSFSCEAHNAKGVTTSRTATITVLPQQPRNLHLVSRQPTELEVAWTPGLSGIYPLTHCTLQAVLSNDGMGIQAGEPDPPEEPLTSQASVPPHQLRLGSLHPHTPYHIRVACTSSQGPSSWTHWLPVETPEGVPLGPPENISATRNGSQAFVHWQEPRAPLQGTLLGYRLAYQGQDTPEVLMDIGLRQEVTLELQGDGSVSNLTVCVAAYTAAGDGPWSLPVPLEAWRPVKEPSTPAFSWPWWYVLLGAVVAAACVLILALFLVHRRKKETRYGEVFEPTVERGELVVRYRVRKSYSRRTTEATLNSLGISEELKEKLRDVMVDRHKVALGKTLGEGEFGAVMEGQLNQDDSILKVAVKTMKIAICTRSELEDFLSEAVCMKEFDHPNVMRLIGVCFQGSERESFPAPVVILPFMKHGDLHSFLLYSRLGDQPVYLPTQMLVKFMADIASGMEYLSTKRFIHRDLAARNCMLNENMSVCVADFGLSKKIYNGDYYRQGRIAKMPVKWIAIESLADRVYTSKSDVWSFGVTMWEIATRGQTPYPGVENSEIYDYLRQGNRLKQPADCLDGLYALMSRCWELNPQDRPSFTELREDLENTLKALPPAQEPDEILYVNMDEGGGYPEPPGAAGGADPPTQPDPKDSCSCLTAAEVHPAGRYVLCPSTTPSPAQPADRGSPAAPGQEDGA

SEQ ID NO: 15875 - protein, 332 aa, Artificial Sequence
  Synthetic polypeptide
LVYGGCIEPGPGHWGELSRTPVPSKPQDKVEAAEATPVALDSDTSGAENAAVSAMLHAVAASRLPVCSQQQGEPDLTEHEKVAILAQLYHEKPLVFLERFRTGLREEHLACFGHVRGDHRADFYCAEVARQGTARPRTLRTRLRNRRYAALRELIQGGEYFSDEQMRFRAPLLYEQYIGQYLTQEELSARTPTHQPPKPGSPGRPACPLSNLLLQSYEERELQQRLLQQQEEEEACLEEEEEEEDSDEEDQRSGKDSEAWVPDSEERLILREEFTSRMHQRFLDGKDGDFDYSTVDDNPDFDNLDIVARDEEERYFDEEEPEDAPSPELDGD

SEQ ID NO: 15876 - protein, 14 aa, Artificial Sequence
  Synthetic polypeptide
LWKPDGDDWYMEAA

SEQ ID NO: 15877 - protein, 30 aa, Artificial Sequence
  Synthetic polypeptide
HHWPRIGNCGSQMEMIGIWRLHRAWTWALG

SEQ ID NO: 15878 - protein, 53 aa, Artificial Sequence
  Synthetic polypeptide
LVPGGQLPAHPGETGARATAVAGGETRGEGEPGTGGGEFAEPAVPAGERAGEY

SEQ ID NO: 15879 - protein, 53 aa, Artificial Sequence; identical to SEQ ID NO: 15878
  Synthetic polypeptide

SEQ ID NO: 15880 - protein, 53 aa, Artificial Sequence; identical to SEQ ID NO: 15878
  Synthetic polypeptide

SEQ ID NO: 15881 - protein, 53 aa, Artificial Sequence; identical to SEQ ID NO: 15878
  Synthetic polypeptide

SEQ ID NO: 15882 - protein, 807 aa, Artificial Sequence
  Synthetic polypeptide
WCLGHSMGVVNIDWSPEASSLHILERQVQELQQLLVERQEEKESLGREVESLQSRLSLLENERENTSYDVTTLQDEEGELPDLPGAEVLLSRQLSPSAQEHLASLQEQVAVLTRQNQELMEKVQILENFEKDETQMEVEALAEVIPLALYDSLRAEFDQLRRQHAEALQALRQQETREVPREEGAACGESEVAGATATKNGPTHMELNGSVAPETKVNGAETIDEEAAGDETMEARTMEAEATGAEATGAEATGAKVTETKPTGAEVREMETTEEEANMETKPTGAQATDTETTGVEAMGVEATKTKAEEAEMQAYGVGAGQAEPPVTGTTNMEATGSRATGMESTGVSATGVENPGVEATVPGISAGPILHPGAAEASEKLQVELETRIRGLEEALRQREREAAAELEAALGKCEAAEAEAGRLRERVREAEGSGASGGGGGDTTQLRAALEQAREDLRDRDSRLRELEAASACLDEARASRLLAEEEARGLRAELAQREEARLEQSRELEVLREQLATARATGEQQRTAAAELGRARDAAEARVAELPAACEEARQGLAELREASEALRQSVVPASEHRRLQEEALELRGRAASLEQEVVATGKEAARLRAELERERVCSVALSEHERIVGTLQANVAQLEGQLEELGRRHEKTSAEVFQVQREALFMKSERHAAEAQLATAEQQLRGLRTEAERARQAQSRAQEALDKAKEKDKKITELSKEVFNLKEALKEQPAALATPEVEALRDQVKDLQQQLQEAARDHSSVVALYRSHLLYAIQGQMDEDVQRILSQILQMQRLQAQGR

SEQ ID NO: 15883 - protein, 807 aa, Artificial Sequence; identical to SEQ ID NO: 15882
  Synthetic polypeptide

SEQ ID NO: 15884 - protein, 807 aa, Artificial Sequence; identical to SEQ ID NO: 15882
  Synthetic polypeptide

SEQ ID NO: 15885 - protein, 102 aa, Artificial Sequence
  Synthetic polypeptide
FISICITCCYWACICFMCVHPFDCEPARAGMADGAWVTVWASSILIGPRRPAPCTSWRDRCKSYSSCWWRDKRRRRAWDGRWRVCRAGCPCWRTSGRILAMT

SEQ ID NO: 15886 - protein, 102 aa, Artificial Sequence; identical to SEQ ID NO: 15885
  Synthetic polypeptide

SEQ ID NO: 15887 - protein, 102 aa, Artificial Sequence; identical to SEQ ID NO: 15885
  Synthetic polypeptide

SEQ ID NO: 15888 - protein, 102 aa, Artificial Sequence; identical to SEQ ID NO: 15885
  Synthetic polypeptide

SEQ ID NO: 15889 - protein, 529 aa, Artificial Sequence
  Synthetic polypeptide
WCLGHSMGVVNIDWSPEASSLHILERQVQELQQLLVERQEEKESLGREVESLQSRLSLLENERENTSYDVTTLQDEEGELPDLPGAEVLLSRQLSPSAQEHLASLQEQVAVLTRQNQELMEKVQILENFEKDETQMEVEALAEVIPLALYDSLRAEFDQLRRQHAEALQALRQQETREVPREEGAACGESEVAGATATKNGPTHMELNGSVAPETKVNGAETIDEEAAGDETMEARTMEAEATGAEATGAEATGAKVTETKPTGAEVREMETTEEEANMETKPTGAQATDTETTGVEAMGVEATKTKAEEAEMQAYGVGAGQAEPPVTGTTNMEATGSRATGMESTGVSATGVENPGVEATVPGISAGPILHPGAAEASEKLQVELETRIRGLEEALRQREREAAAELEAALGKCEAAEAEAGRLRERVREAEGSGASGGGGGDTTQLRAALEQAREDLRDRDSRLRELEAASACLDEARASRLLAEEEARGLRAELAQREEARLEQSRELEVLREQLATARATGEQQR

SEQ ID NO: 15890 - protein, 59 aa, Artificial Sequence
  Synthetic polypeptide
KKERLTGALWIPYFQIWGAKLRSCPSPPSPATTPNPWRTRMLWPSPVNLRLRTQPTCGG

SEQ ID NO: 15891 - protein, 59 aa, Artificial Sequence; identical to SEQ ID NO: 15890
  Synthetic polypeptide

SEQ ID NO: 15892 - protein, 59 aa, Artificial Sequence; identical to SEQ ID NO: 15890
  Synthetic polypeptide

SEQ ID NO: 15893 - protein, 59 aa, Artificial Sequence; identical to SEQ ID NO: 15890
  Synthetic polypeptide

SEQ ID NO: 15894 - protein, 46 aa, Artificial Sequence
  Synthetic polypeptide
KKKGSLEHFGFRIFRFGVLNCGAAQALHLQQQLQTRGGQGCCGLHL

SEQ ID NO: 15895 - protein, 46 aa, Artificial Sequence; identical to SEQ ID NO: 15894
  Synthetic polypeptide

SEQ ID NO: 15896 - protein, 46 aa, Artificial Sequence; identical to SEQ ID NO: 15894
  Synthetic polypeptide

SEQ ID NO: 15897 - protein, 46 aa, Artificial Sequence; identical to SEQ ID NO: 15894
  Synthetic polypeptide

SEQ ID NO: 15898 - protein, 561 aa, Artificial Sequence
  Synthetic polypeptide
TAELPKPSISSNNSKPVEDKDAVAFTCEPETQDATYLWWVNNQSLPVSPRLQLSNGNRTLTLFNVTRNDTASYKCETQNPVSARRSDSVILNVLYGPDAPTISPLNTSYRSGENLNLSCHAASNPPAQYSWFVNGTFQQSTQELFIPNITVNNSGSYTCQAHNSDTGLNRTTVTTITVYEPPKPFITSNNSNPVEDEDAVALTCEPEIQNTTYLWWVNNQSLPVSPRLQLSNDNRTLTLLSVTRNDVGPYECGIQNKLSVDHSDPVILNVLYGPDDPTISPSYTYYRPGVNLSLSCHAASNPPAQYSWLIDGNIQQHTQELFISNITEKNSGLYTCQANNSASGHSRTTVKTITVSAELPKPSISSNNSKPVEDKDAVAFTCEPEAQNTTYLWWVNGQSLPVSPRLQLSNGNRTLTLFNVTRNDARAYVCGIQNSVSANRSDPVTLDVLYGPDTPIISPPDSSYLSGANLNLSCHSASNPSPQYSWRINGIPQQHTQVLFIAKITPNNNGTYACFVSNLATGRNNSIVKSITVSASGTSPGLSAGATVGIMIGVLVGVALI

SEQ ID NO: 15899 - protein, 562 aa, Artificial Sequence
  Synthetic polypeptide
TAELPKPSISSNNSKPVEDKDAVAFTCEPETQDATYLWWVNNQSLPVSPRLQLSNGNRTLTLFNVTRNDTASYKCETQNPVSARRSDSVILNVLYGPDAPTISPLNTSYRSGENLNLSCHAASNPPAQYSWFVNGTFQQSTQELFIPNITVNNSGSYTCQAHNSDTGLNRTTVTTITVYAEPPKPFITSNNSNPVEDEDAVALTCEPEIQNTTYLWWVNNQSLPVSPRLQLSNDNRTLTLLSVTRNDVGPYECGIQNKLSVDHSDPVILNVLYGPDDPTISPSYTYYRPGVNLSLSCHAASNPPAQYSWLIDGNIQQHTQELFISNITEKNSGLYTCQANNSASGHSRTTVKTITVSAELPKPSISSNNSKPVEDKDAVAFTCEPEAQNTTYLWWVNGQSLPVSPRLQLSNGNRTLTLFNVTRNDARAYVCGIQNSVSANRSDPVTLDVLYGPDTPIISPPDSSYLSGANLNLSCHSASNPSPQYSWRINGIPQQHTQVLFIAKITPNNNGTYACFVSNLATGRNNSIVKSITVSASGTSPGLSAGATVGIMIGVLVGVALI

SEQ ID NO: 15900 - protein, 562 aa, Artificial Sequence; identical to SEQ ID NO: 15899
  Synthetic polypeptide

SEQ ID NO: 15901 - protein, 153 aa, Artificial Sequence
  Synthetic polypeptide
TAELPKPSISSNNSKPVEDKDAVAFTCEPETQDATYLWWVNNQSLPVSPRLQLSNGNRTLTLFNVTRNDTASYKCETQNPVSARRSDSVILNVLSEPPKPFITSNNSNPVEDEDAVALTCEPEIQNTTYLWWVNNQSLPVSPRLQLSNDNRTL

SEQ ID NO: 15902 - protein, 206 aa, Artificial Sequence
  Synthetic polypeptide
TAELPKPSISSNNSKPVEDKDAVAFTCEPEAQNTTYLWWVNGQSLPVSPRLQLSNGNRTLTLFNVTRNDARAYVCGIQNSVSANRSDPVTLDVLYGPDTPIISPPDSSYLSGANLNLSCHSASNPSPQYSWRINGIPQQHTQVLFIAKITPNNNGTYACFVSNLATGRNNSIVKSITVSASGTSPGLSAGATVGIMIGVLVGVALI

SEQ ID NO: 15903 - protein, 206 aa, Artificial Sequence; identical to SEQ ID NO: 15902
  Synthetic polypeptide

SEQ ID NO: 15904 - protein, 206 aa, Artificial Sequence; identical to SEQ ID NO: 15902
  Synthetic polypeptide

SEQ ID NO: 15905 - protein, 59 aa, Artificial Sequence; identical to SEQ ID NO: 15890
  Synthetic polypeptide

SEQ ID NO: 15906 - protein, 59 aa, Artificial Sequence; identical to SEQ ID NO: 15890
  Synthetic polypeptide

SEQ ID NO: 15907 - protein, 59 aa, Artificial Sequence; identical to SEQ ID NO: 15890
  Synthetic polypeptide

SEQ ID NO: 15908 - protein, 46 aa, Artificial Sequence; identical to SEQ ID NO: 15894
  Synthetic polypeptide

SEQ ID NO: 15909 - protein, 46 aa, Artificial Sequence; identical to SEQ ID NO: 15894
  Synthetic polypeptide

SEQ ID NO: 15910 - protein, 46 aa, Artificial Sequence; identical to SEQ ID NO: 15894
  Synthetic polypeptide

SEQ ID NO: 15911 - protein, 46 aa, Artificial Sequence; identical to SEQ ID NO: 15894
  Synthetic polypeptide

SEQ ID NO: 15912 - protein, 34 aa, Artificial Sequence
  Synthetic polypeptide
TAELPKPSISSNNSKPVEDKDAVAFTCEPEAQNT

SEQ ID NO: 15913 - protein, 54 aa, Artificial Sequence
  Synthetic polypeptide
KKERLTGALWIPYFQIWGAKLRSCPSPPSPATTPNPWRTRMLWPSPVNLRLRTQ

SEQ ID NO: 15914 - protein, 70 aa, Artificial Sequence
  Synthetic polypeptide
SADHSIPAMDLSSLGDCLRTSILGHLGTHTLSEGASEAYPDESVQASSPDLSAGTAVSIMIGVLAGMALI

SEQ ID NO: 15915 - protein, 70 aa, Artificial Sequence; identical to SEQ ID NO: 15914
  Synthetic polypeptide

SEQ ID NO: 15916 - protein, 70 aa, Artificial Sequence; identical to SEQ ID NO: 15914
  Synthetic polypeptide

SEQ ID NO: 15917 - protein, 70 aa, Artificial Sequence; identical to SEQ ID NO: 15914
  Synthetic polypeptide

SEQ ID NO: 15918 - protein, 45 aa, Artificial Sequence
  Synthetic polypeptide
GIALELPSWATSELTHFRRVRQKHIQMSQYKQVHLTSQLGPLSAS

SEQ ID NO: 15919 - protein, 45 aa, Artificial Sequence; identical to SEQ ID NO: 15918
  Synthetic polypeptide

SEQ ID NO: 15920 - protein, 45 aa, Artificial Sequence; identical to SEQ ID NO: 15918
  Synthetic polypeptide

SEQ ID NO: 15921 - protein, 45 aa, Artificial Sequence; identical to SEQ ID NO: 15918
  Synthetic polypeptide

SEQ ID NO: 15922 - protein, 22 aa, Artificial Sequence
  Synthetic polypeptide
NFHPGPPRNSHTFGGCVRSISR

SEQ ID NO: 15923 - protein, 22 aa, Artificial Sequence
  Synthetic polypeptide
NFHPGPPRNSHTFGGCVRSISR

SEQ ID NO: 15924 - protein, 22 aa, Artificial Sequence
  Synthetic polypeptide
NFHPGPPRNSHTFGGCVRSISR

SEQ ID NO: 15925 - protein, 22 aa, Artificial Sequence
  Synthetic polypeptide
NFHPGPPRNSHTFGGCVRSISR

SEQ ID NO: 15926 - protein, 163 aa, Artificial Sequence
  Synthetic polypeptide
SADHSIPAMDLSSLGDCLRTSILGHLGTHTLSEGASEAYPAEPPKPSITSNNFNPVENKDIVVLTCQPETQNTTYLWWVNNQSLLVSPRLLLSTDNRTLVLLSATKNDIGPYECEIQNPVGASRSDPVTLNVRYESVQASSPDLSAGTAVSIMIGVLAGMALI

SEQ ID NO: 15927 - protein, 163 aa, Artificial Sequence; identical to SEQ ID NO: 15926
  Synthetic polypeptide

SEQ ID NO: 15928 - protein, 49 aa, Artificial Sequence
  Synthetic polypeptide
GIALELPSWATSELTHFRRVRQKHIQRSHPSPPSPATTSIRWRTKILWF

SEQ ID NO: 15929 - protein, 49 aa, Artificial Sequence; identical to SEQ ID NO: 15928
  Synthetic polypeptide

SEQ ID NO: 15930 - protein, 49 aa, Artificial Sequence
  Synthetic polypeptide
NFHPGPPRNSHTFGGCVRSISSGATQALHHQQQLQSGGEQRYCGFNLST

SEQ ID NO: 15931 - protein, 49 aa, Artificial Sequence; identical to SEQ ID NO: 15930
  Synthetic polypeptide

SEQ ID NO: 15932 - protein, 284 aa, Artificial Sequence
  Synthetic polypeptide
SADHSIPAMDLSSLGDCLRTSILGHLGTHTLSEGASEAYPASLLTFWNLPNSAQTNIDVVPFNVAEGKEVLLVVHNESQNLYGYNWYKGERVHANYRIIGYVKNISQENAPGPAHNGRETIYPNGTLLIQNVTHNDAGFYTLHVIKENLVNEEVTRQFYVFSEPPKPSITSNNFNPVENKDIVVLTCQPETQNTTYLWWVNNQSLLVSPRLLLSTDNRTLVLLSATKNDIGPYECEIQNPVGASRSDPVTLNVRYESVQASSPDLSAGTAVSIMIGVLAGMALI

SEQ ID NO: 15933 - protein, 284 aa, Artificial Sequence; identical to SEQ ID NO: 15932
  Synthetic polypeptide

SEQ ID NO: 15934 - protein, 29 aa, Artificial Sequence
  Synthetic polypeptide
GIALELPSWATSELTHFRRVRQKHIQPRF

SEQ ID NO: 15935 - protein, 29 aa, Artificial Sequence
  Synthetic polypeptide
GIALELPSWATSELTHFRRVRQKHIQPRF

SEQ ID NO: 15936 - protein, 29 aa, Artificial Sequence
  Synthetic polypeptide
GIALELPSWATSELTHFRRVRQKHIQPRF

SEQ ID NO: 15937 - protein, 29 aa, Artificial Sequence
  Synthetic polypeptide
GIALELPSWATSELTHFRRVRQKHIQPRF

SEQ ID NO: 15938 - protein, 38 aa, Artificial Sequence
  Synthetic polypeptide
NFHPGPPRNSHTFGGCVRSISSLAFNLLEPAKQCPDQY

SEQ ID NO: 15939 - protein, 38 aa, Artificial Sequence; identical to SEQ ID NO: 15938
  Synthetic polypeptide

SEQ ID NO: 15940 - protein, 38 aa, Artificial Sequence; identical to SEQ ID NO: 15938
  Synthetic polypeptide

SEQ ID NO: 15941 - protein, 38 aa, Artificial Sequence; identical to SEQ ID NO: 15938
  Synthetic polypeptide

SEQ ID NO: 15942 - protein, 191 aa, Artificial Sequence
  Synthetic polypeptide
SADHSIPAMDLSSLGDCLRTSILGHLGTHTLSEGASEAYPASLLTFWNLPNSAQTNIDVVPFNVAEGKEVLLVVHNESQNLYGYNWYKGERVHANYRIIGYVKNISQENAPGPAHNGRETIYPNGTLLIQNVTHNDAGFYTLHVIKENLVNEEVTRQFYVFYESVQASSPDLSAGTAVSIMIGVLAGMALI

SEQ ID NO: 15943 - protein, 191 aa, Artificial Sequence; identical to SEQ ID NO: 15942
  Synthetic polypeptide

SEQ ID NO: 15944 - protein, 16 aa, Artificial Sequence
  Synthetic polypeptide
AKHNELWQPSSKSPGS

SEQ ID NO: 15945 - protein, 16 aa, Artificial Sequence
  Synthetic polypeptide
AKHNELWQPSSKSPGS

SEQ ID NO: 15946 - protein, 16 aa, Artificial Sequence
  Synthetic polypeptide
AKHNELWQPSSKSPGS

SEQ ID NO: 15947 - protein, 16 aa, Artificial Sequence
  Synthetic polypeptide
AKHNELWQPSSKSPGS

SEQ ID NO: 15948 - protein, 16 aa, Artificial Sequence
  Synthetic polypeptide
AKHNELWQPSSKSPGS

SEQ ID NO: 15949 - protein, 16 aa, Artificial Sequence
  Synthetic polypeptide
AKHNELWQPSSKSPGS

SEQ ID NO: 15950 - protein, 37 aa, Artificial Sequence
  Synthetic polypeptide
PSTMSSGSLPQKVREAESPRMGGYRQAGQAQRACSLR

SEQ ID NO: 15951 - protein, 37 aa, Artificial Sequence; identical to SEQ ID NO: 15950
  Synthetic polypeptide

SEQ ID NO: 15952 - protein, 37 aa, Artificial Sequence; identical to SEQ ID NO: 15950
  Synthetic polypeptide

SEQ ID NO: 15953 - protein, 37 aa, Artificial Sequence; identical to SEQ ID NO: 15950
  Synthetic polypeptide

SEQ ID NO: 15954 - protein, 37 aa, Artificial Sequence; identical to SEQ ID NO: 15950
  Synthetic polypeptide

SEQ ID NO: 15955 - protein, 37 aa, Artificial Sequence; identical to SEQ ID NO: 15950
  Synthetic polypeptide

SEQ ID NO: 15956 - protein, 106 aa, Artificial Sequence
  Synthetic polypeptide
AKHNELAPYDENWFYTRAASTARHLYLRGGAGVGSMTKIYGGRQRNGVMPSHFSRGSKSVARRVLQALEGLKMVEKDQDGGRKLTPQGQRDLDRIAGQVAAANKKH

SEQ ID NO: 15957 - protein, 106 aa, Artificial Sequence; identical to SEQ ID NO: 15956
  Synthetic polypeptide

SEQ ID NO: 15958 - protein, 35 aa, Artificial Sequence
  Synthetic polypeptide
PSTMSLLPTMRTGSTRELLPQRGTCTSGVALGLAP

SEQ ID NO: 15959 - protein, 35 aa, Artificial Sequence; identical to SEQ ID NO: 15958
  Synthetic polypeptide

SEQ ID NO: 15960 - protein, 35 aa, Artificial Sequence; identical to SEQ ID NO: 15958
  Synthetic polypeptide

SEQ ID NO: 15961 - protein, 63 aa, Artificial Sequence
  Synthetic polypeptide
AKHNELAPYDENWFYTRAGGLILSIYTEADSLGLDPSFTSGCVSSASTARHLYLRGGAGVGSM

SEQ ID NO: 15962 - protein, 20 aa, Artificial Sequence
  Synthetic polypeptide
PSTMSLLPTMRTGSTRELVV

SEQ ID NO: 15963 - protein, 37 aa, Artificial Sequence
  Synthetic polypeptide
AKHNELAPYDENWFYTRAASTARHLYLRGGAGVGSMT

SEQ ID NO: 15964 - protein, 61 aa, Artificial Sequence
  Synthetic polypeptide
AKHNELAPYDENWFYTRAGEELSFHSAAPVPPGWRWGWLHDQDLWGTSEKRRHAQPLQPRL

SEQ ID NO: 15965 - protein, 61 aa, Artificial Sequence
  Synthetic polypeptide
PSTMSLLPTMRTGSTRELVRNLASTARHLYLRGGAGVGSMTKIYGGRQRNGVMPSHFSRGS

SEQ ID NO: 15966 - protein, 33 aa, Artificial Sequence
  Synthetic polypeptide
AKHNELAPYDENWFYTRAELHCHQAGVHWCRLG

SEQ ID NO: 15967 - protein, 33 aa, Artificial Sequence
  Synthetic polypeptide
PSTMSLLPTMRTGSTRELSCTVTRLEYTGAVSA

SEQ ID NO: 15968 - protein, 35 aa, Artificial Sequence
  Synthetic polypeptide
ARQLTSVIPALWKAEEGGSLEEQPGLPASEVRADP

SEQ ID NO: 15969 - protein, 35 aa, Artificial Sequence; identical to SEQ ID NO: 15968
  Synthetic polypeptide

SEQ ID NO: 15970 - protein, 75 aa, Artificial Sequence
  Synthetic polypeptide
SQHFGRLRKVDHLRSSQGFLHLKFARTRENQVVLGQHSGPFPSVPELVLHYSSRPLPVQGAEHLALLYPVVTQTP

SEQ ID NO: 15971 - protein, 75 aa, Artificial Sequence; identical to SEQ ID NO: 15970
  Synthetic polypeptide

SEQ ID NO: 15972 - protein, 41 aa, Artificial Sequence
  Synthetic polypeptide
AGRGGSCLSSQHFGRPRWANHLRKCILQQRPIPAPGGPKEE

SEQ ID NO: 15973 - protein, 41 aa, Artificial Sequence; identical to SEQ ID NO: 15972
  Synthetic polypeptide

SEQ ID NO: 15974 - protein, 41 aa, Artificial Sequence; identical to SEQ ID NO: 15972
  Synthetic polypeptide

SEQ ID NO: 15975 - protein, 41 aa, Artificial Sequence; identical to SEQ ID NO: 15972
  Synthetic polypeptide

SEQ ID NO: 15976 - protein, 117 aa, Artificial Sequence
  Synthetic polypeptide
WARWLMPVIPAFWEAEVGESPEEMHSTATSYTGPGGPQRRVRTALERGRTRGARAFIQPPSRNRPPASRTWRQDPAPARDPAPAPGPATPSLWSGSLLDQAPPSSRGQKGSPKWERS

SEQ ID NO: 15977 - protein, 117 aa, Artificial Sequence; identical to SEQ ID NO: 15976
  Synthetic polypeptide

SEQ ID NO: 15978 - protein, 117 aa, Artificial Sequence; identical to SEQ ID NO: 15976
  Synthetic polypeptide

SEQ ID NO: 15979 - protein, 117 aa, Artificial Sequence; identical to SEQ ID NO: 15976
  Synthetic polypeptide

SEQ ID NO: 15980 - protein, 35 aa, Artificial Sequence
  Synthetic polypeptide
AGRGGSCLSSQHFGRPRKCILQQRPIPAPGGPKEE

SEQ ID NO: 15981 - protein, 35 aa, Artificial Sequence; identical to SEQ ID NO: 15980
  Synthetic polypeptide

SEQ ID NO: 15982 - protein, 35 aa, Artificial Sequence; identical to SEQ ID NO: 15980
  Synthetic polypeptide

SEQ ID NO: 15983 - protein, 35 aa, Artificial Sequence; identical to SEQ ID NO: 15980
  Synthetic polypeptide

SEQ ID NO: 15984 - protein, 111 aa, Artificial Sequence
  Synthetic polypeptide
MGAVAHACHPSILGGRGNAFYSNVLYRPRGAPKKSEDCSGEGKDQRGQSIYSTSFPQPAPRQPHLASRPCPSPRPCPSPRPGHPVSMVRVSPRPSPTQQPRPKGFPKVGEE

SEQ ID NO: 15985 - protein, 111 aa, Artificial Sequence; identical to SEQ ID NO: 15984
  Synthetic polypeptide

SEQ ID NO: 15986 - protein, 111 aa, Artificial Sequence; identical to SEQ ID NO: 15984
  Synthetic polypeptide

SEQ ID NO: 15987 - protein, 111 aa, Artificial Sequence; identical to SEQ ID NO: 15984
  Synthetic polypeptide

SEQ ID NO: 15988 - protein, 111 aa, Artificial Sequence
  Synthetic polypeptide
WARWLMPVIPAFWEAEEMHSTATSYTGPGGPQRRVRTALERGRTRGARAFIQPPSRNRPPASRTWRQDPAPARDPAPAPGPATPSLWSGSLLDQAPPSSRGQKGSPKWERS

SEQ ID NO: 15989 - protein, 111 aa, Artificial Sequence; identical to SEQ ID NO: 15988
  Synthetic polypeptide

SEQ ID NO: 15990 - protein, 111 aa, Artificial Sequence; identical to SEQ ID NO: 15988
  Synthetic polypeptide

SEQ ID NO: 15991 - protein, 111 aa, Artificial Sequence; identical to SEQ ID NO: 15988
  Synthetic polypeptide

SEQ ID NO: 15992 - protein, 47 aa, Artificial Sequence
  Synthetic polypeptide
GLSFLTCRMEPQPPPDLLRQNLRTPFLHGGSEPRSHAHLDGRHRDRR

SEQ ID NO: 15993 - protein, 51 aa, Artificial Sequence
  Synthetic polypeptide
VFSRVEWSPNPRLTFCVKTYERLFYMVAPSPEAMRIWMDVIVTAADENHAP

SEQ ID NO: 15994 - protein, 7 aa, Artificial Sequence
  Synthetic polypeptide
NGAPTPA

SEQ ID NO: 15995 - protein, 3 aa, Artificial Sequence
  Synthetic polypeptide
LDN

SEQ ID NO: 15996 - protein, 683 aa, Artificial Sequence
  Synthetic polypeptide
AGRGGSHLQSQHFGTPRRVDHLRSRVQDQADHYGETPSLLKIQKISWITKKFVKGSTEKNKLRLQRDQERLGKQLKLRAEREEKEKLKEEAKRAKEEAKKKKEEEKELKEKERREKREKDEKEKAEKQRLKEERRKERQEALEAKLEEKRKKEEEKRLREEEKRIKAEKAEITRFFQKPKTPQAPKTLAGSCGKFAPFEIKEHMVLAPRRRTAFHPDLCSQLDQLLQQQSGEFSFLKDLKGRQPLRSGPTHVSTRNADIFNSDVVIVERGKGDGVPERRKFGRMKLLQFCENHRPAYWGTWNKKTALIRARDPWAQDTKLLDYEVDSDEEWEEEEPGESLSHSEGDDDDDMGEDEDEDDGFFVPHGYLSEDEGVTEECADPENHKVRQKLKAKEWDEFLAKGKRFRVLQPVKIGCVWAADRDCAGDDLKVLQQFAACFLETLPAQEEQTPKASKRERRDEQILAQLLPLLHGNVNGSKVIIREFQEHCRRGLLSNHTGSPRSPSTTYLHTPTPSEDAAIPSKSRLKRLISENSVYEKRPDFRMCWYVHPQVLQSFQQEHLPVPCQWSYVTSVPSAPKEDSGSVPSTGPSQGTPISLKRKSAGSMCITQFMKKRRHDGQIGAEDMDGFQADTEEEEEEEGDCMIVDVPDAAEVQAPCGAASGAGGGVGVDTGKATLTSSPLGAS

SEQ ID NO: 15997 - protein, 7 aa, Artificial Sequence
  Synthetic polypeptide
KYRKLAG

SEQ ID NO: 15998 - protein, 9 aa, Artificial Sequence
  Synthetic polypeptide
DRAIALQPG

SEQ ID NO: 15999 - protein, 38 aa, Artificial Sequence
  Synthetic polypeptide
RLPVIPATPEAEAGEPLEPRRQRLRWPEIVPLHSSLDN

SEQ ID NO: 16000 - protein, 668 aa, Artificial Sequence
  Synthetic polypeptide
SQLRRRLRRENRLNPGGRGCGGLRSCHCTPAWITKKFVKGSTEKNKLRLQRDQERLGKQLKLRAEREEKEKLKEEAKRAKEEAKKKKEEEKELKEKERREKREKDEKEKAEKQRLKEERRKERQEALEAKLEEKRKKEEEKRLREEEKRIKAEKAEITRFFQKPKTPQAPKTLAGSCGKFAPFEIKEHMVLAPRRRTAFHPDLCSQLDQLLQQQSGEFSFLKDLKGRQPLRSGPTHVSTRNADIFNSDVVIVERGKGDGVPERRKFGRMKLLQFCENHRPAYWGTWNKKTALIRARDPWAQDTKLLDYEVDSDEEWEEEEPGESLSHSEGDDDDDMGEDEDEDDGFFVPHGYLSEDEGVTEECADPENHKVRQKLKAKEWDEFLAKGKRFRVLQPVKIGCVWAADRDCAGDDLKVLQQFAACFLETLPAQEEQTPKASKRERRDEQILAQLLPLLHGNVNGSKVIIREFQEHCRRGLLSNHTGSPRSPSTTYLHTPTPSEDAAIPSKSRLKRLISENSVYEKRPDFRMCWYVHPQVLQSFQQEHLPVPCQWSYVTSVPSAPKEDSGSVPSTGPSQGTPISLKRKSAGSMCITQFMKKRRHDGQIGAEDMDGFQADTEEEEEEEGDCMIVDVPDAAEVQAPCGAASGAGGGVGVDTGKATLTSSPLGAS

SEQ ID NO: 16001 - protein, 25 aa, Artificial Sequence
  Synthetic polypeptide
PLRSFKDSVEQSRQSAWPGPGTSPS

SEQ ID NO: 16002 - protein, 25 aa, Artificial Sequence
  Synthetic polypeptide
PLRSFKDSVEQSRQSAWPGPGTSPS

SEQ ID NO: 16003 - protein, 43 aa, Artificial Sequence
  Synthetic polypeptide
IGMVTVLSLLGVSRIQWNNPGKVLGQDLAQAHPEPFYPRPSHQ

SEQ ID NO: 16004 - protein, 43 aa, Artificial Sequence; identical to SEQ ID NO: 16003
  Synthetic polypeptide

SEQ ID NO: 16005 - protein, 269 aa, Artificial Sequence
  Synthetic polypeptide
EFQGFSGTIQAKCLARTWHKPILSPSILDHLINNDRKLPPEYNLPHTYVEMQSLQIAAFLFTVCHVVIVVQDWFTDLSLYRFLQTAEMVKPSTPSPSHESSSSSGSDEGTEYYPHLVFLQNKARREDFCPRKLRQMHLMIDQLMAHSHLRYKGTLSMLQCNVFPGLPPDFLDSEVNLFLVPFMDSEAESENPPRAGPGSSPLFSLLPGYRGHPSFQSLVSKLRSQVMSMARPQLSHTILTEKNWFHYAARIWDGVRKSSALAEYSRLLA

SEQ ID NO: 16006 - protein, 244 aa, Artificial Sequence
  Synthetic polypeptide
EFQGFSGTIQAKCLARTWHKPILSPSILDHLINNDRKLPPEYNLPHTYVEMQSLQIAAFLFTVCHVVIVVQDWFTDLSLYRFLQTAEMVKPSTPSPSHESSSSSGSDEGTEYYPHLVFLQNKARREDFCPRKLRQMHLMIDQLMAHSHLRYKGTLSMLQCNVFPGLPPDFLDSEVNLFLVPFMDSEAESENPPRAGPGSSPLFSLLPGYRGHPSFQSLVSKLRSQVMSMARPQLSHTILTEKNW

SEQ ID NO: 16007 - protein, 56 aa, Artificial Sequence
  Synthetic polypeptide
GLPGSLLGGVNQASRPAPSRVLAHRKRPTKRSPTSQPPGRPARDPPMRHRWQPLPP

SEQ ID NO: 16008 - protein, 56 aa, Artificial Sequence; identical to SEQ ID NO: 16007
  Synthetic polypeptide

SEQ ID NO: 16009 - protein, 56 aa, Artificial Sequence; identical to SEQ ID NO: 16007
  Synthetic polypeptide

SEQ ID NO: 16010 - protein, 36 aa, Artificial Sequence
  Synthetic polypeptide
TKRADQLPAGSWHTGKGPQREAQPASPQAAPPGTHQ

SEQ ID NO: 16011 - protein, 36 aa, Artificial Sequence; identical to SEQ ID NO: 16010
  Synthetic polypeptide

SEQ ID NO: 16012 - protein, 36 aa, Artificial Sequence; identical to SEQ ID NO: 16010
  Synthetic polypeptide

SEQ ID NO: 16013 - protein, 415 aa, Artificial Sequence
  Synthetic polypeptide
VAWGTSPGLPVPLGFRNGMVRPPWQLVRRSKPSEPTSSQQGPGTQEKAHKEKPNQPAPRPPRQGPTNEAQMAAAAALARLEQKQSRAWGPTSQDTIRNQVRKELQAEATVSGSPEAPGTNVHFSTDPVAASIMKIYTFNKDQDRVKLGVDTIAKYLDNIHLHPEEEKYRKIKLQNKVFQERINCLEGTHEFFEAIGFQKVLLPAQDQEDPEEFYVLSETTLAQPQSLERHKEQLLAAEPVRAKLDRQRRVFQPSPLASQFELPGDFFNLTAEEIKREQRLRSEAVERLSVLRTKAMREKEEQRGLRKYNYTLLRVRLPDGCLLQGTFYARERLGAVYGFVREALQSDWLPFELLASGGQKLSEDENLALNECGLVPSALLTFSWDMAVLEDIKAAGAEPDSILKPELLSAIEKLL

SEQ ID NO: 16014 - protein, 458 aa, Artificial Sequence
  Synthetic polypeptide
VAWGTSPGLPVPLGFRNGMVRPPWQLVRRSKPSEPTSSQQGPGTQEKAHKEKPNQPAPRPPRQGPTNEAQMAAAAALARLEQKQSRAWGPTSQDTIRNQVRKELQAEATVSGSPEAPGTNVVSEPREEGSAHLAVPGVYFTCPLTGATLRKDQRDACIKEAILLHFSTDPVAASIMKIYTFNKDQDRVKLGVDTIAKYLDNIHLHPEEEKYRKIKLQNKVFQERINCLEGTHEFFEAIGFQKVLLPAQDQEDPEEFYVLSETTLAQPQSLERHKEQLLAAEPVRAKLDRQRRVFQPSPLASQFELPGDFFNLTAEEIKREQRLRSEAVERLSVLRTKAMREKEEQRGLRKYNYTLLRVRLPDGCLLQGTFYARERLGAVYGFVREALQSDWLPFELLASGGQKLSEDENLALNECGLVPSALLTFSWDMAVLEDIKAAGAEPDSILKPELLSAIEKLL

SEQ ID NO: 16015 - protein, 170 aa, Artificial Sequence
  Synthetic polypeptide
VAWGTSPGLPVPLGFRNGMVRPPWQLVRRSKPSEPTSSQQGPGTQEKAHKEKPNQPAPRPPRQGPTNEAQMAAAAALARLEQKQSRAWGPTSQDTIRNQVRKELQAEATVSGSPEAPGTNVVSEPREEGSAHLAVPGVYFTCPLTGATLRKDQRDACIKEAILLHFSTDP

SEQ ID NO: 16016 - protein, 58 aa, Artificial Sequence
  Synthetic polypeptide
EKRLEGNSTTEAAFVSGVWRLVAPAHTPTPAGGAREPPVPGPAKPRPCPLLPAGANFL

SEQ ID NO: 16017 - protein, 57 aa, Artificial Sequence
  Synthetic polypeptide
KRDWKETAQQKQHLSPGCGGWWPLPTPPHLQAEPENHQYQDLLNPDPAPYCQLVPTS

SEQ ID NO: 16018 - protein, 42 aa, Artificial Sequence
  Synthetic polypeptide
KETGRKQHNRSSICLRGVEAGGPCPHPHTCRRSQRTTSTRTC

SEQ ID NO: 16019 - protein, 59 aa, Artificial Sequence
  Synthetic polypeptide
EKRLEGNSTTEAAFVSGVWRLVAPAHTPTPAGGAREPPVPAGPAKPRPCPLLPAGANFL

SEQ ID NO: 16020 - protein, 58 aa, Artificial Sequence
  Synthetic polypeptide
KRDWKETAQQKQHLSPGCGGWWPLPTPPHLQAEPENHQYQQDLLNPDPAPYCQLVPTS

SEQ ID NO: 16021 - protein, 43 aa, Artificial Sequence
  Synthetic polypeptide
KETGRKQHNRSSICLRGVEAGGPCPHPHTCRRSQRTTSTSRTC

SEQ ID NO: 16022 - protein, 35 aa, Artificial Sequence
  Synthetic polypeptide
GRAQWLTPVIPALWNTESRRTRATSTQMERPTTQT

SEQ ID NO: 16023 - protein, 35 aa, Artificial Sequence; identical to SEQ ID NO: 16022
  Synthetic polypeptide

SEQ ID NO: 16024 - protein, 27 aa, Artificial Sequence
  Synthetic polypeptide
SQHFGTPSRAEHELPLPRWKDPQPRPD

SEQ ID NO: 16025 - protein, 27 aa, Artificial Sequence
  Synthetic polypeptide
SQHFGTPSRAEHELPLPRWKDPQPRPD

SEQ ID NO: 16026 - protein, 190 aa, Artificial Sequence
  Synthetic polypeptide
PGAVAHTCNPSTLEHRVAQNTSYLYPDGKTHNPDLTELGQAEPQQRIHVSEEQLQLYWAMDSTFELCKICAESNKDVKIEPCGHLLCSCCLAAWQHSDSQTCPFCRCEIKGWEAVSIYQFHGQATAEDSGNSSDQEGRELELGQVPLSAPPLPPRPDLPPRKPRNAQPKVRLLKGNSPPAALGPQDPAPA

SEQ ID NO: 16027 - protein, 190 aa, Artificial Sequence; identical to SEQ ID NO: 16026
  Synthetic polypeptide

SEQ ID NO: 16028 - protein, 44 aa, Artificial Sequence
  Synthetic polypeptide
ISAWHTEPRMCEFKCYPRCEASSGAPWSCRATCCHLFLDCTSPW

SEQ ID NO: 16029 - protein, 44 aa, Artificial Sequence; identical to SEQ ID NO: 16028
  Synthetic polypeptide

SEQ ID NO: 16030 - protein, 71 aa, Artificial Sequence
  Synthetic polypeptide
DNIRSALRSVPGTRSPGCASSSATRGARPARGHRGAAVPPAATCSWTVHLPGDLAAPRCTCEPPECGRLPP

SEQ ID NO: 16031 - protein, 71 aa, Artificial Sequence; identical to SEQ ID NO: 16030
  Synthetic polypeptide

SEQ ID NO: 16032 - protein, 486 aa, Artificial Sequence
  Synthetic polypeptide
LSESLHLSASVSLSPMALHGLHEIIFAVHLDQCLAHGAQDVRVQVLPEVRGQLGGTVELPCHLLPPVPGLYISLVTWQRPDAPANHQNVAAFHPKMGPSFPSPKPGSERLSFVSAKQSTGQDTEAELQDATLALHGLTVEDEGNYTCEFATFPKGSVRGMTWLRVIAKPKNQAEAQKVTFSQDPTTVALCISKEGRPPARISWLSSLDWEAKETQVSGTLAGTVTVTSRFTLVPSGRADGVTVTCKVEHESFEEPALIPVTLSVRYPPEVSISGYDDNWYLGRTDATLSCDVRSNPEPTGYDWSTTSGTFPTSAVAQGSQLVIHAVDSLFNTTFVCTVTNAVGMGRAEQVIFVRETPRASPRDVGPLVWGAVGGTLLVLLLLAGGSLAFILLRVRRRRKSPGGAGGGASGDGGFYDPKAQVLGNGDPVFWTPVVPGPMEPDGKDEEEEEEEEKAEKGLMLPPPPALEDDMESQLDGSLISRRAVYV

SEQ ID NO: 16033 - protein, 545 aa, Artificial Sequence
  Synthetic polypeptide
LSESLHLSASVSLSPMALHGLHEIIFAVHLDQCLAHGAQDVRVQVLPEVRGQLGGTVELPCHLLPPVPGLYISLVTWQRPDAPANHQNVAAFHPKMGPSFPSPKPGSERLSFVSAKQSTGQDTEAELQDATLALHGLTVEDEGNYTCEFATFPKGSVRGMTWLRVIAKPKNQAEAQKVTFSQDPTTVALCISKEGRPPARISWLSSLDWEAKETQVSGTLAGTVTVTSRFTLVPSGRADGVTVTCKVEHESFEEPALIPVTLSVRYPPEVSISGYDDNWYLGRTDATLSCDVRSNPEPTGYDWSTTSGTFPTSAVAQGSQLVIHAVDSLFNTTFVCTVTNAVGMGRAEQVIFVRETPNTAGAGATGGIIGGIIAAIIATAVAATGILICRQQRKEQTLQGAEEDEDLEGPPSYKPPTPKAKLEAQEMPSQLFTLGASEHSPLKTPYFDAGASCTEQEMPRYHELPTLEERSGPLHPGATSLGSPIPVPPGPPAVEDVSLDLEDEEGEEEEEYLDKINPIYDALSYSSPSDSYQGKGFVMSRAMYV

SEQ ID NO: 16034 - protein, 46 aa, Artificial Sequence
  Synthetic polypeptide
EAEAADHEEPRMCEFKCYPRCEASSGAPWSCRATCCHLFLDCTSPW

SEQ ID NO: 16035 - protein, 46 aa, Artificial Sequence; identical to SEQ ID NO: 16034
  Synthetic polypeptide

SEQ ID NO: 16036 - protein, 68 aa, Artificial Sequence
  Synthetic polypeptide
HFERPRRRITRSPGCASSSATRGARPARGHRGAAVPPAATCSWTVHLPGDLAAPRCTCEPPECGRLPP

SEQ ID NO: 16037 - protein, 68 aa, Artificial Sequence; identical to SEQ ID NO: 16036
  Synthetic polypeptide

SEQ ID NO: 16038 - protein, 471 aa, Artificial Sequence
  Synthetic polypeptide
PGTVADACNPSTLRGRGGGSRGAQDVRVQVLPEVRGQLGGTVELPCHLLPPVPGLYISLVTWQRPDAPANHQNVAAFHPKMGPSFPSPKPGSERLSFVSAKQSTGQDTEAELQDATLALHGLTVEDEGNYTCEFATFPKGSVRGMTWLRVIAKPKNQAEAQKVTFSQDPTTVALCISKEGRPPARISWLSSLDWEAKETQVSGTLAGTVTVTSRFTLVPSGRADGVTVTCKVEHESFEEPALIPVTLSVRYPPEVSISGYDDNWYLGRTDATLSCDVRSNPEPTGYDWSTTSGTFPTSAVAQGSQLVIHAVDSLFNTTFVCTVTNAVGMGRAEQVIFVRETPRASPRDVGPLVWGAVGGTLLVLLLLAGGSLAFILLRVRRRRKSPGGAGGGASGDGGFYDPKAQVLGNGDPVFWTPVVPGPMEPDGKDEEEEEEEEKAEKGLMLPPPPALEDDMESQLDGSLISRRAVYV

SEQ ID NO: 16039 - protein, 530 aa, Artificial Sequence
  Synthetic polypeptide
PGTVADACNPSTLRGRGGGSRGAQDVRVQVLPEVRGQLGGTVELPCHLLPPVPGLYISLVTWQRPDAPANHQNVAAFHPKMGPSFPSPKPGSERLSFVSAKQSTGQDTEAELQDATLALHGLTVEDEGNYTCEFATFPKGSVRGMTWLRVIAKPKNQAEAQKVTFSQDPTTVALCISKEGRPPARISWLSSLDWEAKETQVSGTLAGTVTVTSRFTLVPSGRADGVTVTCKVEHESFEEPALIPVTLSVRYPPEVSISGYDDNWYLGRTDATLSCDVRSNPEPTGYDWSTTSGTFPTSAVAQGSQLVIHAVDSLFNTTFVCTVTNAVGMGRAEQVIFVRETPNTAGAGATGGIIGGIIAAIIATAVAATGILICRQQRKEQTLQGAEEDEDLEGPPSYKPPTPKAKLEAQEMPSQLFTLGASEHSPLKTPYFDAGASCTEQEMPRYHELPTLEERSGPLHPGATSLGSPIPVPPGPPAVEDVSLDLEDEEGEEEEEYLDKINPIYDALSYSSPSDSYQGKGFVMSRAMYV

SEQ ID NO: 16040 - protein, 457 aa, Artificial Sequence
  Synthetic polypeptide
WTVETTKGAQDVRVQVLPEVRGQLGGTVELPCHLLPPVPGLYISLVTWQRPDAPANHQNVAAFHPKMGPSFPSPKPGSERLSFVSAKQSTGQDTEAELQDATLALHGLTVEDEGNYTCEFATFPKGSVRGMTWLRVIAKPKNQAEAQKVTFSQDPTTVALCISKEGRPPARISWLSSLDWEAKETQVSGTLAGTVTVTSRFTLVPSGRADGVTVTCKVEHESFEEPALIPVTLSVRYPPEVSISGYDDNWYLGRTDATLSCDVRSNPEPTGYDWSTTSGTFPTSAVAQGSQLVIHAVDSLFNTTFVCTVTNAVGMGRAEQVIFVRETPRASPRDVGPLVWGAVGGTLLVLLLLAGGSLAFILLRVRRRRKSPGGAGGGASGDGGFYDPKAQVLGNGDPVFWTPVVPGPMEPDGKDEEEEEEEEKAEKGLMLPPPPALEDDMESQLDGSLISRRAVYV

SEQ ID NO: 16041 - protein, 58 aa, Artificial Sequence
  Synthetic polypeptide
VESKQQIHKDWNNGQWRLQKEPRMCEFKCYPRCEASSGAPWSCRATCCHLFLDCTSPW

SEQ ID NO: 16042 - protein, 58 aa, Artificial Sequence; identical to SEQ ID NO: 16041
  Synthetic polypeptide

SEQ ID NO: 16043 - protein, 130 aa, Artificial Sequence
  Synthetic polypeptide
KKKRKKMWYMSTMEYYTAIKKDGIMSFAPTRMELEAIILSKIESQIPHVLTYKWNLNSRYTKIGIMDSGDYKRSPGCASSSATRGARPARGHRGAAVPPAATCSWTVHLPGDLAAPRCTCEPPECGRLPP

SEQ ID NO: 16044 - protein, 130 aa, Artificial Sequence; identical to SEQ ID NO: 16043
  Synthetic polypeptide

SEQ ID NO: 16045 - protein, 516 aa, Artificial Sequence
  Synthetic polypeptide
WTVETTKGAQDVRVQVLPEVRGQLGGTVELPCHLLPPVPGLYISLVTWQRPDAPANHQNVAAFHPKMGPSFPSPKPGSERLSFVSAKQSTGQDTEAELQDATLALHGLTVEDEGNYTCEFATFPKGSVRGMTWLRVIAKPKNQAEAQKVTFSQDPTTVALCISKEGRPPARISWLSSLDWEAKETQVSGTLAGTVTVTSRFTLVPSGRADGVTVTCKVEHESFEEPALIPVTLSVRYPPEVSISGYDDNWYLGRTDATLSCDVRSNPEPTGYDWSTTSGTFPTSAVAQGSQLVIHAVDSLFNTTFVCTVTNAVGMGRAEQVIFVRETPNTAGAGATGGIIGGIIAAIIATAVAATGILICRQQRKEQTLQGAEEDEDLEGPPSYKPPTPKAKLEAQEMPSQLFTLGASEHSPLKTPYFDAGASCTEQEMPRYHELPTLEERSGPLHPGATSLGSPIPVPPGPPAVEDVSLDLEDEEGEEEEEYLDKINPIYDALSYSSPSDSYQGKGFVMSRAMYV

SEQ ID NO: 16046 - protein, 99 aa, Artificial Sequence
  Synthetic polypeptide
SGRPWAPSSEASVLLPGSEQRFDALWASVSPILEIGDARPRWSKRWRQSRSPSCASRPSGRAASAGNWHWVAFGITCAGCRHCLSRCRRSCSAPRSPRN

SEQ ID NO: 16047 - protein, 99 aa, Artificial Sequence; identical to SEQ ID NO: 16046
  Synthetic polypeptide

SEQ ID NO: 16048 - protein, 99 aa, Artificial Sequence; identical to SEQ ID NO: 16046
  Synthetic polypeptide

SEQ ID NO: 16049 - protein, 99 aa, Artificial Sequence; identical to SEQ ID NO: 16046
  Synthetic polypeptide

SEQ ID NO: 16050 - protein, 305 aa, Artificial Sequence
  Synthetic polypeptide
DRRCQAKVEQAVETEPEPELRQQTEWQSGQRWELALGRFWDYLRWVQTLSEQVQEELLSSQVTQELRALMDETMKELKAYKSELEEQLTPVAEETRARLSKELQAAQARLGADMEDVCGRLVQYRGEVQAMLGQSTEELRVRLASHLRKLRKRLLRDADDLQKRLAVYQAGAREGAERGLSAIRERLGPLVEQGRVRAATVGSLAGQPLQERAQAWGERLRARMEEMGSRTRDRLDEVKEQVAEVRAKLEEQAQQIRLQAEAFQARLKSWFEPLVEDMQRQWAGLVEKVQAAVGTSAAPVPSDNH

SEQ ID NO: 16051 - protein, 204 aa, Artificial Sequence
  Synthetic polypeptide
DRRCQAKVEQAVETEPEPELRQQTEWQSGQRWELALGRFWDYLRWVQTLSEQVQEELLSSQVTQELRALMDETMKELKAYKSELEEQLTPVAEETRARLSKELQAAQARLGADMEDVCGRLVQYRGEVQAMLGQSTEELRVRLASHLRKLRKRLLRDADDLQKRLAVYQAGAREGAERGLSAIRERLGPLVEQGRVRAATVGSL

SEQ ID NO: 16052 - protein, 231 aa, Artificial Sequence
  Synthetic polypeptide
DRRCQAKVEQAVETEPEPELRQQTEWQSGQRWELALGRFWDYLRWVQTLSEQVQEELLSSQVTQELRALMDETMKELKAYKSELEEQLTPVAEETRARLSKELQAAQARLGADMEDVCGRLVQYRGEVQAMLGQSTEELRVRLASHLRKLRKRLLRDADDLQKRLAVYQAGAREGAERGLSAIRERLGPLVEQGRVRAATVGSLAGQPLQERAQAWGERLRARMEEMGSRT

SEQ ID NO: 16053 - protein, 207 aa, Artificial Sequence
  Synthetic polypeptide
DRRCQAKVEQAVETEPEPELRQQTEWQSGQRWELALGRFWDYLRWVQTLSEQVQEELLSSQVTQELRALMDETMKELKAYKSELEEQLTPVAEETRARLSKELQAAQARLGADMEDVCGRLVQYRGEVQAMLGQSTEELRVRLASHLRKLRKRLLRDADDLQKRLAVYQAGAREGAERGLSAIRERLGPLVEQGRVRAATVGSLAGQ

SEQ ID NO: 16054 - protein, 26 aa, Artificial Sequence
  Synthetic polypeptide
PHHFGRPREWFSETFQKVKEKLKIDS

SEQ ID NO: 16055 - protein, 26 aa, Artificial Sequence
  Synthetic polypeptide
PHHFGRPREWFSETFQKVKEKLKIDS

SEQ ID NO: 16056 - protein, 26 aa, Artificial Sequence
  Synthetic polypeptide
PHHFGRPREWFSETFQKVKEKLKIDS

SEQ ID NO: 16057 - protein, 26 aa, Artificial Sequence
  Synthetic polypeptide
PSTVAHTCNPTTLEGRGSGFQRHFRK

SEQ ID NO: 16058 - protein, 26 aa, Artificial Sequence
  Synthetic polypeptide
PSTVAHTCNPTTLEGRGSGFQRHFRK

SEQ ID NO: 16059 - protein, 26 aa, Artificial Sequence
  Synthetic polypeptide
PSTVAHTCNPTTLEGRGSGFQRHFRK

SEQ ID NO: 16060 - protein, 26 aa, Artificial Sequence
  Synthetic polypeptide
PSTVAHTCNPTTLEGRGSGFQRHFRK

SEQ ID NO: 16061 - protein, 26 aa, Artificial Sequence
  Synthetic polypeptide
PSTVAHTCNPTTLEGRGSGFQRHFRK

SEQ ID NO: 16062 - protein, 26 aa, Artificial Sequence
  Synthetic polypeptide
PSTVAHTCNPTTLEGRGSGFQRHFRK

SEQ ID NO: 16063 - protein, 26 aa, Artificial Sequence
  Synthetic polypeptide
PSTVAHTCNPTTLEGRGSGFQRHFRK

SEQ ID NO: 16064 - protein, 32 aa, Artificial Sequence
  Synthetic polypeptide
RARWLTPVTPPLWKAEGVVFRDISESEGETQD

SEQ ID NO: 16065 - protein, 32 aa, Artificial Sequence; identical to SEQ ID NO: 16064
  Synthetic polypeptide

SEQ ID NO: 16066 - protein, 32 aa, Artificial Sequence; identical to SEQ ID NO: 16064
  Synthetic polypeptide

SEQ ID NO: 16067 - protein, 32 aa, Artificial Sequence; identical to SEQ ID NO: 16064
  Synthetic polypeptide

SEQ ID NO: 16068 - protein, 32 aa, Artificial Sequence; identical to SEQ ID NO: 16064
  Synthetic polypeptide

SEQ ID NO: 16069 - protein, 20 aa, Artificial Sequence
  Synthetic polypeptide
PHHFGRPREWFSETFQKVKE

SEQ ID NO: 16070 - protein, 28 aa, Artificial Sequence
  Synthetic polypeptide
RARWLTPVTPPLWKAEGVVFRDISESEG

SEQ ID NO: 16071 - protein, 24 aa, Artificial Sequence
  Synthetic polypeptide
PHHFGRPREWFSETFQKVKEKLKI

SEQ ID NO: 16072 - protein, 24 aa, Artificial Sequence
  Synthetic polypeptide
PHHFGRPREWFSETFQKVKEKLKI

SEQ ID NO: 16073 - protein, 18 aa, Artificial Sequence
  Synthetic polypeptide
PHHFGRPREWFSETFQKV

SEQ ID NO: 16074 - protein, 26 aa, Artificial Sequence
  Synthetic polypeptide
RARWLTPVTPPLWKAEGVVFRDISES

SEQ ID NO: 16075 - protein, 125 aa, Artificial Sequence
  Synthetic polypeptide
GLFLHLYNGNDEDAHLIGFLWQITCQPEAQEGTLSPPPKLKMSRWSLVRGRMKELLETVVNRTRDGWQWFWSPSTFRGFMQTYYDDHLRDLGPLTKAWFLESKDSLLKKTHSLCPRLVCGDKDQG

SEQ ID NO: 16076 - protein, 125 aa, Artificial Sequence; identical to SEQ ID NO: 16075
  Synthetic polypeptide

SEQ ID NO: 16077 - protein, 125 aa, Artificial Sequence; identical to SEQ ID NO: 16075
  Synthetic polypeptide

SEQ ID NO: 16078 - protein, 72 aa, Artificial Sequence
  Synthetic polypeptide
RCPPDRVFVANNMPARGPGRNPEPPTKAKDESLEPGEGQDEGAAGDSGEQDQRRVAMVLEPEHLPGLHADLL

SEQ ID NO: 16079 - protein, 72 aa, Artificial Sequence; identical to SEQ ID NO: 16078
  Synthetic polypeptide

SEQ ID NO: 16080 - protein, 72 aa, Artificial Sequence; identical to SEQ ID NO: 16078
  Synthetic polypeptide

SEQ ID NO: 16081 - protein, 176 aa, Artificial Sequence
  Synthetic polypeptide
GLFLHLYNGNDEDAHLIGFLWQITCQPEAQEGTLSPPPKLKMSRWSLVRGRMKELLETVVNRTRDGWQWFWSLDTMGTRLLPALFLVLLVLGFEVQGTQQPQQDEMPSPTFLTQVKESLSSYWESAKTAAQNLYEKTYLPAVDEKLRDLYSKSTAAMSTYTGIFTDQVLSVLKGEE

SEQ ID NO: 16082 - protein, 81 aa, Artificial Sequence
  Synthetic polypeptide
RCPPDRVFVANNMPARGPGRNPEPPTKAKDESLEPGEGQDEGAAGDSGEQDQRRVAMVLVSGHYGHTTPPSSVSCPPGIGI

SEQ ID NO: 16083 - protein, 71 aa, Artificial Sequence
  Synthetic polypeptide
GLFLHLYNGNDEDAHLIGFLWQITCQPEAQEGTLSPPPKLKMSRWSLVRGRMKELLETVVNRTRDGWQWFW

SEQ ID NO: 16084 - protein, 60 aa, Artificial Sequence
  Synthetic polypeptide
RCPPDRVFVANNMPARGPGRNPEPPTKAKDESLEPGEGQDEGAAGDSGEQDQRRVAMVLV

SEQ ID NO: 16085 - protein, 67 aa, Artificial Sequence
  Synthetic polypeptide
GLFLHLYNGNDEDAHLIGFLWQISLWTLWAHDSSQLCFLSSWYWDLRSRGPNSPSKMRCLARPSSPR

SEQ ID NO: 16086 - protein, 117 aa, Artificial Sequence
  Synthetic polypeptide
RCPPDRVFVANKSLDTMGTRLLPALFLVLLVLGFEVQGTQQPQQDEMPSPTFLTQVKESLSSYWESAKTAAQNLYEKTYLPAVDEKLRDLYSKSTAAMSTYTGIFTDQVLSVLKGEE

SEQ ID NO: 16087 - protein, 145 aa, Artificial Sequence
  Synthetic polypeptide
NPVSTKNTKIRQAWWCMLVFPVTQEAEAGESLEPGRQRLRSLDTMGTRLLPALFLVLLVLGFEVQGTQQPQQDEMPSPTFLTQVKESLSSYWESAKTAAQNLYEKTYLPAVDEKLRDLYSKSTAAMSTYTGIFTDQVLSVLKGEE

SEQ ID NO: 16088 - protein, 109 aa, Artificial Sequence
  Synthetic polypeptide
SKRFGRPRQTDHLMSGVGDQPGQHGETPSLLKIQKLDRHGGACLYFQLLRRLRQENRSNPEDRGCGLWTLWAHDSSQLCFLSSWYWDLRSRGPNSPSKMRCLARPSSPR

SEQ ID NO: 16089 - protein, 35 aa, Artificial Sequence
  Synthetic polypeptide
GRRIARTRKTEVAVSGHYGHTTPPSSVSCPPGIGI

SEQ ID NO: 16090 - protein, 6 aa, Artificial Sequence
  Synthetic polypeptide
ARSQGG

SEQ ID NO: 16091 - protein, 6 aa, Artificial Sequence
  Synthetic polypeptide
ARSQGG

SEQ ID NO: 16092 - protein, 6 aa, Artificial Sequence
  Synthetic polypeptide
ARSQGG

SEQ ID NO: 16093 - protein, 6 aa, Artificial Sequence
  Synthetic polypeptide
ARSQGG

SEQ ID NO: 16094 - protein, 6 aa, Artificial Sequence
  Synthetic polypeptide
ARSQGG

SEQ ID NO: 16095 - protein, 87 aa, Artificial Sequence
  Synthetic polypeptide
HGVKADKKAAQEKMIQQEHERQEREDELRAMARKIRMKERERREKEREEWERQYSRQSRSPSPRYSREYSSSRRRSRSRSRSPHYRH

SEQ ID NO: 16096 - protein, 87 aa, Artificial Sequence; identical to SEQ ID NO: 16095
  Synthetic polypeptide

SEQ ID NO: 16097 - protein, 87 aa, Artificial Sequence; identical to SEQ ID NO: 16095
  Synthetic polypeptide

SEQ ID NO: 16098 - protein, 13 aa, Artificial Sequence
  Synthetic polypeptide
TESRRIRRRHKKR

SEQ ID NO: 16099 - protein, 13 aa, Artificial Sequence
  Synthetic polypeptide
TESRRIRRRHKKR

SEQ ID NO: 16100 - protein, 13 aa, Artificial Sequence
  Synthetic polypeptide
TESRRIRRRHKKR

SEQ ID NO: 16101 - protein, 13 aa, Artificial Sequence
  Synthetic polypeptide
TESRRIRRRHKKR

SEQ ID NO: 16102 - protein, 6 aa, Artificial Sequence
  Synthetic polypeptide
HGVKAD

SEQ ID NO: 16103 - protein, 6 aa, Artificial Sequence
  Synthetic polypeptide
TESRRI

SEQ ID NO: 16104 - protein, 113 aa, Artificial Sequence
  Synthetic polypeptide
HGVKADKKAAQEKMIQQEHERQEREDELRAMARKIRMKVLEAPALPEFSVSSVPGQMLMPCLRRERERREKEREEWERQYSRQSRSPSPRYSREYSSSRRRSRSRSRSPHYRH

SEQ ID NO: 16105 - protein, 10 aa, Artificial Sequence
  Synthetic polypeptide
IERDDSGDRR

SEQ ID NO: 16106 - protein, 10 aa, Artificial Sequence
  Synthetic polypeptide
IERDDSGDRR

SEQ ID NO: 16107 - protein, 153 aa, Artificial Sequence
  Synthetic polypeptide
SGVRVRTRPSPGLAGQRLALASSFGKWRSRRCRLGVIAKLSAMIQGTEDEPVGPGGYGVPCGPGSRREAAPGDAGLQGGAGCPQVLVQRPVGGGVPEADGQPAHQSPGDLRPARQQLPPPPPDGLWPAVSGGSTQVPGLHLRPPARRPLYPGH

SEQ ID NO: 16108 - protein, 153 aa, Artificial Sequence; identical to SEQ ID NO: 16107
  Synthetic polypeptide

SEQ ID NO: 16109 - protein, 133 aa, Artificial Sequence
  Synthetic polypeptide
FRGQKMSLSVLEGMGFRVGQALGERLPRETLAFREELDVLKFLCKDLWVAVFQKQMDSLRTNHQGTYVLQDNSFPLLLPMASGLQYLEEAPKFLAFTCGLLRGALYTLGIESVVTASVAALPVCKFQVVIPKS

SEQ ID NO: 16110 - protein, 133 aa, Artificial Sequence; identical to SEQ ID NO: 16109
  Synthetic polypeptide

SEQ ID NO: 16111 - protein, 120 aa, Artificial Sequence
  Synthetic polypeptide
ATESLLNKPKSEMTPEELQKREEEEFNTGPLSVLTQSVKNNTQVLINCRNNKKLLGRVKAFDRHCNMVLENVKEMWTEVPKSGKGKKKSKPVNKDRYISKMFLRGDSVIVVLRNPLIAGK

SEQ ID NO: 16112 - protein, 120 aa, Artificial Sequence; identical to SEQ ID NO: 16111
  Synthetic polypeptide

SEQ ID NO: 16113 - protein, 23 aa, Artificial Sequence
  Synthetic polypeptide
AEIAPLHFQPERQRASSTSPRVR

SEQ ID NO: 16114 - protein, 23 aa, Artificial Sequence
  Synthetic polypeptide
AEIAPLHFQPERQRASSTSPRVR

SEQ ID NO: 16115 - protein, 23 aa, Artificial Sequence
  Synthetic polypeptide
AEIAPLHFQPERQRASSTSPRVR

SEQ ID NO: 16116 - protein, 43 aa, Artificial Sequence
  Synthetic polypeptide
LQLFGRLRPEDRLNPGGGGCSEPRLRHCTSSLSDREPPQQAQE

SEQ ID NO: 16117 - protein, 43 aa, Artificial Sequence; identical to SEQ ID NO: 16116
  Synthetic polypeptide

SEQ ID NO: 16118 - protein, 43 aa, Artificial Sequence; identical to SEQ ID NO: 16116
  Synthetic polypeptide

SEQ ID NO: 16119 - protein, 80 aa, Artificial Sequence
  Synthetic polypeptide
ATESLLNKPKSEMTPEELQKREEEEFNTGPLSVLTQSVKNNTQVLINCRNNKKLLGRVKAFDSASPPCSPPGTATWCWRT

SEQ ID NO: 16120 - protein, 124 aa, Artificial Sequence
  Synthetic polypeptide
GRARWLRSLLNKPKSEMTPEELQKREEEEFNTGPLSVLTQSVKNNTQVLINCRNNKKLLGRVKAFDRHCNMVLENVKEMWTEVPKSGKGKKKSKPVNKDRYISKMFLRGDSVIVVLRNPLIAGK

SEQ ID NO: 16121 - protein, 124 aa, Artificial Sequence; identical to SEQ ID NO: 16120
  Synthetic polypeptide

SEQ ID NO: 16122 - protein, 16 aa, Artificial Sequence
  Synthetic polypeptide
AERGGSGASSTSPRVR

SEQ ID NO: 16123 - protein, 16 aa, Artificial Sequence
  Synthetic polypeptide
AERGGSGASSTSPRVR

SEQ ID NO: 16124 - protein, 16 aa, Artificial Sequence
  Synthetic polypeptide
AERGGSGASSTSPRVR

SEQ ID NO: 16125 - protein, 14 aa, Artificial Sequence
  Synthetic polypeptide
PSAVAQEPPQQAQE

SEQ ID NO: 16126 - protein, 14 aa, Artificial Sequence
  Synthetic polypeptide
PSAVAQEPPQQAQE

SEQ ID NO: 16127 - protein, 14 aa, Artificial Sequence
  Synthetic polypeptide
PSAVAQEPPQQAQE

SEQ ID NO: 16128 - protein, 84 aa, Artificial Sequence
  Synthetic polypeptide
GRARWLRSLLNKPKSEMTPEELQKREEEEFNTGPLSVLTQSVKNNTQVLINCRNNKKLLGRVKAFDSASPPCSPPGTATWCWRT

SEQ ID NO: 16129 - protein, 324 aa, Artificial Sequence
  Synthetic polypeptide
SLGLDFPIKFEVPLIGSLPEARLRRVVGQLDPQRLWSTYLRPLLVVRTPGSPGNLQVRKFLEATLRSLTAGWHVELDPFTASTPLGPVDFGNVVATLDPRAARHLTLACHYDSKLFPPGSTPFVGATDSAVPCALLLELAQALDLELSRAKKQAAPVTLQLLFLDGEEALKEWGPKDSLYGSRHLAQLMESIPHSPGPTRIQAIELFMLLDLLGAPNPTFYSHFPRTVRWFHRLRSIEKRLHRLNLLQSHPQEVMYFQPGEPFGSVEDDHIPFLRRGVPVLHLISTPFPAVWHTPADTEVNLHPPTVHNLCRILAVFLAEYLGL

SEQ ID NO: 16130 - protein, 13 aa, Artificial Sequence
  Synthetic polypeptide
HWASISPSSLRSH

SEQ ID NO: 16131 - protein, 13 aa, Artificial Sequence
  Synthetic polypeptide
HWASISPSSLRSH

SEQ ID NO: 16132 - protein, 13 aa, Artificial Sequence
  Synthetic polypeptide
HWASISPSSLRSH

SEQ ID NO: 16133 - protein, 230 aa, Artificial Sequence
  Synthetic polypeptide
SLGLDFPIKFEVPLIGSLPEARLRRVVGQLDPQRLWSTYLRPLLVVRTPGSPGNLQVRKAAPVTLQLLFLDGEEALKEWGPKDSLYGSRHLAQLMESIPHSPGPTRIQAIELFMLLDLLGAPNPTFYSHFPRTVRWFHRLRSIEKRLHRLNLLQSHPQEVMYFQPGEPFGSVEDDHIPFLRRGVPVLHLISTPFPAVWHTPADTEVNLHPPTVHNLCRILAVFLAEYLGL

SEQ ID NO: 16134 - protein, 81 aa, Artificial Sequence
  Synthetic polypeptide
SLGLDFPIKFEVPLIGSLPEARLRRVVGQLDPQRLWSTYLRPLLVVRTPGSPGNLQVRKGPRIRLCPVPCCWSWPKHLTWS

SEQ ID NO: 16135 - protein, 249 aa, Artificial Sequence
  Synthetic polypeptide
PSAVAHTCNPRTLGGRDTSAHSKAGSSSPEPWARPSCTPQEGGCPRPKERESPPPSALQPVQLPRLALSPPPPAPPLPPPPPLAQVAPSPPSPPPPPRPPPTLSASDPSLDFLRAQQETANAIRELAGTLRQGLAKLSEALSALLPLLPGTPVDSLPPPLPPPPPPPPPPRPVLPPPAPKVEITPEPVSVVAAVVDGAVVAARGVIIAPRSEEGAPRPPPAPLPPHDSPPHKRRKGFPTRKRRGRWKSP

SEQ ID NO: 16136 - protein, 136 aa, Artificial Sequence
  Synthetic polypeptide
RAQWLTPVIPELWEAEIHQPTARRAPAARSHGPGPPALPRKGAAHGPRSVSHHPLRPCSRSSCLAWPCLHHPQPLHCHPHRHWPKWHPHPLAPHPLLGLHPRSRPQTPPWTSCGPSRRLPTPSGSWPAPFDRDWPN

SEQ ID NO: 16137 - protein, 41 aa, Artificial Sequence
  Synthetic polypeptide
SQNFGRPRYISPQQGGLQQPGAMGPALLHSPGRGLPTAQGA

SEQ ID NO: 16138 - protein, 124 aa, Artificial Sequence
  Synthetic polypeptide
CLFTVCVCVTIANCVYRISVRAGQGPRIVLVAVFRNFKIIYRRYAGLYFCICVDVNDNNLAYLEAIHNFVEVLNEYFHNVCELDLVFNFYKVYTVVDEMFLAGEIRETSQTKVLKQLLMLQSLE

SEQ ID NO: 16139 - protein, 124 aa, Artificial Sequence; identical to SEQ ID NO: 16138
  Synthetic polypeptide

SEQ ID NO: 16140 - protein, 124 aa, Artificial Sequence; identical to SEQ ID NO: 16138
  Synthetic polypeptide

SEQ ID NO: 16141 - protein, 124 aa, Artificial Sequence; identical to SEQ ID NO: 16138
  Synthetic polypeptide

SEQ ID NO: 16142 - protein, 124 aa, Artificial Sequence; identical to SEQ ID NO: 16138
  Synthetic polypeptide

SEQ ID NO: 16143 - protein, 124 aa, Artificial Sequence; identical to SEQ ID NO: 16138
  Synthetic polypeptide

SEQ ID NO: 16144 - protein, 52 aa, Artificial Sequence
  Synthetic polypeptide
GQDKDPGSSWWQCSGTLRSFTAAMLASTSASVWMSMTTTWLTWRPFTTSWRS

SEQ ID NO: 16145 - protein, 52 aa, Artificial Sequence; identical to SEQ ID NO: 16144
  Synthetic polypeptide

SEQ ID NO: 16146 - protein, 52 aa, Artificial Sequence; identical to SEQ ID NO: 16144
  Synthetic polypeptide

SEQ ID NO: 16147 - protein, 52 aa, Artificial Sequence; identical to SEQ ID NO: 16144
  Synthetic polypeptide

SEQ ID NO: 16148 - protein, 52 aa, Artificial Sequence; identical to SEQ ID NO: 16144
  Synthetic polypeptide

SEQ ID NO: 16149 - protein, 52 aa, Artificial Sequence; identical to SEQ ID NO: 16144
  Synthetic polypeptide

SEQ ID NO: 16150 - protein, 24 aa, Artificial Sequence
  Synthetic polypeptide
LCISHFSEGRTRTQDRLGGSVPEL

SEQ ID NO: 16151 - protein, 24 aa, Artificial Sequence
  Synthetic polypeptide
LCISHFSEGRTRTQDRLGGSVPEL

SEQ ID NO: 16152 - protein, 24 aa, Artificial Sequence
  Synthetic polypeptide
LCISHFSEGRTRTQDRLGGSVPEL

SEQ ID NO: 16153 - protein, 24 aa, Artificial Sequence
  Synthetic polypeptide
LCISHFSEGRTRTQDRLGGSVPEL

SEQ ID NO: 16154 - protein, 24 aa, Artificial Sequence
  Synthetic polypeptide
LCISHFSEGRTRTQDRLGGSVPEL

SEQ ID NO: 16155 - protein, 24 aa, Artificial Sequence
  Synthetic polypeptide
LCISHFSEGRTRTQDRLGGSVPEL

SEQ ID NO: 16156 - protein, 95 aa, Artificial Sequence
  Synthetic polypeptide
CLFTFRNFKIIYRRYAGLYFCICVDVNDNNLAYLEAIHNFVEVLNEYFHNVCELDLVFNFYKVYTVVDEMFLAGEIRETSQTKVLKQLLMLQSLE

SEQ ID NO: 16157 - protein, 95 aa, Artificial Sequence; identical to SEQ ID NO: 16156
  Synthetic polypeptide

SEQ ID NO: 16158 - protein, 95 aa, Artificial Sequence; identical to SEQ ID NO: 16156
  Synthetic polypeptide

SEQ ID NO: 16159 - protein, 95 aa, Artificial Sequence; identical to SEQ ID NO: 16156
  Synthetic polypeptide

SEQ ID NO: 16160 - protein, 95 aa, Artificial Sequence; identical to SEQ ID NO: 16156
  Synthetic polypeptide

SEQ ID NO: 16161 - protein, 95 aa, Artificial Sequence; identical to SEQ ID NO: 16156
  Synthetic polypeptide

SEQ ID NO: 16162 - protein, 43 aa, Artificial Sequence
  Synthetic polypeptide
VCSRSGTLRSFTAAMLASTSASVWMSMTTTWLTWRPFTTSWRS

SEQ ID NO: 16163 - protein, 43 aa, Artificial Sequence; identical to SEQ ID NO: 16162
  Synthetic polypeptide

SEQ ID NO: 16164 - protein, 43 aa, Artificial Sequence; identical to SEQ ID NO: 16162
  Synthetic polypeptide

SEQ ID NO: 16165 - protein, 43 aa, Artificial Sequence; identical to SEQ ID NO: 16162
  Synthetic polypeptide

SEQ ID NO: 16166 - protein, 43 aa, Artificial Sequence; identical to SEQ ID NO: 16162
  Synthetic polypeptide

SEQ ID NO: 16167 - protein, 43 aa, Artificial Sequence; identical to SEQ ID NO: 16162
  Synthetic polypeptide

SEQ ID NO: 16168 - protein, 7 aa, Artificial Sequence
  Synthetic polypeptide
FVHVPEL

SEQ ID NO: 16169 - protein, 7 aa, Artificial Sequence
  Synthetic polypeptide
FVHVPEL

SEQ ID NO: 16170 - protein, 7 aa, Artificial Sequence
  Synthetic polypeptide
FVHVPEL

SEQ ID NO: 16171 - protein, 7 aa, Artificial Sequence
  Synthetic polypeptide
FVHVPEL

SEQ ID NO: 16172 - protein, 7 aa, Artificial Sequence
  Synthetic polypeptide
FVHVPEL

SEQ ID NO: 16173 - protein, 7 aa, Artificial Sequence
  Synthetic polypeptide
FVHVPEL

SEQ ID NO: 16174 - protein, 108 aa, Artificial Sequence
  Synthetic polypeptide
GRARWLTPVIPALWEAKFRNFKIIYRRYAGLYFCICVDVNDNNLAYLEAIHNFVEVLNEYFHNVCELDLVFNFYKVYTVVDEMFLAGEIRETSQTKVLKQLLMLQSLE

SEQ ID NO: 16175 - protein, 108 aa, Artificial Sequence; identical to SEQ ID NO: 16174
  Synthetic polypeptide

SEQ ID NO: 16176 - protein, 108 aa, Artificial Sequence; identical to SEQ ID NO: 16174
  Synthetic polypeptide

SEQ ID NO: 16177 - protein, 108 aa, Artificial Sequence; identical to SEQ ID NO: 16174
  Synthetic polypeptide

SEQ ID NO: 16178 - protein, 108 aa, Artificial Sequence; identical to SEQ ID NO: 16174
  Synthetic polypeptide

SEQ ID NO: 16179 - protein, 108 aa, Artificial Sequence; identical to SEQ ID NO: 16174
  Synthetic polypeptide

SEQ ID NO: 16180 - protein, 47 aa, Artificial Sequence
  Synthetic polypeptide
SQHFGRPSSGTLRSFTAAMLASTSASVWMSMTTTWLTWRPFTTSWRS

SEQ ID NO: 16181 - protein, 47 aa, Artificial Sequence; identical to SEQ ID NO: 16180
  Synthetic polypeptide

SEQ ID NO: 16182 - protein, 47 aa, Artificial Sequence; identical to SEQ ID NO: 16180
  Synthetic polypeptide

SEQ ID NO: 16183 - protein, 47 aa, Artificial Sequence; identical to SEQ ID NO: 16180
  Synthetic polypeptide

SEQ ID NO: 16184 - protein, 47 aa, Artificial Sequence; identical to SEQ ID NO: 16180
  Synthetic polypeptide

SEQ ID NO: 16185 - protein, 47 aa, Artificial Sequence; identical to SEQ ID NO: 16180
  Synthetic polypeptide

SEQ ID NO: 16186 - protein, 20 aa, Artificial Sequence
  Synthetic polypeptide
PGAVAHSCNPSTLGGQVPEL

SEQ ID NO: 16187 - protein, 20 aa, Artificial Sequence
  Synthetic polypeptide
PGAVAHSCNPSTLGGQVPEL

SEQ ID NO: 16188 - protein, 20 aa, Artificial Sequence
  Synthetic polypeptide
PGAVAHSCNPSTLGGQVPEL

SEQ ID NO: 16189 - protein, 20 aa, Artificial Sequence
  Synthetic polypeptide
PGAVAHSCNPSTLGGQVPEL

SEQ ID NO: 16190 - protein, 20 aa, Artificial Sequence
  Synthetic polypeptide
PGAVAHSCNPSTLGGQVPEL

SEQ ID NO: 16191 - protein, 20 aa, Artificial Sequence
  Synthetic polypeptide
PGAVAHSCNPSTLGGQVPEL

SEQ ID NO: 16192 - protein, 76 aa, Artificial Sequence
  Synthetic polypeptide
GQAWWLTPVIPALWEAEAGGSRGAADGARLHQVSLAEAEAARGTGRDADARHRQAHAPAAAGGAGEHRGGRAGGRF

SEQ ID NO: 16193 - protein, 76 aa, Artificial Sequence; identical to SEQ ID NO: 16192
  Synthetic polypeptide

SEQ ID NO: 16194 - protein, 196 aa, Artificial Sequence
  Synthetic polypeptide
SQHFGRPRRADHEELLMAHDFTKFHSLKPKLLEALDEMLTHDIAKLMPLLRQEELESTEVGVQGGAFEGTHMGPFVERGPDEAMEDGEEGSDDEAEWVVTKDKSKYDEIFYNLAPADGKLSGSKAKTWMVGTKLPNSVLGRIWKLSDVDRDGMLDDEEFALASHLIEAKLEGHGLPANLPRRLVPPSKRRHKGSAE

SEQ ID NO: 16195 - protein, 196 aa, Artificial Sequence; identical to SEQ ID NO: 16194
  Synthetic polypeptide

SEQ ID NO: 16196 - protein, 24 aa, Artificial Sequence
  Synthetic polypeptide
PGMVAHACNPSTLGGRGGRITRSC

SEQ ID NO: 16197 - protein, 24 aa, Artificial Sequence
  Synthetic polypeptide
PGMVAHACNPSTLGGRGGRITRSC

SEQ ID NO: 16198 - protein, 41 aa, Artificial Sequence
  Synthetic polypeptide
GRVRWLLPVISALWEAGAGRSPEWRLRLQVQVSSAQEEVRR

SEQ ID NO: 16199 - protein, 41 aa, Artificial Sequence; identical to SEQ ID NO: 16198
  Synthetic polypeptide

SEQ ID NO: 16200 - protein, 41 aa, Artificial Sequence; identical to SEQ ID NO: 16198
  Synthetic polypeptide

SEQ ID NO: 16201 - protein, 41 aa, Artificial Sequence; identical to SEQ ID NO: 16198
  Synthetic polypeptide

SEQ ID NO: 16202 - protein, 16 aa, Artificial Sequence
  Synthetic polypeptide
SQHFGRLGRADPLSGA

SEQ ID NO: 16203 - protein, 16 aa, Artificial Sequence
  Synthetic polypeptide
SQHFGRLGRADPLSGA

SEQ ID NO: 16204 - protein, 16 aa, Artificial Sequence
  Synthetic polypeptide
SQHFGRLGRADPLSGA

SEQ ID NO: 16205 - protein, 16 aa, Artificial Sequence
  Synthetic polypeptide
SQHFGRLGRADPLSGA

SEQ ID NO: 16206 - protein, 29 aa, Artificial Sequence
  Synthetic polypeptide
SQHLGRPRQADHEVRRSRPSWLTWNKLVG

SEQ ID NO: 16207 - protein, 241 aa, Artificial Sequence
  Synthetic polypeptide
HGTNWLAEILCLMHSKGDAKWIQSVPIWERSPWVESEIGYTALSETESPRLFSSHLPIQLFPKSFFSSKAKVIYLMRNPRDVLVSGYFFWKNMKFIKKPKSWEEYFEWFCQGTVLYGSWFDHIHGWMPMREEKNFLLLSYEELKQDTGRTIEKICQFLGKTLEPEELNLILKNSSFQSMKENKMSNYSLLSVDYVVDKAQLLRKGVSGDWKNHFTVAQAEDFDKLFQEKMADLPRELFPWE

SEQ ID NO: 16208 - protein, 21 aa, Artificial Sequence
  Synthetic polypeptide
GQEIETILANMEQTGWLRFSA

SEQ ID NO: 16209 - protein, 254 aa, Artificial Sequence
  Synthetic polypeptide
KQKVHWRLPGAEEKGTNWLAEILCLMHSKGDAKWIQSVPIWERSPWVESEIGYTALSETESPRLFSSHLPIQLFPKSFFSSKAKVIYLMRNPRDVLVSGYFFWKNMKFIKKPKSWEEYFEWFCQGTVLYGSWFDHIHGWMPMREEKNFLLLSYEELKQDTGRTIEKICQFLGKTLEPEELNLILKNSSFQSMKENKMSNYSLLSVDYVVDKAQLLRKGVSGDWKNHFTVAQAEDFDKLFQEKMADLPRELFPWE

SEQ ID NO: 16210 - protein, 33 aa, Artificial Sequence
  Synthetic polypeptide
GTWSHQVHRNRKYTGGCQGLKRREQTGWLRFSA

SEQ ID NO: 16211 - protein, 8 aa, Artificial Sequence
  Synthetic polypeptide
REGNKLVG

SEQ ID NO: 16212 - protein, 268 aa, Artificial Sequence
  Synthetic polypeptide
GWMQWLTPVIPTLWEAESLVREPLSRRRQLLRENFVETEGEFVFATSLDTKDIEQIAEFLEQSVKDSCEGLMVKTLDVDATYEIAKRSHNWLKLKKDYLDGVGDTLDLVVIGAYLGRGKRAGRYGGFLLASYDEDSEELQAICKLGTGFSDEELEEHHQSLKALVLPSPRPYVRIDGAVIPDHWLDPSAVWEVKCADLSLSPIYPAARGLVDSDKGISLRFPRFIRVREDKQPEQATTSAQVACLYRKQSQIQNQQGEDSGSDPEDTY

SEQ ID NO: 16213 - protein, 268 aa, Artificial Sequence; identical to SEQ ID NO: 16212
  Synthetic polypeptide

SEQ ID NO: 16214 - protein, 268 aa, Artificial Sequence; identical to SEQ ID NO: 16212
  Synthetic polypeptide

SEQ ID NO: 16215 - protein, 54 aa, Artificial Sequence
  Synthetic polypeptide
SQHFGRLSPWYVSPFPGAGSCSGRTLWRQRASLSSPPPWTPRTSSRSPSSWSSQ

SEQ ID NO: 16216 - protein, 54 aa, Artificial Sequence; identical to SEQ ID NO: 16215
  Synthetic polypeptide

SEQ ID NO: 16217 - protein, 54 aa, Artificial Sequence; identical to SEQ ID NO: 16215
  Synthetic polypeptide

SEQ ID NO: 16218 - protein, 54 aa, Artificial Sequence; identical to SEQ ID NO: 16215
  Synthetic polypeptide

SEQ ID NO: 16219 - protein, 54 aa, Artificial Sequence; identical to SEQ ID NO: 16215
  Synthetic polypeptide

SEQ ID NO: 16220 - protein, 150 aa, Artificial Sequence
  Synthetic polypeptide
GWMQWLTPVIPTLWEAESLVREPLSRRRQLLRENFVETEGEFVFATSLDTKDIEQIAEFLEQSVKDSCEGLMVKTLDVDATYEIAKRSHNWLKLKKDYLDGVGDTLDLVVIGAYLGRGKRAGRYGGFLLASYDEDSEELQAICKVLGNWG

SEQ ID NO: 16221 - protein, 150 aa, Artificial Sequence; identical to SEQ ID NO: 16220
  Synthetic polypeptide

SEQ ID NO: 16222 - protein, 774 aa, Artificial Sequence
  Synthetic polypeptide
AKITPLHSSLGEETPKESLTEAEVATEKEGEDGDQPTTPPKPLKTSKAETPTESVSEPEVATKQELQEEEEQTKPPRRAPKTLSSFFTPRKPAVKKEVKEEEPGAPGKEGAAEGPLDPSGYNPAKNNYHPVEDACWKPGQKVPYLAVARTFEKIEEVSARLRMVETLSNLLRSVVALSPPDLLPVLYLSLNHLGPPQQGLELGVGDGVLLKAVAQATGRQLESVRAEAAEKGDVGLVAENSRSTQRLMLPPPPLTASGVFSKFRDIARLTGSASTAKKIDIIKGLFVACRHSEARFIARSLSGRLRLGLAEQSVLAALSQAVSLTPPGQEFPPAMVDAGKGKTAEARKTWLEEQGMILKQTFCEVPDLDRIIPVLLEHGLERLPEHCKLSPGIPLKPMLAHPTRGISEVLKRFEEAAFTCEYKYDGQRAQIHALEGGEVKIFSRNQEDNTGKYPDIISRIPKIKLPSVTSFILDTEAVAWDREKKQIQPFQVLTTRKRKEVDASEIQVQVCLYAFDLIYLNGESLVREPLSRRRQLLRENFVETEGEFVFATSLDTKDIEQIAEFLEQSVKDSCEGLMVKTLDVDATYEIAKRSHNWLKLKKDYLDGVGDTLDLVVIGAYLGRGKRAGRYGGFLLASYDEDSEELQAICKLGTGFSDEELEEHHQSLKALVLPSPRPYVRIDGAVIPDHWLDPSAVWEVKCADLSLSPIYPAARGLVDSDKGISLRFPRFIRVREDKQPEQATTSAQVACLYRKQSQIQNQQGEDSGSDPEDTY

SEQ ID NO: 16223 - protein, 774 aa, Artificial Sequence; identical to SEQ ID NO: 16222
  Synthetic polypeptide

SEQ ID NO: 16224 - protein, 78 aa, Artificial Sequence
  Synthetic polypeptide
KYKKIAGCGGGRLSSQLLGRLRQENRMNPGGRGCSEPRSHHCTPAWARRPRKKASQRLKWPQRRKEKTGTSPPRLPSP

SEQ ID NO: 16225 - protein, 78 aa, Artificial Sequence; identical to SEQ ID NO: 16224
  Synthetic polypeptide

SEQ ID NO: 16226 - protein, 78 aa, Artificial Sequence; identical to SEQ ID NO: 16224
  Synthetic polypeptide

SEQ ID NO: 16227 - protein, 78 aa, Artificial Sequence; identical to SEQ ID NO: 16224
  Synthetic polypeptide

SEQ ID NO: 16228 - protein, 78 aa, Artificial Sequence; identical to SEQ ID NO: 16224
  Synthetic polypeptide

SEQ ID NO: 16229 - protein, 30 aa, Artificial Sequence
  Synthetic polypeptide
TQEAEVAVSQDHTIALQPGRGDPERKPHRG

SEQ ID NO: 16230 - protein, 30 aa, Artificial Sequence; identical to SEQ ID NO: 16229
  Synthetic polypeptide

SEQ ID NO: 16231 - protein, 30 aa, Artificial Sequence; identical to SEQ ID NO: 16229
  Synthetic polypeptide

SEQ ID NO: 16232 - protein, 30 aa, Artificial Sequence; identical to SEQ ID NO: 16229
  Synthetic polypeptide

SEQ ID NO: 16233 - protein, 30 aa, Artificial Sequence; identical to SEQ ID NO: 16229
  Synthetic polypeptide

SEQ ID NO: 16234 - protein, 656 aa, Artificial Sequence
  Synthetic polypeptide
AKITPLHSSLGEETPKESLTEAEVATEKEGEDGDQPTTPPKPLKTSKAETPTESVSEPEVATKQELQEEEEQTKPPRRAPKTLSSFFTPRKPAVKKEVKEEEPGAPGKEGAAEGPLDPSGYNPAKNNYHPVEDACWKPGQKVPYLAVARTFEKIEEVSARLRMVETLSNLLRSVVALSPPDLLPVLYLSLNHLGPPQQGLELGVGDGVLLKAVAQATGRQLESVRAEAAEKGDVGLVAENSRSTQRLMLPPPPLTASGVFSKFRDIARLTGSASTAKKIDIIKGLFVACRHSEARFIARSLSGRLRLGLAEQSVLAALSQAVSLTPPGQEFPPAMVDAGKGKTAEARKTWLEEQGMILKQTFCEVPDLDRIIPVLLEHGLERLPEHCKLSPGIPLKPMLAHPTRGISEVLKRFEEAAFTCEYKYDGQRAQIHALEGGEVKIFSRNQEDNTGKYPDIISRIPKIKLPSVTSFILDTEAVAWDREKKQIQPFQVLTTRKRKEVDASEIQVQVCLYAFDLIYLNGESLVREPLSRRRQLLRENFVETEGEFVFATSLDTKDIEQIAEFLEQSVKDSCEGLMVKTLDVDATYEIAKRSHNWLKLKKDYLDGVGDTLDLVVIGAYLGRGKRAGRYGGFLLASYDEDSEELQAICKVLGNWG

SEQ ID NO: 16235 - protein, 656 aa, Artificial Sequence; identical to SEQ ID NO: 16234
  Synthetic polypeptide

SEQ ID NO: 16236 - protein, 302 aa, Artificial Sequence
  Synthetic polypeptide
AKITPLHSSLGEETPKESLTEAEVATEKEGEDGDQPTTPPKPLKTSKAETPTESVSEPEVATKQELQEEEEQTKPPRRAPKTLSSFFTPRKPAVKKEVKEEEPGAPGKEGAAEGPLDPSGYNPAKNNYHPVEDACWKPGQKVPYLAVARTFEKIEEVSARLRMVETLSNLLRSVVALSPPDLLPVLYLSLNHLGPPQQGLELGVGDGVLLKAVAQATGRERRETRSHNCHPRHPHPRSPLKVGSWSPSGLRQPRKATWGWWPRTAAAPRGSCCHHLRSLPPGSSASSATSPGSLAVLPQPRR

SEQ ID NO: 16237 - protein, 775 aa, Artificial Sequence
  Synthetic polypeptide
AKITPLHSSLGEEETPKESLTEAEVATEKEGEDGDQPTTPPKPLKTSKAETPTESVSEPEVATKQELQEEEEQTKPPRRAPKTLSSFFTPRKPAVKKEVKEEEPGAPGKEGAAEGPLDPSGYNPAKNNYHPVEDACWKPGQKVPYLAVARTFEKIEEVSARLRMVETLSNLLRSVVALSPPDLLPVLYLSLNHLGPPQQGLELGVGDGVLLKAVAQATGRQLESVRAEAAEKGDVGLVAENSRSTQRLMLPPPPLTASGVFSKFRDIARLTGSASTAKKIDIIKGLFVACRHSEARFIARSLSGRLRLGLAEQSVLAALSQAVSLTPPGQEFPPAMVDAGKGKTAEARKTWLEEQGMILKQTFCEVPDLDRIIPVLLEHGLERLPEHCKLSPGIPLKPMLAHPTRGISEVLKRFEEAAFTCEYKYDGQRAQIHALEGGEVKIFSRNQEDNTGKYPDIISRIPKIKLPSVTSFILDTEAVAWDREKKQIQPFQVLTTRKRKEVDASEIQVQVCLYAFDLIYLNGESLVREPLSRRRQLLRENFVETEGEFVFATSLDTKDIEQIAEFLEQSVKDSCEGLMVKTLDVDATYEIAKRSHNWLKLKKDYLDGVGDTLDLVVIGAYLGRGKRAGRYGGFLLASYDEDSEELQAICKLGTGFSDEELEEHHQSLKALVLPSPRPYVRIDGAVIPDHWLDPSAVWEVKCADLSLSPIYPAARGLVDSDKGISLRFPRFIRVREDKQPEQATTSAQVACLYRKQSQIQNQQGEDSGSDPEDTY

SEQ ID NO: 16238 - protein, 79 aa, Artificial Sequence
  Synthetic polypeptide
KYKKIAGCGGGRLSSQLLGRLRQENRMNPGGRGCSEPRSHHCTPAWAKRRPRKKASQRLKWPQRRKEKTGTSPPRLPSP

SEQ ID NO: 16239 - protein, 79 aa, Artificial Sequence; identical to SEQ ID NO: 16238
  Synthetic polypeptide

SEQ ID NO: 16240 - protein, 79 aa, Artificial Sequence; identical to SEQ ID NO: 16238
  Synthetic polypeptide

SEQ ID NO: 16241 - protein, 31 aa, Artificial Sequence
  Synthetic polypeptide
TQEAEVAVSQDHTIALQPGRRGDPERKPHRG

SEQ ID NO: 16242 - protein, 31 aa, Artificial Sequence; identical to SEQ ID NO: 16241
  Synthetic polypeptide

SEQ ID NO: 16243 - protein, 31 aa, Artificial Sequence; identical to SEQ ID NO: 16241
  Synthetic polypeptide

SEQ ID NO: 16244 - protein, 657 aa, Artificial Sequence
  Synthetic polypeptide
AKITPLHSSLGEEETPKESLTEAEVATEKEGEDGDQPTTPPKPLKTSKAETPTESVSEPEVATKQELQEEEEQTKPPRRAPKTLSSFFTPRKPAVKKEVKEEEPGAPGKEGAAEGPLDPSGYNPAKNNYHPVEDACWKPGQKVPYLAVARTFEKIEEVSARLRMVETLSNLLRSVVALSPPDLLPVLYLSLNHLGPPQQGLELGVGDGVLLKAVAQATGRQLESVRAEAAEKGDVGLVAENSRSTQRLMLPPPPLTASGVFSKFRDIARLTGSASTAKKIDIIKGLFVACRHSEARFIARSLSGRLRLGLAEQSVLAALSQAVSLTPPGQEFPPAMVDAGKGKTAEARKTWLEEQGMILKQTFCEVPDLDRIIPVLLEHGLERLPEHCKLSPGIPLKPMLAHPTRGISEVLKRFEEAAFTCEYKYDGQRAQIHALEGGEVKIFSRNQEDNTGKYPDIISRIPKIKLPSVTSFILDTEAVAWDREKKQIQPFQVLTTRKRKEVDASEIQVQVCLYAFDLIYLNGESLVREPLSRRRQLLRENFVETEGEFVFATSLDTKDIEQIAEFLEQSVKDSCEGLMVKTLDVDATYEIAKRSHNWLKLKKDYLDGVGDTLDLVVIGAYLGRGKRAGRYGGFLLASYDEDSEELQAICKVLGNWG

SEQ ID NO: 16245 - protein, 303 aa, Artificial Sequence
  Synthetic polypeptide
AKITPLHSSLGEEETPKESLTEAEVATEKEGEDGDQPTTPPKPLKTSKAETPTESVSEPEVATKQELQEEEEQTKPPRRAPKTLSSFFTPRKPAVKKEVKEEEPGAPGKEGAAEGPLDPSGYNPAKNNYHPVEDACWKPGQKVPYLAVARTFEKIEEVSARLRMVETLSNLLRSVVALSPPDLLPVLYLSLNHLGPPQQGLELGVGDGVLLKAVAQATGRERRETRSHNCHPRHPHPRSPLKVGSWSPSGLRQPRKATWGWWPRTAAAPRGSCCHHLRSLPPGSSASSATSPGSLAVLPQPRR

SEQ ID NO: 16246 - protein, 16 aa, Artificial Sequence
  Synthetic polypeptide
MAKQLLELRREYSKAG

SEQ ID NO: 16247 - protein, 16 aa, Artificial Sequence
  Synthetic polypeptide
MAKQLLELRREYSKAG

SEQ ID NO: 16248 - protein, 16 aa, Artificial Sequence
  Synthetic polypeptide
MAKQLLELRREYSKAG

SEQ ID NO: 16249 - protein, 16 aa, Artificial Sequence
  Synthetic polypeptide
MAKQLLELRREYSKAG

SEQ ID NO: 16250 - protein, 35 aa, Artificial Sequence
  Synthetic polypeptide
EGNIARLAEGGAGPHGALPHSLLSLLHPVHVPALH

SEQ ID NO: 16251 - protein, 30 aa, Artificial Sequence
  Synthetic polypeptide
QGWLKAVQVLMVLSLILCCLSFILFMFQLY

SEQ ID NO: 16252 - protein, 109 aa, Artificial Sequence
  Synthetic polypeptide
EGNIARLAEGGAGPHGALPHSLLSLLHPVHVPALHHATRRSLLCHRPLPALHQRGGVYWRLDLCHSRRGDPGEAPARGQLRILLRPGLGGLPPRPGQRHHLHPPTEAGV

SEQ ID NO: 16253 - protein, 109 aa, Artificial Sequence; identical to SEQ ID NO: 16252
  Synthetic polypeptide

SEQ ID NO: 16254 - protein, 104 aa, Artificial Sequence
  Synthetic polypeptide
QGWLKAVQVLMVLSLILCCLSFILFMFQLYTMRRGGLFYATGLCQLCTSVAVFTGALIYAIHAEEILEKHPRGGSFGYCFALAWVAFPLALVSGIIYIHLRKRE

SEQ ID NO: 16255 - protein, 104 aa, Artificial Sequence; identical to SEQ ID NO: 16254
  Synthetic polypeptide

SEQ ID NO: 16256 - protein, 104 aa, Artificial Sequence; identical to SEQ ID NO: 16254
  Synthetic polypeptide

SEQ ID NO: 16257 - protein, 127 aa, Artificial Sequence
  Synthetic polypeptide
EGNIARLAEGGAGPHGALPHSLLSLLHPVHVPALHHATRRSLLCHRPLPALHQRGGVYWRLDLCHSRRGDPGEAPARGQLRILLRPGLGGLPPRPGQRHHLHPPTEAGVSAPPRSAAPAPSRPPSPR

SEQ ID NO: 16258 - protein, 84 aa, Artificial Sequence
  Synthetic polypeptide
DWAQWLTPVIPALWEGETITSHYLFALGVYRTLYLFNWIWRYHFEGFFDLIAIVAGLVQTVLYCDFFYLYITKVLKGKKLSLPA

SEQ ID NO: 16259 - protein, 84 aa, Artificial Sequence; identical to SEQ ID NO: 16258
  Synthetic polypeptide

SEQ ID NO: 16260 - protein, 17 aa, Artificial Sequence
  Synthetic polypeptide
SQHFGRVRPSPATTCLR

SEQ ID NO: 16261 - protein, 17 aa, Artificial Sequence
  Synthetic polypeptide
SQHFGRVRPSPATTCLR

SEQ ID NO: 16262 - protein, 17 aa, Artificial Sequence
  Synthetic polypeptide
SQHFGRVRPSPATTCLR

SEQ ID NO: 16263 - protein, 70 aa, Artificial Sequence
  Synthetic polypeptide
DWAQWLTPVIPALWEGETITSHYLFALGVYRTLYLFNWIWRYHFEGFFDLIAIVAGLVQTVLYCDFFYLY

SEQ ID NO: 16264 - protein, 23 aa, Artificial Sequence
  Synthetic polypeptide
IWEEIIHRRCSSRGFAHRSGHPP

SEQ ID NO: 16265 - protein, 23 aa, Artificial Sequence
  Synthetic polypeptide
IWEEIIHRRCSSRGFAHRSGHPP

SEQ ID NO: 16266 - protein, 23 aa, Artificial Sequence
  Synthetic polypeptide
IWEEIIHRRCSSRGFAHRSGHPP

SEQ ID NO: 16267 - protein, 23 aa, Artificial Sequence
  Synthetic polypeptide
IWEEIIHRRCSSRGFAHRSGHPP

SEQ ID NO: 16268 - protein, 23 aa, Artificial Sequence
  Synthetic polypeptide
IWEEIIHRRCSSRGFAHRSGHPP

SEQ ID NO: 16269 - protein, 23 aa, Artificial Sequence
  Synthetic polypeptide
IWEEIIHRRCSSRGFAHRSGHPP

SEQ ID NO: 16270 - protein, 199 aa, Artificial Sequence
  Synthetic polypeptide
FTGDAHHGVLHTGVDIRHNKDRKVRRKEPKSQDIYLRLLVKLYRFLARRTNSTFNQVVLKRLFMSRTNRPPLSLSRMIRKMKLPGRENKTAVVVGTITDDVRVQEVPKLKVCALRVTSRARSRILRAGGKILTFDQLALDSPKGCGTVLLSGPRKGREVYRHFGKAPGTPHSHTKPYVRSKGRKFERARGRRASRGYKN

SEQ ID NO: 16271 - protein, 199 aa, Artificial Sequence; identical to SEQ ID NO: 16270
  Synthetic polypeptide

SEQ ID NO: 16272 - protein, 65 aa, Artificial Sequence
  Synthetic polypeptide
WFLSLCPSVWLFVGYTVISSDKFVNLGRNNSQEMLITGFCTQEWTSAITRTERFGARSPRARIST

SEQ ID NO: 16273 - protein, 65 aa, Artificial Sequence; identical to SEQ ID NO: 16272
  Synthetic polypeptide

SEQ ID NO: 16274 - protein, 65 aa, Artificial Sequence; identical to SEQ ID NO: 16272
  Synthetic polypeptide

SEQ ID NO: 16275 - protein, 65 aa, Artificial Sequence; identical to SEQ ID NO: 16272
  Synthetic polypeptide

SEQ ID NO: 16276 - protein, 65 aa, Artificial Sequence; identical to SEQ ID NO: 16272
  Synthetic polypeptide

SEQ ID NO: 16277 - protein, 65 aa, Artificial Sequence; identical to SEQ ID NO: 16272
  Synthetic polypeptide

SEQ ID NO: 16278 - protein, 149 aa, Artificial Sequence
  Synthetic polypeptide
FTGDAHHGVLHTGVDIRHNKDRKVRRKEPKSQDIYLRLLVKLYRFLARRTNSTFNQVVLKRLFMSRTNRPPLSLSRMIRKMKLPGRENKTAVVVGTITDDVRVQEVPKLKTLRPLQGPEVRACQRPTGQPRLQKLTLDPTLLLKRFLLT

SEQ ID NO: 16279 - protein, 144 aa, Artificial Sequence
  Synthetic polypeptide
FTGDAHHGVLHTGVDIRHNKDRKVRRKEPKSQDIYLRLLVKLYRFLARRTNSTFNQVVLKRLFMSRTNRPPLSLSRMIRKMKLPGRENKTAVVVGTITDDVRVQEVPKLKAPGTPHSHTKPYVRSKGRKFERARGRRASRGYKN

SEQ ID NO: 16280 - protein, 95 aa, Artificial Sequence
  Synthetic polypeptide
FTGDAHHGVLHTGVDIRHNKDRKVRRKEPKSQDIYLRLLVKVSGQKNQLHIQPGCVEEVVYESHQPAASVPFPDDPEDEASWPGKQDGRGCGDHN

SEQ ID NO: 16281 - protein, 175 aa, Artificial Sequence
  Synthetic polypeptide
FTGDAHHGVLHTGVDIRHNKDRKVRRKEPKSQDIYLRLLVKLYRFLARRTNSTFNQVVLKRLFMSRTNRPPLSLSRMIRKMKLPGRENKTAVVVGTITDDVRVQEVPKLKVCALRVTSRARSRILRAGGKILTFDQLALDSPKGCGTVLLSGPRKGREVYRHFGKAPGTPHSHTK

SEQ ID NO: 16282 - protein, 144 aa, Artificial Sequence
  Synthetic polypeptide
GERRRRERRFIQDRAGRMGGEAPELALDPVPQDASTKKLSECLKRIGDELDSNMELQRMIAAVDTDSPREVFFRVAADMFSDGNFNWGRVVALFYFASKLVLKAGVKWRDLGSLQPLPPGFKRFTCLSIPRSWDYRPCAPRCRN

SEQ ID NO: 16283 - protein, 144 aa, Artificial Sequence; identical to SEQ ID NO: 16282
  Synthetic polypeptide

SEQ ID NO: 16284 - protein, 38 aa, Artificial Sequence
  Synthetic polypeptide
ARGGGGSGVSSRIEQGEWGGRHPSWPWTRCLRMRPPRS

SEQ ID NO: 16285 - protein, 38 aa, Artificial Sequence; identical to SEQ ID NO: 16284
  Synthetic polypeptide

SEQ ID NO: 16286 - protein, 38 aa, Artificial Sequence; identical to SEQ ID NO: 16284
  Synthetic polypeptide

SEQ ID NO: 16287 - protein, 38 aa, Artificial Sequence; identical to SEQ ID NO: 16284
  Synthetic polypeptide

SEQ ID NO: 16288 - protein, 38 aa, Artificial Sequence; identical to SEQ ID NO: 16284
  Synthetic polypeptide

SEQ ID NO: 16289 - protein, 38 aa, Artificial Sequence; identical to SEQ ID NO: 16284
  Synthetic polypeptide

SEQ ID NO: 16290 - protein, 38 aa, Artificial Sequence; identical to SEQ ID NO: 16284
  Synthetic polypeptide

SEQ ID NO: 16291 - protein, 51 aa, Artificial Sequence
  Synthetic polypeptide
REAAAGAAFHPGSSRANGGGGTRAGPGPGASGCVHQEAERVSQAHRGRTGQ

SEQ ID NO: 16292 - protein, 51 aa, Artificial Sequence; identical to SEQ ID NO: 16291
  Synthetic polypeptide

SEQ ID NO: 16293 - protein, 51 aa, Artificial Sequence; identical to SEQ ID NO: 16291
  Synthetic polypeptide

SEQ ID NO: 16294 - protein, 51 aa, Artificial Sequence; identical to SEQ ID NO: 16291
  Synthetic polypeptide

SEQ ID NO: 16295 - protein, 51 aa, Artificial Sequence; identical to SEQ ID NO: 16291
  Synthetic polypeptide

SEQ ID NO: 16296 - protein, 172 aa, Artificial Sequence
  Synthetic polypeptide
GERRRRERRFIQDRAGRMGGEAPELALDPVPQDASTKKLSECLKRIGDELDSNMELQRMIAAVDTDSPREVFFRVAADMFSDGNFNWGRVVALFYFASKLVLKALCTKVPELIRTIMGWTLDFLRERLLGWIQDQGGWDGLLSYFGTPTWQTVTIFVAGVLTASLTIWKKMG

SEQ ID NO: 16297 - protein, 39 aa, Artificial Sequence
  Synthetic polypeptide
GERRRRERRFIQDRAGRMGGEAPELALDPVPQDASTKKL

SEQ ID NO: 16298 - protein, 39 aa, Artificial Sequence; identical to SEQ ID NO: 16297
  Synthetic polypeptide

SEQ ID NO: 16299 - protein, 38 aa, Artificial Sequence
  Synthetic polypeptide
REAAAGAAFHPGSSRANGGGGTRAGPGPGASGCVHQEA

SEQ ID NO: 16300 - protein, 38 aa, Artificial Sequence; identical to SEQ ID NO: 16299
  Synthetic polypeptide

SEQ ID NO: 16301 - protein, 159 aa, Artificial Sequence
  Synthetic polypeptide
GERRRRERRFIQDRAGRMGGEAPELALDPVPQDASTKKLSECLKRIGDELDSNMELQRMIAAVDTDSPREVFFRVAADMFSDGNFNWGRVVALFYFASKLVLKALCTKVPELIRTIMGWTLDFLRERLLGWIQDQGGWTVTIFVAGVLTASLTIWKKMG

SEQ ID NO: 16302 - protein, 198 aa, Artificial Sequence
  Synthetic polypeptide
GERRRRERRFIQDRAGRMGGEAPELALDPVPQDASTKKLSECLKRIGDELDSNMELQRMIAAVDTDSPREVFFRVAADMFSDGNFNWGRVVALFYFASKLVLKALCTKVPELIRTIMGWTLDFLRERLLGWIQDQGGWVRLLKPPHPHHRALTTAPAPPSLPPATPLGPWAFWSRSQWCPLPIFRSSDVVYNAFSLRV

SEQ ID NO: 16303 - protein, 13 aa, Artificial Sequence
  Synthetic polypeptide
NFLPATSTRSSAA

SEQ ID NO: 16304 - protein, 13 aa, Artificial Sequence
  Synthetic polypeptide
NFLPATSTRSSAA

SEQ ID NO: 16305 - protein, 13 aa, Artificial Sequence
  Synthetic polypeptide
NFLPATSTRSSAA

SEQ ID NO: 16306 - protein, 13 aa, Artificial Sequence
  Synthetic polypeptide
NFLPATSTRSSAA

SEQ ID NO: 16307 - protein, 13 aa, Artificial Sequence
  Synthetic polypeptide
NFLPATSTRSSAA

SEQ ID NO: 16308 - protein, 32 aa, Artificial Sequence
  Synthetic polypeptide
RDPYKRRAEISCQQPAPGPRQPDLLLRHLDPH

SEQ ID NO: 16309 - protein, 32 aa, Artificial Sequence; identical to SEQ ID NO: 16308
  Synthetic polypeptide

SEQ ID NO: 16310 - protein, 32 aa, Artificial Sequence; identical to SEQ ID NO: 16308
  Synthetic polypeptide

SEQ ID NO: 16311 - protein, 32 aa, Artificial Sequence; identical to SEQ ID NO: 16308
  Synthetic polypeptide

SEQ ID NO: 16312 - protein, 32 aa, Artificial Sequence; identical to SEQ ID NO: 16308
  Synthetic polypeptide

SEQ ID NO: 16313 - protein, 182 aa, Artificial Sequence
  Synthetic polypeptide
KALLFLTCPFPSTDFCKGSQSPYGEDTQAICEEIHIREELKFPASNQHQVLGSLIFCFGIWILIDKTSFVSFVGLAFVPLQIWSKVLAISGIFTMGIALLGCVGALKELRCLLGLYFGMLLLLFATQITLGILISTQRAQKDTPTWTKGDRHKQLQRETHGKKREQEKEIDALKEETETYEP

SEQ ID NO: 16314 - protein, 147 aa, Artificial Sequence
  Synthetic polypeptide
KALLFLTCPFPSTDFCKGSQSPYGEDTQAICEEIHIREELKFPASNQHQVLGSLIFCFGIWILIDKTSFVSFAWPSCLCRSGPKSWPSQESSPWASPSWVVWGPSRSSAASWACILGCCCSCLPHRSPWESSSPLSGPSWSEACGTS

SEQ ID NO: 16315 - protein, 307 aa, Artificial Sequence
  Synthetic polypeptide
KALLFLTCPFPSTDFCKGSQSPYGEDTQAICEEIHIREELKFPASNQHQVLGSLIFCFGIWILIDKTSFVSFVGLAFVPLQIWSKVLAISGIFTMGIALLGCVGALKELRCLLGLYFGMLLLLFATQITLGILISTQRAQLERSLRDVVEKTIQKYGTNPEETAAEESWDYVQFQLRCCGWHYPQDWFQVLILRGNGSEAHRVPCSCYNLSATNDSTILDKVILPQLSRLGHLARSRHSADICAVPAESHIYREGCAQGLQKWLHNNLISIVGICLGVGLLELGFMTLSIFLCRNLDHVYNRLARYR

SEQ ID NO: 16316 - protein, 296 aa, Artificial Sequence
  Synthetic polypeptide
KALLFLTCPFPSTDFCKGSQSPYGEDTQAICEEIHIREELKFPASNQHQVLGSLIFCFGIWILIDKTSFVSFVGLAFVPLQIWSKVLAISGIFTMGIALLGCVGALKELRCLLGLYFGMLLLLFATQITLGILISTQRAQLERSLRDVVEKTIQKYGTNPEETAAEESWDYVQFQLRCCGWHYPQDWFQVLILRGNGSEAHRVPCSCYNLSATNDSTILDKVILPQLSRLGHLARSRHSADICAVPAESHIYREGCAQGLQKWLHNNLISIVGICLGVGLLEVIWPRPHPRSALNP

SEQ ID NO: 16317 - protein, 186 aa, Artificial Sequence
  Synthetic polypeptide
KALLFLTCPFPSTDFCKGSQSPYGEDTQAICEEIHIREELKFPASNQHQVLGSLIFCFGIWILIDKTSFVSFVGRLQAPIHCSPEASWSLSLLPANGVVHTNNNDHESHFSSTSYLSGLVAGLAFVPLQIWSKVLAISGIFTMGIALLGCVGALKELRCLLGLYFGMLLLLFATQITLGILISTQR

SEQ ID NO: 16318 - protein, 17 aa, Artificial Sequence
  Synthetic polypeptide
AAPRFLTHKNYSRSSAA

SEQ ID NO: 16319 - protein, 17 aa, Artificial Sequence
  Synthetic polypeptide
AAPRFLTHKNYSRSSAA

SEQ ID NO: 16320 - protein, 17 aa, Artificial Sequence
  Synthetic polypeptide
AAPRFLTHKNYSRSSAA

SEQ ID NO: 16321 - protein, 17 aa, Artificial Sequence
  Synthetic polypeptide
AAPRFLTHKNYSRSSAA

SEQ ID NO: 16322 - protein, 17 aa, Artificial Sequence
  Synthetic polypeptide
AAPRFLTHKNYSRSSAA

SEQ ID NO: 16323 - protein, 21 aa, Artificial Sequence
  Synthetic polypeptide
PTKTTVGPRQPDLLLRHLDPH

SEQ ID NO: 16324 - protein, 21 aa, Artificial Sequence
  Synthetic polypeptide
PTKTTVGPRQPDLLLRHLDPH

SEQ ID NO: 16325 - protein, 21 aa, Artificial Sequence
  Synthetic polypeptide
PTKTTVGPRQPDLLLRHLDPH

SEQ ID NO: 16326 - protein, 21 aa, Artificial Sequence
  Synthetic polypeptide
PTKTTVGPRQPDLLLRHLDPH

SEQ ID NO: 16327 - protein, 21 aa, Artificial Sequence
  Synthetic polypeptide
PTKTTVGPRQPDLLLRHLDPH

SEQ ID NO: 16328 - protein, 91 aa, Artificial Sequence
  Synthetic polypeptide
AAPRFLTHKNYSRLGLRASADLVQSPGHLRNLHHGHRPPGLCGGPQGAPLPPGPVFWDAAAPVCHTDHPGNPHLHSAGPERHTDLDQGRQA

SEQ ID NO: 16329 - protein, 115 aa, Artificial Sequence
  Synthetic polypeptide
PTKTTVGLAFVPLQIWSKVLAISGIFTMGIALLGCVGALKELRCLLGLYFGMLLLLFATQITLGILISTQRAQKDTPTWTKGDRHKQLQRETHGKKREQEKEIDALKEETETYEP

SEQ ID NO: 16330 - protein, 88 aa, Artificial Sequence
  Synthetic polypeptide
AAPRFLTHKNYSRLGLRASADLVQSPGHLRNLHHGHRPPGLCGGPQGAPLPPGPVFWDAAAPVCHTDHPGNPHLHSAGPAGAKLAGRR

SEQ ID NO: 16331 - protein, 82 aa, Artificial Sequence
  Synthetic polypeptide
PTKTTVGLAFVPLQIWSKVLAISGIFTMGIALLGCVGALKELRCLLGLYFGMLLLLFATQITLGILISTQRAQLERSLRDVV

SEQ ID NO: 16332 - protein, 134 aa, Artificial Sequence
  Synthetic polypeptide
AAPRFLTHKNYSRLGLRASADLVQSPGHLRNLHHGHRPPGLCGGPQGAPLPPGPVFWDAAAPVCHTDHPGNPHLHSAGPAGAKLAGRRRENHPKVRHQPRGDRGRGELGLCAVPAALLRLALPAGLVPSPHPER

SEQ ID NO: 16333 - protein, 134 aa, Artificial Sequence; identical to SEQ ID NO: 16332
  Synthetic polypeptide

SEQ ID NO: 16334 - protein, 240 aa, Artificial Sequence
  Synthetic polypeptide
PTKTTVGLAFVPLQIWSKVLAISGIFTMGIALLGCVGALKELRCLLGLYFGMLLLLFATQITLGILISTQRAQLERSLRDVVEKTIQKYGTNPEETAAEESWDYVQFQLRCCGWHYPQDWFQVLILRGNGSEAHRVPCSCYNLSATNDSTILDKVILPQLSRLGHLARSRHSADICAVPAESHIYREGCAQGLQKWLHNNLISIVGICLGVGLLELGFMTLSIFLCRNLDHVYNRLARYR

SEQ ID NO: 16335 - protein, 229 aa, Artificial Sequence
  Synthetic polypeptide
PTKTTVGLAFVPLQIWSKVLAISGIFTMGIALLGCVGALKELRCLLGLYFGMLLLLFATQITLGILISTQRAQLERSLRDVVEKTIQKYGTNPEETAAEESWDYVQFQLRCCGWHYPQDWFQVLILRGNGSEAHRVPCSCYNLSATNDSTILDKVILPQLSRLGHLARSRHSADICAVPAESHIYREGCAQGLQKWLHNNLISIVGICLGVGLLEVIWPRPHPRSALNP

SEQ ID NO: 16336 - protein, 78 aa, Artificial Sequence
  Synthetic polypeptide
AAPRFLTHKNYSRLGLRASADLVQSPGHLRNLHHGHRPPGLCGGPQGAPLPPGPVFWDAAAPVCHTDHPGNPHLHSAG

SEQ ID NO: 16337 - protein, 71 aa, Artificial Sequence
  Synthetic polypeptide
PTKTTVGLAFVPLQIWSKVLAISGIFTMGIALLGCVGALKELRCLLGLYFGMLLLLFATQITLGILISTQR

SEQ ID NO: 16338 - protein, 33 aa, Artificial Sequence
  Synthetic polypeptide
SQHFRRPRWEDRLSPGVGDQPGQHGGPELGPKW

SEQ ID NO: 16339 - protein, 33 aa, Artificial Sequence; identical to SEQ ID NO: 16338
  Synthetic polypeptide

SEQ ID NO: 16340 - protein, 33 aa, Artificial Sequence; identical to SEQ ID NO: 16338
  Synthetic polypeptide

SEQ ID NO: 16341 - protein, 33 aa, Artificial Sequence; identical to SEQ ID NO: 16338
  Synthetic polypeptide

SEQ ID NO: 16342 - protein, 33 aa, Artificial Sequence; identical to SEQ ID NO: 16338
  Synthetic polypeptide

SEQ ID NO: 16343 - protein, 33 aa, Artificial Sequence; identical to SEQ ID NO: 16338
  Synthetic polypeptide

SEQ ID NO: 16344 - protein, 155 aa, Artificial Sequence
  Synthetic polypeptide
AQELETSLGNMADLNWGPSGEEAGAGGSISSGGFYGVSSQYESLEHMTLTCSSKVCSFGKQVVEKVETERAQLEDGRFVYRLLRSPMCEYLVNFLHKLRQLPERYMMNSVLENFTILQVVTNRDTQELLLCTAYVFEVSTSERGAQHHIYRLVRD

SEQ ID NO: 16345 - protein, 155 aa, Artificial Sequence; identical to SEQ ID NO: 16344
  Synthetic polypeptide

SEQ ID NO: 16346 - protein, 155 aa, Artificial Sequence; identical to SEQ ID NO: 16344
  Synthetic polypeptide

SEQ ID NO: 16347 - protein, 155 aa, Artificial Sequence; identical to SEQ ID NO: 16344
  Synthetic polypeptide

SEQ ID NO: 16348 - protein, 155 aa, Artificial Sequence; identical to SEQ ID NO: 16344
  Synthetic polypeptide

SEQ ID NO: 16349 - protein, 155 aa, Artificial Sequence; identical to SEQ ID NO: 16344
  Synthetic polypeptide

SEQ ID NO: 16350 - protein, 35 aa, Artificial Sequence
  Synthetic polypeptide
MTRWLMPVIPALSEAKVGGSLEPRSWRPAWATWRT

SEQ ID NO: 16351 - protein, 35 aa, Artificial Sequence; identical to SEQ ID NO: 16350
  Synthetic polypeptide

SEQ ID NO: 16352 - protein, 35 aa, Artificial Sequence; identical to SEQ ID NO: 16350
  Synthetic polypeptide

SEQ ID NO: 16353 - protein, 35 aa, Artificial Sequence; identical to SEQ ID NO: 16350
  Synthetic polypeptide

SEQ ID NO: 16354 - protein, 35 aa, Artificial Sequence; identical to SEQ ID NO: 16350
  Synthetic polypeptide

SEQ ID NO: 16355 - protein, 35 aa, Artificial Sequence; identical to SEQ ID NO: 16350
  Synthetic polypeptide

SEQ ID NO: 16356 - protein, 390 aa, Artificial Sequence
  Synthetic polypeptide
LMPVIPALWEAEEDGSPEAWAEATGAYVPGRDKPDLPTWKRNFRSALNRKEGLRLAEDRSKDPHDPHKIYEFVNSGVGDFSQPDTSPDTNGGGSTSDTQEDILDELLGNMVLAPLPDPGPPSLAVAPEPCPQPLRSPSLDNPTPFPNLGPSENPLKRLLVPGEEWEFEVTAFYRGRQVFQQTISCPEGLRLVGSEVGDRTLPGWPVTLPDPGMSLTDRGVMSYVRHVLSCLGGGLALWRAGQWLWAQRLGHCHTYWAVSEELLPNSGHGPDGEVPKDKEGGVFDLGPFIVDLITFTEGSGRSPRYALWFCVGESWPQDQPWTKRLVMVKVVPTCLRALVEMARVGGASSLENTVDLHISNSHPLSLTSDQYKAYLQDLVEGMDFQGPGES

SEQ ID NO: 16357 - protein, 390 aa, Artificial Sequence; identical to SEQ ID NO: 16356
  Synthetic polypeptide

SEQ ID NO: 16358 - protein, 390 aa, Artificial Sequence; identical to SEQ ID NO: 16356
  Synthetic polypeptide

SEQ ID NO: 16359 - protein, 50 aa, Artificial Sequence
  Synthetic polypeptide
SQHFGRPRRTDHLRPGPRPLVHMFPGGISQTCQPGRGISALPSTAKKGCV

SEQ ID NO: 16360 - protein, 50 aa, Artificial Sequence; identical to SEQ ID NO: 16359
  Synthetic polypeptide

SEQ ID NO: 16361 - protein, 50 aa, Artificial Sequence; identical to SEQ ID NO: 16359
  Synthetic polypeptide

SEQ ID NO: 16362 - protein, 50 aa, Artificial Sequence; identical to SEQ ID NO: 16359
  Synthetic polypeptide

SEQ ID NO: 16363 - protein, 50 aa, Artificial Sequence; identical to SEQ ID NO: 16359
  Synthetic polypeptide

SEQ ID NO: 16364 - protein, 50 aa, Artificial Sequence; identical to SEQ ID NO: 16359
  Synthetic polypeptide

SEQ ID NO: 16365 - protein, 50 aa, Artificial Sequence; identical to SEQ ID NO: 16359
  Synthetic polypeptide

SEQ ID NO: 16366 - protein, 50 aa, Artificial Sequence; identical to SEQ ID NO: 16359
  Synthetic polypeptide

SEQ ID NO: 16367 - protein, 50 aa, Artificial Sequence; identical to SEQ ID NO: 16359
  Synthetic polypeptide

SEQ ID NO: 16368 - protein, 50 aa, Artificial Sequence; identical to SEQ ID NO: 16359
  Synthetic polypeptide

SEQ ID NO: 16369 - protein, 50 aa, Artificial Sequence; identical to SEQ ID NO: 16359
  Synthetic polypeptide

SEQ ID NO: 16370 - protein, 50 aa, Artificial Sequence; identical to SEQ ID NO: 16359
  Synthetic polypeptide

SEQ ID NO: 16371 - protein, 50 aa, Artificial Sequence; identical to SEQ ID NO: 16359
  Synthetic polypeptide

SEQ ID NO: 16372 - protein, 371 aa, Artificial Sequence
  Synthetic polypeptide
LMPVIPALWEAEEDGSPEAWAEATGAYVPGRDKPDLPTWKRNFRSALNRKEGLRLAEDRSKDPHDPHKIYEFVNSGVGDFSQPDTSPDTNGGGSTSDTQEDILDELLGNMVLAPLPDPGPPSLAVAPEPCPQPLRSPSLDNPTPFPNLGPSENPLKRLLVPGEEWEFEVTAFYRGRQVFQQTISCPEGLRLVGSEVGDRTLPGWPVTLPDPGMSLTDRGVMSYVRHVLSCLGGGLALWRAGQWLWAQRLGHCHTYWAVSEELLPNSGHGPDGEVPKDKEGGVFDLGPFIVGCAHVPQGLGRNGPGRGCLLPGEYCGPAHFQQPPTLPHLRPVQGLPAGLGGGHGFPGPWGELSPRSSWCASNPPVPHHLNQ

SEQ ID NO: 16373 - protein, 415 aa, Artificial Sequence
  Synthetic polypeptide
LMPVIPALWEAEEDGSPEAWAEATGAYVPGRDKPDLPTWKRNFRSALNRKEGLRLAEDRSKDPHDPHKIYEFVNSGVGDFSQPDTSPDTNGGGSTSDTQEDILDELLGNMVLAPLPDPGPPSLAVAPEPCPQPLRSPSLDNPTPFPNLGPSENPLKRLLVPGEEWEFEVTAFYRGRQVFQQTISCPEGLRLVGSEVGDRTLPGWPVTLPDPGMSLTDRGVMSYVRHVLSCLGGGLALWRAGQWLWAQRLGHCHTYWAVSEELLPNSGHGPDGEVPKDKEGGVFDLGPFIVGSWAPRSDYLHGRKRTLTTLCPLVLCGGVMAPGPAVDQEARDGQGCAHVPQGLGRNGPGRGCLLPGEYCGPAHFQQPPTLPHLRPVQGLPAGLGGGHGFPGPWGELSPRSSWCASNPPVPHHLNQ

SEQ ID NO: 16374 - protein, 292 aa, Artificial Sequence
  Synthetic polypeptide
LMPVIPALWEAEEDGSPEAWAEATGAYVPGRDKPDLPTWKRNFRSALNRKEGLRLAEDRSKDPHDPHKIYEFVNSGVGDFSQPDTSPDTNGGGSTSDTQEDILDELLGNMVLAPLPDPGPPSLAVAPEPCPQPLRSPSLDNPTPFPNLGPSENPLKRLLVPGEEWEFEVTAFYRGRQVFQQTISCPEGLRLVGSEVGDRTLPGWPVTLPDPGMSLTDRGVMSYVRHVLSCLGGGLALWRAGQWLWAQRLGHCHTYWAVSEELLPNSGHGPDGEVPKDKEGGVFDLGPFIVGE

SEQ ID NO: 16375 - protein, 263 aa, Artificial Sequence
  Synthetic polypeptide
LMPVIPALWEAEEDGSPEAWAEATGAYVPGRDKPDLPTWKRNFRSALNRKEGLRLAEDRSKDPHDPHKIYEFVNSGVGDFSQPDTSPDTNGGGSTSDTQEDILDELLGNMVLAPLPDPGPPSLAVAPEPCPQPLRSPSLDNPTPFPNLGPSENPLKRLLVPGEDLITFTEGSGRSPRYALWFCVGESWPQDQPWTKRLVMVKVVPTCLRALVEMARVGGASSLENTVDLHISNSHPLSLTSDQYKAYLQDLVEGMDFQGPGES

SEQ ID NO: 16376 - protein, 263 aa, Artificial Sequence; identical to SEQ ID NO: 16375
  Synthetic polypeptide

SEQ ID NO: 16377 - protein, 227 aa, Artificial Sequence
  Synthetic polypeptide
LMPVIPALWEAEEDGSPEAWAEATGAYVPGRDKPDLPTWKRNFRSALNRKEGLRLAEDRSKDPHDPHKIYEFVNSGVGDFSQPDTSPDTNGGGSTSDTQEDILDELLGNMVLAPLPDPGPPSLAVAPEPCPQPLRSPSLDNPTPFPNLGPSENPLKRLLVPGEDLITFTEGSGRSPRYALWFCVGESWPQDQPWTKRLVMVKVVPTCLRALVEMARVGGASSLENTV

SEQ ID NO: 16378 - protein, 250 aa, Artificial Sequence
  Synthetic polypeptide
LMPVIPALWEAEEDGSPEAWAEATGAYVPGRDKPDLPTWKRNFRSALNRKEGLRLAEDRSKDPHDPHKIYEFVNSGVGDFSQPDTSPDTNGGGSTSDTQEDILDELLGNMVLAPLPDPGPPSLAVAPEPCPQPLRSPSLDNPTPFPNLGPSENPLKRLLVPGEEWEFEVTAFYRGRQVFQQTISCPEGLRLVGSEVGDRTLPGWPVTLPDPGMSLTDRGVMSYVRHVLSCLGGGLALWRAGQWLWAQRLG

SEQ ID NO: 16379 - protein, 116 aa, Artificial Sequence
  Synthetic polypeptide
LMPVIPALWEAEEDGSPEAWAEATGAYVPGRDKPDLPTWKRNFRSALNRKEGLRLAEDRSKDPHDPHKIYEFVNSGVGDFSQPDTSPDTNGGGSTSDTQEDILDELLEWEFEVTAF

SEQ ID NO: 16380 - protein, 153 aa, Artificial Sequence
  Synthetic polypeptide
LMPVIPALWEAEEDGSPEAWAEATGAYVPGRDKPDLPTWKRNFRSALNRKEGLRLAEDRSKDPHDPHKIYEFVNSGVGDFSQPDTSPDTNGGGSTSDTQEDILDELLGNMVLAPLPDPGPPSLAVAPEPCPQPLRSPSLDNPTPFPNLGPSEN

SEQ ID NO: 16381 - protein, 32 aa, Artificial Sequence
  Synthetic polypeptide
LMPVIPALWEAEEDGSPEAWAEATGAYVPGRD

SEQ ID NO: 16382 - protein, 28 aa, Artificial Sequence
  Synthetic polypeptide
SQHFGRPRRTDHLRPGPRPLVHMFPGGI

SEQ ID NO: 16383 - protein, 65 aa, Artificial Sequence
  Synthetic polypeptide
LMPVIPALWEAEEDGSPEAWAEATGAYVPGRDKPDLPTWKRNFRSALNRKEGLRLAEDRSKDPHD

SEQ ID NO: 16384 - protein, 36 aa, Artificial Sequence
  Synthetic polypeptide
LTRLLPATQEAEEPGGSLEPRSSRLWRASWLFHPWT

SEQ ID NO: 16385 - protein, 36 aa, Artificial Sequence; identical to SEQ ID NO: 16384
  Synthetic polypeptide

SEQ ID NO: 16386 - protein, 36 aa, Artificial Sequence; identical to SEQ ID NO: 16384
  Synthetic polypeptide

SEQ ID NO: 16387 - protein, 36 aa, Artificial Sequence; identical to SEQ ID NO: 16384
  Synthetic polypeptide

SEQ ID NO: 16388 - protein, 48 aa, Artificial Sequence
  Synthetic polypeptide
LAKHGSSHVYSQLLRRQRSREDHLSPGVQGCGGHPGCFTRGLELAIGL

SEQ ID NO: 16389 - protein, 48 aa, Artificial Sequence; identical to SEQ ID NO: 16388
  Synthetic polypeptide

SEQ ID NO: 16390 - protein, 48 aa, Artificial Sequence; identical to SEQ ID NO: 16388
  Synthetic polypeptide

SEQ ID NO: 16391 - protein, 23 aa, Artificial Sequence
  Synthetic polypeptide
AQEFKAVEGILAVSPVDLNLPLD

SEQ ID NO: 16392 - protein, 23 aa, Artificial Sequence
  Synthetic polypeptide
AQEFKAVEGILAVSPVDLNLPLD

SEQ ID NO: 16393 - protein, 23 aa, Artificial Sequence
  Synthetic polypeptide
AQEFKAVEGILAVSPVDLNLPLD

SEQ ID NO: 16394 - protein, 23 aa, Artificial Sequence
  Synthetic polypeptide
AQEFKAVEGILAVSPVDLNLPLD

SEQ ID NO: 16395 - protein, 57 aa, Artificial Sequence
  Synthetic polypeptide
LAKHGSSHVYSQLLRRQRSREDHLSPGVQGCGGHPGCFTRGLELAIGLSSFSEAATR

SEQ ID NO: 16396 - protein, 126 aa, Artificial Sequence
  Synthetic polypeptide
SHHCTPALEVDIYTVKVEDLTFTSPFCLQVKRNDYVHALVAYFNIEFTRCHKRTGFSTSPESPYTHWKQTVFYMEDYLTVKTGEEIFGTIGMRPNAKNNRDLDFTIDLDFKGQLCELSCSTDYRMR

SEQ ID NO: 16397 - protein, 126 aa, Artificial Sequence; identical to SEQ ID NO: 16396
  Synthetic polypeptide

SEQ ID NO: 16398 - protein, 126 aa, Artificial Sequence; identical to SEQ ID NO: 16396
  Synthetic polypeptide

SEQ ID NO: 16399 - protein, 42 aa, Artificial Sequence
  Synthetic polypeptide
CLRSQLLGRITWAWEFKAAVSCDHITALQLWRWTSIPSRWKT

SEQ ID NO: 16400 - protein, 42 aa, Artificial Sequence; identical to SEQ ID NO: 16399
  Synthetic polypeptide

SEQ ID NO: 16401 - protein, 42 aa, Artificial Sequence; identical to SEQ ID NO: 16399
  Synthetic polypeptide

SEQ ID NO: 16402 - protein, 35 aa, Artificial Sequence
  Synthetic polypeptide
AVITSLHSSFGGGHLYRQGGRPDLHLPVLPASEAE

SEQ ID NO: 16403 - protein, 35 aa, Artificial Sequence; identical to SEQ ID NO: 16402
  Synthetic polypeptide

SEQ ID NO: 16404 - protein, 35 aa, Artificial Sequence; identical to SEQ ID NO: 16402
  Synthetic polypeptide

SEQ ID NO: 16405 - protein, 110 aa, Artificial Sequence
  Synthetic polypeptide
CLAQRTSEPPEGQPAHQRADYEAERGGRADPRRGPAPPANRLPRAAPQRAGDPGAGPARRAPQPLAHRLPAASVAHPGPAHPAALHGHSPAARQQPGDPARGGGRGRRLL

SEQ ID NO: 16406 - protein, 110 aa, Artificial Sequence; identical to SEQ ID NO: 16405
  Synthetic polypeptide

SEQ ID NO: 16407 - protein, 109 aa, Artificial Sequence
  Synthetic polypeptide
VSPSALLSPQRASPHINELTMKLSVEDVLTRAEALHRQLTACPELPHNVQEILGLAPPAEPHSPSPTASPLPLSPTRAPPTPPPSTDTAPQPDSSLEILPEEEDEGADS

SEQ ID NO: 16408 - protein, 109 aa, Artificial Sequence; identical to SEQ ID NO: 16407
  Synthetic polypeptide

SEQ ID NO: 16409 - protein, 11 aa, Artificial Sequence
  Synthetic polypeptide
APRGPARTSTS

SEQ ID NO: 16410 - protein, 11 aa, Artificial Sequence
  Synthetic polypeptide
APRGPARTSTS

SEQ ID NO: 16411 - protein, 31 aa, Artificial Sequence
  Synthetic polypeptide
AVTGWDPTRSWSGFSEGPPAAATSRAWATAC

SEQ ID NO: 16412 - protein, 31 aa, Artificial Sequence; identical to SEQ ID NO: 16411
  Synthetic polypeptide

SEQ ID NO: 16413 - protein, 31 aa, Artificial Sequence; identical to SEQ ID NO: 16411
  Synthetic polypeptide

SEQ ID NO: 16414 - protein, 31 aa, Artificial Sequence; identical to SEQ ID NO: 16411
  Synthetic polypeptide

SEQ ID NO: 16415 - protein, 31 aa, Artificial Sequence; identical to SEQ ID NO: 16411
  Synthetic polypeptide

SEQ ID NO: 16416 - protein, 31 aa, Artificial Sequence; identical to SEQ ID NO: 16411
  Synthetic polypeptide

SEQ ID NO: 16417 - protein, 31 aa, Artificial Sequence; identical to SEQ ID NO: 16411
  Synthetic polypeptide

SEQ ID NO: 16418 - protein, 31 aa, Artificial Sequence; identical to SEQ ID NO: 16411
  Synthetic polypeptide

SEQ ID NO: 16419 - protein, 31 aa, Artificial Sequence; identical to SEQ ID NO: 16411
  Synthetic polypeptide

SEQ ID NO: 16420 - protein, 31 aa, Artificial Sequence; identical to SEQ ID NO: 16411
  Synthetic polypeptide

SEQ ID NO: 16421 - protein, 78 aa, Artificial Sequence
  Synthetic polypeptide
GWVWYPSFWAPVCSVSFVTQVVARYSCLPTRLSRAGTRRDPGLGFQKALPPQRPPEPGLLHAEVALRVSAMDKLPSQH

SEQ ID NO: 16422 - protein, 78 aa, Artificial Sequence; identical to SEQ ID NO: 16421
  Synthetic polypeptide

SEQ ID NO: 16423 - protein, 78 aa, Artificial Sequence; identical to SEQ ID NO: 16421
  Synthetic polypeptide

SEQ ID NO: 16424 - protein, 78 aa, Artificial Sequence; identical to SEQ ID NO: 16421
  Synthetic polypeptide

SEQ ID NO: 16425 - protein, 78 aa, Artificial Sequence; identical to SEQ ID NO: 16421
  Synthetic polypeptide

SEQ ID NO: 16426 - protein, 78 aa, Artificial Sequence; identical to SEQ ID NO: 16421
  Synthetic polypeptide

SEQ ID NO: 16427 - protein, 78 aa, Artificial Sequence; identical to SEQ ID NO: 16421
  Synthetic polypeptide

SEQ ID NO: 16428 - protein, 78 aa, Artificial Sequence; identical to SEQ ID NO: 16421
  Synthetic polypeptide

SEQ ID NO: 16429 - protein, 78 aa, Artificial Sequence; identical to SEQ ID NO: 16421
  Synthetic polypeptide

SEQ ID NO: 16430 - protein, 78 aa, Artificial Sequence; identical to SEQ ID NO: 16421
  Synthetic polypeptide

SEQ ID NO: 16431 - protein, 134 aa, Artificial Sequence
  Synthetic polypeptide
SHAIAVSPLGCHGLGPDEILVWVFRRPSRRSDLQSLGYCMLKWLYGFLPWTNCLPNTEDIMKQKQKFVDKPGPFVGPCGHWIRPSETLQKYLKVVMALTYEEKPPYAMLRNNLEALLQDLRVSPYDPIGLPMVP

SEQ ID NO: 16432 - protein, 134 aa, Artificial Sequence; identical to SEQ ID NO: 16431
  Synthetic polypeptide

SEQ ID NO: 16433 - protein, 134 aa, Artificial Sequence; identical to SEQ ID NO: 16431
  Synthetic polypeptide

SEQ ID NO: 16434 - protein, 134 aa, Artificial Sequence; identical to SEQ ID NO: 16431
  Synthetic polypeptide

SEQ ID NO: 16435 - protein, 134 aa, Artificial Sequence; identical to SEQ ID NO: 16431
  Synthetic polypeptide

SEQ ID NO: 16436 - protein, 134 aa, Artificial Sequence; identical to SEQ ID NO: 16431
  Synthetic polypeptide

SEQ ID NO: 16437 - protein, 72 aa, Artificial Sequence
  Synthetic polypeptide
SHAIAVSPLGCHGLGPDEILVWVFRRPSRRSDLQSLGYCMLKWLYGFLPWTNCLPNTEDIMKQKQKLPWDSF

SEQ ID NO: 16438 - protein, 72 aa, Artificial Sequence; identical to SEQ ID NO: 16437
  Synthetic polypeptide

SEQ ID NO: 16439 - protein, 81 aa, Artificial Sequence
  Synthetic polypeptide
SHAIAVSPLGCHGLGPDEILVWVFRRPSRRSDLQSLGYCMLKWLYGFLPWTNCLPNTEDIMKQKQKCICTLKIACWPWCCV

SEQ ID NO: 16440 - protein, 66 aa, Artificial Sequence
  Synthetic polypeptide
SHAIAVSPLGCHGLGPDEILVWVFRRPSRRSDLQSLGYCMLKWLYGFLPWTNCLPNTEDIMKQKQK

SEQ ID NO: 16441 - protein, 94 aa, Artificial Sequence
  Synthetic polypeptide
CFRALGLDPDSMGADLCSTTYYFGRPWCCTPHPVSDCGRLGVREAFPTLAGACGLSWQGSLRRCSGAPPVGPHSCPLHQEQKRDLAGSAQPVSS

SEQ ID NO: 16442 - protein, 94 aa, Artificial Sequence; identical to SEQ ID NO: 16441
  Synthetic polypeptide

SEQ ID NO: 16443 - protein, 94 aa, Artificial Sequence; identical to SEQ ID NO: 16441
  Synthetic polypeptide

SEQ ID NO: 16444 - protein, 94 aa, Artificial Sequence; identical to SEQ ID NO: 16441
  Synthetic polypeptide

SEQ ID NO: 16445 - protein, 94 aa, Artificial Sequence; identical to SEQ ID NO: 16441
  Synthetic polypeptide

SEQ ID NO: 16446 - protein, 94 aa, Artificial Sequence; identical to SEQ ID NO: 16441
  Synthetic polypeptide

SEQ ID NO: 16447 - protein, 272 aa, Artificial Sequence
  Synthetic polypeptide
VSGRWVWIQTAWVQISVPLLTILGDPGAAPLILSRIVGGWECEKHSQPWQVLVASRGRAVCGGVLVHPQWVLTAAHCIRNKSVILLGRHSLFHPEDTGQVFQVSHSFPHPLYDMSLLKNRFLRPGDDSSHDLMLLRLSEPAELTDAVKVMDLPTQEPALGTTCYASGWGSIEPEEFLTPKKLQCVDLHVISNDVCAQVHPQKVTKFMLCAGRWTGGKSTCSGDSGGPLVCNGVLQGITSWGSEPCALPERPSLYTKVVHYRKWIKDTIVANP

SEQ ID NO: 16448 - protein, 82 aa, Artificial Sequence
  Synthetic polypeptide
FQGAGSGSRQHGCRSLFHYLLFWETLVLHPSSCLGLWEAGSARSIPNPGRCLWPLVAGQSAAVFWCTPSGSSQLPTASGTKA

SEQ ID NO: 16449 - protein, 82 aa, Artificial Sequence; identical to SEQ ID NO: 16448
  Synthetic polypeptide

SEQ ID NO: 16450 - protein, 82 aa, Artificial Sequence; identical to SEQ ID NO: 16448
  Synthetic polypeptide

SEQ ID NO: 16451 - protein, 82 aa, Artificial Sequence; identical to SEQ ID NO: 16448
  Synthetic polypeptide

SEQ ID NO: 16452 - protein, 82 aa, Artificial Sequence; identical to SEQ ID NO: 16448
  Synthetic polypeptide

SEQ ID NO: 16453 - protein, 82 aa, Artificial Sequence; identical to SEQ ID NO: 16448
  Synthetic polypeptide

SEQ ID NO: 16454 - protein, 101 aa, Artificial Sequence
  Synthetic polypeptide
VSGRWVWIQTAWVQISVPLLTILGDPGAAPLILSRIVGGWECEKHSQPWQVLVASRGRAVCGGVLVHPQWVLTAAHCIRNKSVILLGRHSLFHPEDTGQAR

SEQ ID NO: 16455 - protein, 82 aa, Artificial Sequence
  Synthetic polypeptide
CFRALGLDPDSMGADLCSTTYYFGRPWCCTPHPVSDCGRLGVREAFPTLAGACGLSWQGSLRRCSGAPPVGPHSCPLHQEAR

SEQ ID NO: 16456 - protein, 82 aa, Artificial Sequence; identical to SEQ ID NO: 16455
  Synthetic polypeptide

SEQ ID NO: 16457 - protein, 206 aa, Artificial Sequence
  Synthetic polypeptide
VSGRWVWIQTAWVQISVPLLTILGDPGAAPLILSRIVGGWECEKHSQPWQVLVASRGRAVCGGVLVHPQWVLTAAHCIRKPGDDSSHDLMLLRLSEPAELTDAVKVMDLPTQEPALGTTCYASGWGSIEPEEFLTPKKLQCVDLHVISNDVCAQVHPQKVTKFMLCAGRWTGGKSTCSWVILITELTMPALPMVLHGSLVPWRGGV

SEQ ID NO: 16458 - protein, 103 aa, Artificial Sequence
  Synthetic polypeptide
FQGAGSGSRQHGCRSLFHYLLFWETLVLHPSSCLGLWEAGSARSIPNPGRCLWPLVAGQSAAVFWCTPSGSSQLPTASGSQVMTPATTSCCSACQSLPSSRML

SEQ ID NO: 16459 - protein, 103 aa, Artificial Sequence; identical to SEQ ID NO: 16458
  Synthetic polypeptide

SEQ ID NO: 16460 - protein, 238 aa, Artificial Sequence
  Synthetic polypeptide
VSGRWVWIQTAWVQISVPLLTILGDPGAAPLILSRIVGGWECEKHSQPWQVLVASRGRAVCGGVLVHPQWVLTAAHCIRNKSVILLGRHSLFHPEDTGQVFQVSHSFPHPLYDMSLLKNRFLRPGDDSSHDLMLLRLSEPAELTDAVKVMDLPTQEPALGTTCYASGWGSIEPEEFLTPKKLQCVDLHVISNDVCAQVHPQKVTKFMLCAGRWTGGKSTCSVSHPYSQDLEGKGEWGP

SEQ ID NO: 16461 - protein, 135 aa, Artificial Sequence
  Synthetic polypeptide
VSGRWVWIQTAWVQISVPLLTILGDPGAAPLILSRIVGGWECEKHSQPWQVLVASRGRAVCGGVLVHPQWVLTAAHCIRNKSVILLGRHSLFHPEDTGQVFQVSHSFPHPLYDMSLLKNRFLRPGDDSTLNQRSS

SEQ ID NO: 16462 - protein, 229 aa, Artificial Sequence
  Synthetic polypeptide
VSGRWVWIQTAWVQISVPLLTILGDPGAAPLILSRIVGGWECEKHSQPWQVLVASRGRAVCGGVLVHPQWVLTAAHCIRKPGDDSSHDLMLLRLSEPAELTDAVKVMDLPTQEPALGTTCYASGWGSIEPEEFLTPKKLQCVDLHVISNDVCAQVHPQKVTKFMLCAGRWTGGKSTCSGDSGGPLVCNGVLQGITSWGSEPCALPERPSLYTKVVHYRKWIKDTIVANP

SEQ ID NO: 16463 - protein, 249 aa, Artificial Sequence
  Synthetic polypeptide
VSGRWVWIQTAWVQISVPLLTILGDPGAAPLILSRIVGGWECEKHSQPWQVLVASRGRAVCGGVLVHPQWVLTAAHCIRNKSVILLGRHSLFHPEDTGQVFQVSHSFPHPLYDMSLLKNRFLRPGDDSSHDLMLLRLSEPAELTDAVKVMDLPTQEPALGTTCYASGWGSIEPEEFLTPKKLQCVDLHVISNDVCAQVHPQKVTKFMLCAGRWTGGKSTCSWVILITELTMPALPMVLHGSLVPWRGGV

SEQ ID NO: 16464 - protein, 278 aa, Artificial Sequence
  Synthetic polypeptide
VSGRWVWIQTAWVQISVPLLTILGDPGAAPLILSRIVGGWECEKHSQPWQVLVASRGRAVCGGVLVHPQWVLTAAHCIRNKSVILLGRHSLFHPEDTGQVFQVSHSFPHPLYDMSLLKNRFLRPGDDSSHDLMLLRLSEPAELTDAVKVMDLPTQEPALGTTCYASGWGSIEPEECTPGPDVLTPKKLQCVDLHVISNDVCAQVHPQKVTKFMLCAGRWTGGKSTCSGDSGGPLVCNGVLQGITSWGSEPCALPERPSLYTKVVHYRKWIKDTIVANP

SEQ ID NO: 16465 - protein, 171 aa, Artificial Sequence
  Synthetic polypeptide
CFRALGLDPDSMGADLCSTTYYFGRPWAVCGGVLVHPQWVLTAAHCIRNKSVILLGRHSLFHPEDTGQVFQVSHSFPHPLYDMSLLKNRFLRPGDDSSHDLMLLRLSEPAELTDAVKVMDLPTQEPALGTTCYASGWGSIEPEEFLTPKKLQCVDLHVISNDVCAQVHPQK

SEQ ID NO: 16466 - protein, 51 aa, Artificial Sequence
  Synthetic polypeptide
VSGRWVWIQTAWVQISVPLLTILGDPGQSAAVFWCTPSGSSQLPTASGTKA

SEQ ID NO: 16467 - protein, 51 aa, Artificial Sequence; identical to SEQ ID NO: 16466
  Synthetic polypeptide

SEQ ID NO: 16468 - protein, 51 aa, Artificial Sequence; identical to SEQ ID NO: 16466
  Synthetic polypeptide

SEQ ID NO: 16469 - protein, 51 aa, Artificial Sequence; identical to SEQ ID NO: 16466
  Synthetic polypeptide

SEQ ID NO: 16470 - protein, 51 aa, Artificial Sequence; identical to SEQ ID NO: 16466
  Synthetic polypeptide

SEQ ID NO: 16471 - protein, 51 aa, Artificial Sequence; identical to SEQ ID NO: 16466
  Synthetic polypeptide

SEQ ID NO: 16472 - protein, 51 aa, Artificial Sequence; identical to SEQ ID NO: 16466
  Synthetic polypeptide

SEQ ID NO: 16473 - protein, 51 aa, Artificial Sequence; identical to SEQ ID NO: 16466
  Synthetic polypeptide

SEQ ID NO: 16474 - protein, 62 aa, Artificial Sequence
  Synthetic polypeptide
FQGAGSGSRQHGCRSLFHYLLFWETLGSLRRCSGAPPVGPHSCPLHQEQKRDLAGSAQPVSS

SEQ ID NO: 16475 - protein, 62 aa, Artificial Sequence; identical to SEQ ID NO: 16474
  Synthetic polypeptide

SEQ ID NO: 16476 - protein, 62 aa, Artificial Sequence; identical to SEQ ID NO: 16474
  Synthetic polypeptide

SEQ ID NO: 16477 - protein, 62 aa, Artificial Sequence; identical to SEQ ID NO: 16474
  Synthetic polypeptide

SEQ ID NO: 16478 - protein, 62 aa, Artificial Sequence; identical to SEQ ID NO: 16474
  Synthetic polypeptide

SEQ ID NO: 16479 - protein, 62 aa, Artificial Sequence; identical to SEQ ID NO: 16474
  Synthetic polypeptide

SEQ ID NO: 16480 - protein, 62 aa, Artificial Sequence; identical to SEQ ID NO: 16474
  Synthetic polypeptide

SEQ ID NO: 16481 - protein, 62 aa, Artificial Sequence; identical to SEQ ID NO: 16474
  Synthetic polypeptide

SEQ ID NO: 16482 - protein, 241 aa, Artificial Sequence
  Synthetic polypeptide
CFRALGLDPDSMGADLCSTTYYFGRPWAVCGGVLVHPQWVLTAAHCIRNKSVILLGRHSLFHPEDTGQVFQVSHSFPHPLYDMSLLKNRFLRPGDDSSHDLMLLRLSEPAELTDAVKVMDLPTQEPALGTTCYASGWGSIEPEEFLTPKKLQCVDLHVISNDVCAQVHPQKVTKFMLCAGRWTGGKSTCSGDSGGPLVCNGVLQGITSWGSEPCALPERPSLYTKVVHYRKWIKDTIVANP

SEQ ID NO: 16483 - protein, 70 aa, Artificial Sequence
  Synthetic polypeptide
CFRALGLDPDSMGADLCSTTYYFGRPWAVCGGVLVHPQWVLTAAHCIRNKSVILLGRHSLFHPEDTGQAR

SEQ ID NO: 16484 - protein, 189 aa, Artificial Sequence
  Synthetic polypeptide
CFRALGLDPDSMGADLCSTTYYFGRPWAVCGGVLVHPQWVLTAAHCIRNKSVILLGRHSLFHPEDTGQVFQVSHSFPHPLYDMSLLKNRFLRPGDDSSHDLMLLRLSEPAELTDAVKVMDLPTQEPALGTTCYASGWGSIEPEEFLTPKKLQCVDLHVISNDVCAQVHPQKVTKFMLCAGRWTGGKSTC

SEQ ID NO: 16485 - protein, 175 aa, Artificial Sequence
  Synthetic polypeptide
CFRALGLDPDSMGADLCSTTYYFGRPWAVCGGVLVHPQWVLTAAHCIRKPGDDSSHDLMLLRLSEPAELTDAVKVMDLPTQEPALGTTCYASGWGSIEPEEFLTPKKLQCVDLHVISNDVCAQVHPQKVTKFMLCAGRWTGGKSTCSWVILITELTMPALPMVLHGSLVPWRGGV

SEQ ID NO: 16486 - protein, 72 aa, Artificial Sequence
  Synthetic polypeptide
VSGRWVWIQTAWVQISVPLLTILGDPGQSAAVFWCTPSGSSQLPTASGSQVMTPATTSCCSACQSLPSSRML

SEQ ID NO: 16487 - protein, 72 aa, Artificial Sequence; identical to SEQ ID NO: 16486
  Synthetic polypeptide

SEQ ID NO: 16488 - protein, 50 aa, Artificial Sequence
  Synthetic polypeptide
FQGAGSGSRQHGCRSLFHYLLFWETLGSLRRCSGAPPVGPHSCPLHQEAR

SEQ ID NO: 16489 - protein, 50 aa, Artificial Sequence; identical to SEQ ID NO: 16488
  Synthetic polypeptide

SEQ ID NO: 16490 - protein, 207 aa, Artificial Sequence
  Synthetic polypeptide
CFRALGLDPDSMGADLCSTTYYFGRPWAVCGGVLVHPQWVLTAAHCIRNKSVILLGRHSLFHPEDTGQVFQVSHSFPHPLYDMSLLKNRFLRPGDDSSHDLMLLRLSEPAELTDAVKVMDLPTQEPALGTTCYASGWGSIEPEEFLTPKKLQCVDLHVISNDVCAQVHPQKVTKFMLCAGRWTGGKSTCSVSHPYSQDLEGKGEWGP

SEQ ID NO: 16491 - protein, 104 aa, Artificial Sequence
  Synthetic polypeptide
CFRALGLDPDSMGADLCSTTYYFGRPWAVCGGVLVHPQWVLTAAHCIRNKSVILLGRHSLFHPEDTGQVFQVSHSFPHPLYDMSLLKNRFLRPGDDSTLNQRSS

SEQ ID NO: 16492 - protein, 198 aa, Artificial Sequence
  Synthetic polypeptide
CFRALGLDPDSMGADLCSTTYYFGRPWAVCGGVLVHPQWVLTAAHCIRKPGDDSSHDLMLLRLSEPAELTDAVKVMDLPTQEPALGTTCYASGWGSIEPEEFLTPKKLQCVDLHVISNDVCAQVHPQKVTKFMLCAGRWTGGKSTCSGDSGGPLVCNGVLQGITSWGSEPCALPERPSLYTKVVHYRKWIKDTIVANP

SEQ ID NO: 16493 - protein, 218 aa, Artificial Sequence
  Synthetic polypeptide
CFRALGLDPDSMGADLCSTTYYFGRPWAVCGGVLVHPQWVLTAAHCIRNKSVILLGRHSLFHPEDTGQVFQVSHSFPHPLYDMSLLKNRFLRPGDDSSHDLMLLRLSEPAELTDAVKVMDLPTQEPALGTTCYASGWGSIEPEEFLTPKKLQCVDLHVISNDVCAQVHPQKVTKFMLCAGRWTGGKSTCSWVILITELTMPALPMVLHGSLVPWRGGV

SEQ ID NO: 16494 - protein, 247 aa, Artificial Sequence
  Synthetic polypeptide
CFRALGLDPDSMGADLCSTTYYFGRPWAVCGGVLVHPQWVLTAAHCIRNKSVILLGRHSLFHPEDTGQVFQVSHSFPHPLYDMSLLKNRFLRPGDDSSHDLMLLRLSEPAELTDAVKVMDLPTQEPALGTTCYASGWGSIEPEECTPGPDVLTPKKLQCVDLHVISNDVCAQVHPQKVTKFMLCAGRWTGGKSTCSGDSGGPLVCNGVLQGITSWGSEPCALPERPSLYTKVVHYRKWIKDTIVANP

SEQ ID NO: 16495 - protein, 61 aa, Artificial Sequence
  Synthetic polypeptide
DLGGKVLHPSSCLGLWEAGSARSIPNPGRCLWPLVAGQSAAVFWCTPSGSSQLPTASGTKA

SEQ ID NO: 16496 - protein, 61 aa, Artificial Sequence; identical to SEQ ID NO: 16495
  Synthetic polypeptide

SEQ ID NO: 16497 - protein, 61 aa, Artificial Sequence; identical to SEQ ID NO: 16495
  Synthetic polypeptide

SEQ ID NO: 16498 - protein, 61 aa, Artificial Sequence; identical to SEQ ID NO: 16495
  Synthetic polypeptide

SEQ ID NO: 16499 - protein, 61 aa, Artificial Sequence; identical to SEQ ID NO: 16495
  Synthetic polypeptide

SEQ ID NO: 16500 - protein, 61 aa, Artificial Sequence; identical to SEQ ID NO: 16495
  Synthetic polypeptide

SEQ ID NO: 16501 - protein, 104 aa, Artificial Sequence
  Synthetic polypeptide
RFVNTCKQRFPSIDANHCVRSICLSHSDHPCRTWGARCCTPHPVSDCGRLGVREAFPTLAGACGLSWQGSLRRCSGAPPVGPHSCPLHQEQKRDLAGSAQPVSS

SEQ ID NO: 16502 - protein, 104 aa, Artificial Sequence; identical to SEQ ID NO: 16501
  Synthetic polypeptide

SEQ ID NO: 16503 - protein, 104 aa, Artificial Sequence; identical to SEQ ID NO: 16501
  Synthetic polypeptide

SEQ ID NO: 16504 - protein, 104 aa, Artificial Sequence; identical to SEQ ID NO: 16501
  Synthetic polypeptide

SEQ ID NO: 16505 - protein, 104 aa, Artificial Sequence; identical to SEQ ID NO: 16501
  Synthetic polypeptide

SEQ ID NO: 16506 - protein, 104 aa, Artificial Sequence; identical to SEQ ID NO: 16501
  Synthetic polypeptide

SEQ ID NO: 16507 - protein, 258 aa, Artificial Sequence
  Synthetic polypeptide
ATLIIPVGPGGQGAAPLILSRIVGGWECEKHSQPWQVLVASRGRAVCGGVLVHPQWVLTAAHCIRNKSVILLGRHSLFHPEDTGQVFQVSHSFPHPLYDMSLLKNRFLRPGDDSSHDLMLLRLSEPAELTDAVKVMDLPTQEPALGTTCYASGWGSIEPEEFLTPKKLQCVDLHVISNDVCAQVHPQKVTKFMLCAGRWTGGKSTCSGDSGGPLVCNGVLQGITSWGSEPCALPERPSLYTKVVHYRKWIKDTIVANP

SEQ ID NO: 16508 - protein, 87 aa, Artificial Sequence
  Synthetic polypeptide
ATLIIPVGPGGQGAAPLILSRIVGGWECEKHSQPWQVLVASRGRAVCGGVLVHPQWVLTAAHCIRNKSVILLGRHSLFHPEDTGQAR

SEQ ID NO: 16509 - protein, 82 aa, Artificial Sequence
  Synthetic polypeptide
DLGGKVLHPSSCLGLWEAGSARSIPNPGRCLWPLVAGQSAAVFWCTPSGSSQLPTASGSQVMTPATTSCCSACQSLPSSRML

SEQ ID NO: 16510 - protein, 82 aa, Artificial Sequence; identical to SEQ ID NO: 16509
  Synthetic polypeptide

SEQ ID NO: 16511 - protein, 92 aa, Artificial Sequence
  Synthetic polypeptide
RFVNTCKQRFPSIDANHCVRSICLSHSDHPCRTWGARCCTPHPVSDCGRLGVREAFPTLAGACGLSWQGSLRRCSGAPPVGPHSCPLHQEAR

SEQ ID NO: 16512 - protein, 92 aa, Artificial Sequence; identical to SEQ ID NO: 16511
  Synthetic polypeptide

SEQ ID NO: 16513 - protein, 192 aa, Artificial Sequence
  Synthetic polypeptide
ATLIIPVGPGGQGAAPLILSRIVGGWECEKHSQPWQVLVASRGRAVCGGVLVHPQWVLTAAHCIRKPGDDSSHDLMLLRLSEPAELTDAVKVMDLPTQEPALGTTCYASGWGSIEPEEFLTPKKLQCVDLHVISNDVCAQVHPQKVTKFMLCAGRWTGGKSTCSWVILITELTMPALPMVLHGSLVPWRGGV

SEQ ID NO: 16514 - protein, 224 aa, Artificial Sequence
  Synthetic polypeptide
ATLIIPVGPGGQGAAPLILSRIVGGWECEKHSQPWQVLVASRGRAVCGGVLVHPQWVLTAAHCIRNKSVILLGRHSLFHPEDTGQVFQVSHSFPHPLYDMSLLKNRFLRPGDDSSHDLMLLRLSEPAELTDAVKVMDLPTQEPALGTTCYASGWGSIEPEEFLTPKKLQCVDLHVISNDVCAQVHPQKVTKFMLCAGRWTGGKSTCSVSHPYSQDLEGKGEWGP

SEQ ID NO: 16515 - protein, 121 aa, Artificial Sequence
  Synthetic polypeptide
ATLIIPVGPGGQGAAPLILSRIVGGWECEKHSQPWQVLVASRGRAVCGGVLVHPQWVLTAAHCIRNKSVILLGRHSLFHPEDTGQVFQVSHSFPHPLYDMSLLKNRFLRPGDDSTLNQRSS

SEQ ID NO: 16516 - protein, 215 aa, Artificial Sequence
  Synthetic polypeptide
ATLIIPVGPGGQGAAPLILSRIVGGWECEKHSQPWQVLVASRGRAVCGGVLVHPQWVLTAAHCIRKPGDDSSHDLMLLRLSEPAELTDAVKVMDLPTQEPALGTTCYASGWGSIEPEEFLTPKKLQCVDLHVISNDVCAQVHPQKVTKFMLCAGRWTGGKSTCSGDSGGPLVCNGVLQGITSWGSEPCALPERPSLYTKVVHYRKWIKDTIVANP

SEQ ID NO: 16517 - protein, 235 aa, Artificial Sequence
  Synthetic polypeptide
ATLIIPVGPGGQGAAPLILSRIVGGWECEKHSQPWQVLVASRGRAVCGGVLVHPQWVLTAAHCIRNKSVILLGRHSLFHPEDTGQVFQVSHSFPHPLYDMSLLKNRFLRPGDDSSHDLMLLRLSEPAELTDAVKVMDLPTQEPALGTTCYASGWGSIEPEEFLTPKKLQCVDLHVISNDVCAQVHPQKVTKFMLCAGRWTGGKSTCSWVILITELTMPALPMVLHGSLVPWRGGV

SEQ ID NO: 16518 - protein, 264 aa, Artificial Sequence
  Synthetic polypeptide
ATLIIPVGPGGQGAAPLILSRIVGGWECEKHSQPWQVLVASRGRAVCGGVLVHPQWVLTAAHCIRNKSVILLGRHSLFHPEDTGQVFQVSHSFPHPLYDMSLLKNRFLRPGDDSSHDLMLLRLSEPAELTDAVKVMDLPTQEPALGTTCYASGWGSIEPEECTPGPDVLTPKKLQCVDLHVISNDVCAQVHPQKVTKFMLCAGRWTGGKSTCSGDSGGPLVCNGVLQGITSWGSEPCALPERPSLYTKVVHYRKWIKDTIVANP

SEQ ID NO: 16519 - protein, 37 aa, Artificial Sequence
  Synthetic polypeptide
GWARWLTPVIPALWEAKAGRSPEQKRDLAGSAQPVSS

SEQ ID NO: 16520 - protein, 37 aa, Artificial Sequence; identical to SEQ ID NO: 16519
  Synthetic polypeptide

SEQ ID NO: 16521 - protein, 37 aa, Artificial Sequence; identical to SEQ ID NO: 16519
  Synthetic polypeptide

SEQ ID NO: 16522 - protein, 37 aa, Artificial Sequence; identical to SEQ ID NO: 16519
  Synthetic polypeptide

SEQ ID NO: 16523 - protein, 37 aa, Artificial Sequence; identical to SEQ ID NO: 16519
  Synthetic polypeptide

SEQ ID NO: 16524 - protein, 37 aa, Artificial Sequence; identical to SEQ ID NO: 16519
  Synthetic polypeptide

SEQ ID NO: 16525 - protein, 37 aa, Artificial Sequence; identical to SEQ ID NO: 16519
  Synthetic polypeptide

SEQ ID NO: 16526 - protein, 37 aa, Artificial Sequence; identical to SEQ ID NO: 16519
  Synthetic polypeptide

SEQ ID NO: 16527 - protein, 136 aa, Artificial Sequence
  Synthetic polypeptide
SQHFGRPRQVDHLSKSVILLGRHSLFHPEDTGQVFQVSHSFPHPLYDMSLLKNRFLRPGDDSSHDLMLLRLSEPAELTDAVKVMDLPTQEPALGTTCYASGWGSIEPEEFLTPKKLQCVDLHVISNDVCAQVHPQK

SEQ ID NO: 16528 - protein, 206 aa, Artificial Sequence
  Synthetic polypeptide
SQHFGRPRQVDHLSKSVILLGRHSLFHPEDTGQVFQVSHSFPHPLYDMSLLKNRFLRPGDDSSHDLMLLRLSEPAELTDAVKVMDLPTQEPALGTTCYASGWGSIEPEEFLTPKKLQCVDLHVISNDVCAQVHPQKVTKFMLCAGRWTGGKSTCSGDSGGPLVCNGVLQGITSWGSEPCALPERPSLYTKVVHYRKWIKDTIVANP

SEQ ID NO: 16529 - protein, 35 aa, Artificial Sequence
  Synthetic polypeptide
SQHFGRPRQVDHLSKSVILLGRHSLFHPEDTGQAR

SEQ ID NO: 16530 - protein, 154 aa, Artificial Sequence
  Synthetic polypeptide
SQHFGRPRQVDHLSKSVILLGRHSLFHPEDTGQVFQVSHSFPHPLYDMSLLKNRFLRPGDDSSHDLMLLRLSEPAELTDAVKVMDLPTQEPALGTTCYASGWGSIEPEEFLTPKKLQCVDLHVISNDVCAQVHPQKVTKFMLCAGRWTGGKSTC

SEQ ID NO: 16531 - protein, 172 aa, Artificial Sequence
  Synthetic polypeptide
SQHFGRPRQVDHLSKSVILLGRHSLFHPEDTGQVFQVSHSFPHPLYDMSLLKNRFLRPGDDSSHDLMLLRLSEPAELTDAVKVMDLPTQEPALGTTCYASGWGSIEPEEFLTPKKLQCVDLHVISNDVCAQVHPQKVTKFMLCAGRWTGGKSTCSVSHPYSQDLEGKGEWGP

SEQ ID NO: 16532 - protein, 69 aa, Artificial Sequence
  Synthetic polypeptide
SQHFGRPRQVDHLSKSVILLGRHSLFHPEDTGQVFQVSHSFPHPLYDMSLLKNRFLRPGDDSTLNQRSS

SEQ ID NO: 16533 - protein, 183 aa, Artificial Sequence
  Synthetic polypeptide
SQHFGRPRQVDHLSKSVILLGRHSLFHPEDTGQVFQVSHSFPHPLYDMSLLKNRFLRPGDDSSHDLMLLRLSEPAELTDAVKVMDLPTQEPALGTTCYASGWGSIEPEEFLTPKKLQCVDLHVISNDVCAQVHPQKVTKFMLCAGRWTGGKSTCSWVILITELTMPALPMVLHGSLVPWRGGV

SEQ ID NO: 16534 - protein, 212 aa, Artificial Sequence
  Synthetic polypeptide
SQHFGRPRQVDHLSKSVILLGRHSLFHPEDTGQVFQVSHSFPHPLYDMSLLKNRFLRPGDDSSHDLMLLRLSEPAELTDAVKVMDLPTQEPALGTTCYASGWGSIEPEECTPGPDVLTPKKLQCVDLHVISNDVCAQVHPQKVTKFMLCAGRWTGGKSTCSGDSGGPLVCNGVLQGITSWGSEPCALPERPSLYTKVVHYRKWIKDTIVANP

SEQ ID NO: 16535 - protein, 36 aa, Artificial Sequence
  Synthetic polypeptide
GWARWLTPVIPALWEAKAGRSPEVRSSRPAWPTAKA

SEQ ID NO: 16536 - protein, 36 aa, Artificial Sequence; identical to SEQ ID NO: 16535
  Synthetic polypeptide

SEQ ID NO: 16537 - protein, 36 aa, Artificial Sequence; identical to SEQ ID NO: 16535
  Synthetic polypeptide

SEQ ID NO: 16538 - protein, 36 aa, Artificial Sequence; identical to SEQ ID NO: 16535
  Synthetic polypeptide

SEQ ID NO: 16539 - protein, 36 aa, Artificial Sequence; identical to SEQ ID NO: 16535
  Synthetic polypeptide

SEQ ID NO: 16540 - protein, 36 aa, Artificial Sequence; identical to SEQ ID NO: 16535
  Synthetic polypeptide

SEQ ID NO: 16541 - protein, 36 aa, Artificial Sequence; identical to SEQ ID NO: 16535
  Synthetic polypeptide

SEQ ID NO: 16542 - protein, 36 aa, Artificial Sequence; identical to SEQ ID NO: 16535
  Synthetic polypeptide

SEQ ID NO: 16543 - protein, 38 aa, Artificial Sequence
  Synthetic polypeptide
SQHFGRPRQVDHLRSGVRDQPGQLQKRDLAGSAQPVSS

SEQ ID NO: 16544 - protein, 38 aa, Artificial Sequence; identical to SEQ ID NO: 16543
  Synthetic polypeptide

SEQ ID NO: 16545 - protein, 38 aa, Artificial Sequence; identical to SEQ ID NO: 16543
  Synthetic polypeptide

SEQ ID NO: 16546 - protein, 38 aa, Artificial Sequence; identical to SEQ ID NO: 16543
  Synthetic polypeptide

SEQ ID NO: 16547 - protein, 38 aa, Artificial Sequence; identical to SEQ ID NO: 16543
  Synthetic polypeptide

SEQ ID NO: 16548 - protein, 38 aa, Artificial Sequence; identical to SEQ ID NO: 16543
  Synthetic polypeptide

SEQ ID NO: 16549 - protein, 38 aa, Artificial Sequence; identical to SEQ ID NO: 16543
  Synthetic polypeptide

SEQ ID NO: 16550 - protein, 38 aa, Artificial Sequence; identical to SEQ ID NO: 16543
  Synthetic polypeptide

SEQ ID NO: 16551 - protein, 133 aa, Artificial Sequence
  Synthetic polypeptide
GQEFETSLANCKSVILLGRHSLFHPEDTGQVFQVSHSFPHPLYDMSLLKNRFLRPGDDSSHDLMLLRLSEPAELTDAVKVMDLPTQEPALGTTCYASGWGSIEPEEFLTPKKLQCVDLHVISNDVCAQVHPQK

SEQ ID NO: 16552 - protein, 203 aa, Artificial Sequence
  Synthetic polypeptide
GQEFETSLANCKSVILLGRHSLFHPEDTGQVFQVSHSFPHPLYDMSLLKNRFLRPGDDSSHDLMLLRLSEPAELTDAVKVMDLPTQEPALGTTCYASGWGSIEPEEFLTPKKLQCVDLHVISNDVCAQVHPQKVTKFMLCAGRWTGGKSTCSGDSGGPLVCNGVLQGITSWGSEPCALPERPSLYTKVVHYRKWIKDTIVANP

SEQ ID NO: 16553 - protein, 32 aa, Artificial Sequence
  Synthetic polypeptide
GQEFETSLANCKSVILLGRHSLFHPEDTGQAR

SEQ ID NO: 16554 - protein, 151 aa, Artificial Sequence
  Synthetic polypeptide
GQEFETSLANCKSVILLGRHSLFHPEDTGQVFQVSHSFPHPLYDMSLLKNRFLRPGDDSSHDLMLLRLSEPAELTDAVKVMDLPTQEPALGTTCYASGWGSIEPEEFLTPKKLQCVDLHVISNDVCAQVHPQKVTKFMLCAGRWTGGKSTC

SEQ ID NO: 16555 - protein, 169 aa, Artificial Sequence
  Synthetic polypeptide
GQEFETSLANCKSVILLGRHSLFHPEDTGQVFQVSHSFPHPLYDMSLLKNRFLRPGDDSSHDLMLLRLSEPAELTDAVKVMDLPTQEPALGTTCYASGWGSIEPEEFLTPKKLQCVDLHVISNDVCAQVHPQKVTKFMLCAGRWTGGKSTCSVSHPYSQDLEGKGEWGP

SEQ ID NO: 16556 - protein, 66 aa, Artificial Sequence
  Synthetic polypeptide
GQEFETSLANCKSVILLGRHSLFHPEDTGQVFQVSHSFPHPLYDMSLLKNRFLRPGDDSTLNQRSS

SEQ ID NO: 16557 - protein, 180 aa, Artificial Sequence
  Synthetic polypeptide
GQEFETSLANCKSVILLGRHSLFHPEDTGQVFQVSHSFPHPLYDMSLLKNRFLRPGDDSSHDLMLLRLSEPAELTDAVKVMDLPTQEPALGTTCYASGWGSIEPEEFLTPKKLQCVDLHVISNDVCAQVHPQKVTKFMLCAGRWTGGKSTCSWVILITELTMPALPMVLHGSLVPWRGGV

SEQ ID NO: 16558 - protein, 209 aa, Artificial Sequence
  Synthetic polypeptide
GQEFETSLANCKSVILLGRHSLFHPEDTGQVFQVSHSFPHPLYDMSLLKNRFLRPGDDSSHDLMLLRLSEPAELTDAVKVMDLPTQEPALGTTCYASGWGSIEPEECTPGPDVLTPKKLQCVDLHVISNDVCAQVHPQKVTKFMLCAGRWTGGKSTCSGDSGGPLVCNGVLQGITSWGSEPCALPERPSLYTKVVHYRKWIKDTIVANP

SEQ ID NO: 16559 - protein, 27 aa, Artificial Sequence
  Synthetic polypeptide
VLFVGYRDERGVVHYRKWIKDTIAANP

SEQ ID NO: 16560 - protein, 27 aa, Artificial Sequence
  Synthetic polypeptide
VLFVGYRDERGVVHYRKWIKDTIAANP

SEQ ID NO: 16561 - protein, 27 aa, Artificial Sequence
  Synthetic polypeptide
VLFVGYRDERGVVHYRKWIKDTIAANP

SEQ ID NO: 16562 - protein, 27 aa, Artificial Sequence
  Synthetic polypeptide
CYLWGTEMKEGWCITGSGSRTPSQPTP

SEQ ID NO: 16563 - protein, 27 aa, Artificial Sequence
  Synthetic polypeptide
CYLWGTEMKEGWCITGSGSRTPSQPTP

SEQ ID NO: 16564 - protein, 19 aa, Artificial Sequence
  Synthetic polypeptide
KRGGALPEVDQGHHRSQPL

SEQ ID NO: 16565 - protein, 19 aa, Artificial Sequence
  Synthetic polypeptide
KRGGALPEVDQGHHRSQPL

SEQ ID NO: 16566 - protein, 43 aa, Artificial Sequence
  Synthetic polypeptide
CYLWGTEMKEGWCITGSGSRTPSQPTPECPCPTPTSSKFKSTS

SEQ ID NO: 16567 - protein, 34 aa, Artificial Sequence
  Synthetic polypeptide
KRGGALPEVDQGHHRSQPLSAPVPPLPLVNLSPP

SEQ ID NO: 16568 - protein, 29 aa, Artificial Sequence
  Synthetic polypeptide
GWAGWLMPVIPALWEARQADHLRVTLGGP

SEQ ID NO: 16569 - protein, 72 aa, Artificial Sequence
  Synthetic polypeptide
MGRVAHACNPSTLGGEAGRSLEGDSGGPLICNGYLQGLVSFGKAPCGQVGVPGVYTNLCKFTEWIEKTVQAS

SEQ ID NO: 16570 - protein, 24 aa, Artificial Sequence
  Synthetic polypeptide
GWAGWLMPVIPALWEARQADHLRV

SEQ ID NO: 16571 - protein, 23 aa, Artificial Sequence
  Synthetic polypeptide
MGRVAHACNPSTLGGEAGRSLEG

SEQ ID NO: 16572 - protein, 58 aa, Artificial Sequence
  Synthetic polypeptide
SQHLGRPRVILGVRWYVETTSEALCHGVTSPVDQRRSQESTPTSADTRTGSKKPFRPS

SEQ ID NO: 16573 - protein, 58 aa, Artificial Sequence; identical to SEQ ID NO: 16572
  Synthetic polypeptide

SEQ ID NO: 16574 - protein, 58 aa, Artificial Sequence; identical to SEQ ID NO: 16572
  Synthetic polypeptide

SEQ ID NO: 16575 - protein, 58 aa, Artificial Sequence; identical to SEQ ID NO: 16572
  Synthetic polypeptide

SEQ ID NO: 16576 - protein, 58 aa, Artificial Sequence; identical to SEQ ID NO: 16572
  Synthetic polypeptide

SEQ ID NO: 16577 - protein, 16 aa, Artificial Sequence
  Synthetic polypeptide
GTVAHACNPSTLGGRG

SEQ ID NO: 16578 - protein, 16 aa, Artificial Sequence
  Synthetic polypeptide
GTVAHACNPSTLGGRG

SEQ ID NO: 16579 - protein, 16 aa, Artificial Sequence
  Synthetic polypeptide
GTVAHACNPSTLGGRG

SEQ ID NO: 16580 - protein, 16 aa, Artificial Sequence
  Synthetic polypeptide
GTVAHACNPSTLGGRG

SEQ ID NO: 16581 - protein, 16 aa, Artificial Sequence
  Synthetic polypeptide
GTVAHACNPSTLGGRG

SEQ ID NO: 16582 - protein, 16 aa, Artificial Sequence
  Synthetic polypeptide
GTVAHACNPSTLGGRG

SEQ ID NO: 16583 - protein, 65 aa, Artificial Sequence
  Synthetic polypeptide
AQWLMPVIPAPWEAEGDSGGPLVCGDHLRGLVSWGNIPCGSKEKPGVYTNVCRYTNWIQKTIQAK

SEQ ID NO: 16584 - protein, 65 aa, Artificial Sequence; identical to SEQ ID NO: 16583
  Synthetic polypeptide

SEQ ID NO: 16585 - protein, 65 aa, Artificial Sequence; identical to SEQ ID NO: 16583
  Synthetic polypeptide

SEQ ID NO: 16586 - protein, 65 aa, Artificial Sequence; identical to SEQ ID NO: 16583
  Synthetic polypeptide

SEQ ID NO: 16587 - protein, 65 aa, Artificial Sequence; identical to SEQ ID NO: 16583
  Synthetic polypeptide

SEQ ID NO: 16588 - protein, 65 aa, Artificial Sequence; identical to SEQ ID NO: 16583
  Synthetic polypeptide

SEQ ID NO: 16589 - protein, 62 aa, Artificial Sequence
  Synthetic polypeptide
SQHLGRPRVILGVRWYVETTSEALCHGVTSPVDQRRSQESTPTSADTRTGSKKPFRPSDPDM

SEQ ID NO: 16590 - protein, 110 aa, Artificial Sequence
  Synthetic polypeptide
ETVCGCGNTRARKSKNFPDTLNCAEVKIFPQKKCEDAYPGQITDGMVCAGSSKGADTCQGDSGGPLVCDGALQGITSWGSDPCGRSDKPGVYTNICRYLDWIKKIIGSKG

SEQ ID NO: 16591 - protein, 110 aa, Artificial Sequence; identical to SEQ ID NO: 16590
  Synthetic polypeptide

SEQ ID NO: 16592 - protein, 110 aa, Artificial Sequence; identical to SEQ ID NO: 16590
  Synthetic polypeptide

SEQ ID NO: 16593 - protein, 110 aa, Artificial Sequence; identical to SEQ ID NO: 16590
  Synthetic polypeptide

SEQ ID NO: 16594 - protein, 25 aa, Artificial Sequence
  Synthetic polypeptide
RQFAAVETHVLANQRIFLTLSTVQK

SEQ ID NO: 16595 - protein, 25 aa, Artificial Sequence
  Synthetic polypeptide
RQFAAVETHVLANQRIFLTLSTVQK

SEQ ID NO: 16596 - protein, 25 aa, Artificial Sequence
  Synthetic polypeptide
RQFAAVETHVLANQRIFLTLSTVQK

SEQ ID NO: 16597 - protein, 25 aa, Artificial Sequence
  Synthetic polypeptide
RQFAAVETHVLANQRIFLTLSTVQK

SEQ ID NO: 16598 - protein, 17 aa, Artificial Sequence
  Synthetic polypeptide
DSLRLWKHTCSQIKEFS

SEQ ID NO: 16599 - protein, 17 aa, Artificial Sequence
  Synthetic polypeptide
DSLRLWKHTCSQIKEFS

SEQ ID NO: 16600 - protein, 17 aa, Artificial Sequence
  Synthetic polypeptide
DSLRLWKHTCSQIKEFS

SEQ ID NO: 16601 - protein, 17 aa, Artificial Sequence
  Synthetic polypeptide
DSLRLWKHTCSQIKEFS

SEQ ID NO: 16602 - protein, 139 aa, Artificial Sequence
  Synthetic polypeptide
SQSFGGSSEAIDDDCNQTGQMTAGFLDWPQGTFASQVTLEGDKLKVEREIDGGLETLRLKLPAVVTADLRLNEPRYATLPNIMKAKKKKIEVIKPGDLGVDLTSKLSVISVEDPPQRTAGVKVETTEDLVAKLKEIGRI

SEQ ID NO: 16603 - protein, 139 aa, Artificial Sequence; identical to SEQ ID NO: 16602
  Synthetic polypeptide

SEQ ID NO: 16604 - protein, 29 aa, Artificial Sequence
  Synthetic polypeptide
MAAVTHACNPRALGDHLRPSMMTVTRQGR

SEQ ID NO: 16605 - protein, 29 aa, Artificial Sequence
  Synthetic polypeptide
MAAVTHACNPRALGDHLRPSMMTVTRQGR

SEQ ID NO: 16606 - protein, 29 aa, Artificial Sequence
  Synthetic polypeptide
MAAVTHACNPRALGDHLRPSMMTVTRQGR

SEQ ID NO: 16607 - protein, 115 aa, Artificial Sequence
  Synthetic polypeptide
SQSFGGSSEAIDDDCNQTGQMTAGFLDWPQGTFASQVTLEGDKLKVEREIDGGLETLRLKLPAVVTADLRLNEPRYATLPNIMKAKKKKIEVIKPGDLGVDLTSKLSVISVEDPP

SEQ ID NO: 16608 - protein, 13 aa, Artificial Sequence
  Synthetic polypeptide
KRPSMMTVTRQGR

SEQ ID NO: 16609 - protein, 13 aa, Artificial Sequence
  Synthetic polypeptide
KRPSMMTVTRQGR

SEQ ID NO: 16610 - protein, 13 aa, Artificial Sequence
  Synthetic polypeptide
KRPSMMTVTRQGR

SEQ ID NO: 16611 - protein, 23 aa, Artificial Sequence
  Synthetic polypeptide
QRPYDLQSLRYLLHLFHHRKGHR

SEQ ID NO: 16612 - protein, 23 aa, Artificial Sequence
  Synthetic polypeptide
QRPYDLQSLRYLLHLFHHRKGHR

SEQ ID NO: 16613 - protein, 23 aa, Artificial Sequence
  Synthetic polypeptide
QRPYDLQSLRYLLHLFHHRKGHR

SEQ ID NO: 16614 - protein, 141 aa, Artificial Sequence
  Synthetic polypeptide
DIYYICSTIEKAIDDDCNQTGQMTAGFLDWPQGTFASQVTLEGDKLKVEREIDGGLETLRLKLPAVVTADLRLNEPRYATLPNIMKAKKKKIEVIKPGDLGVDLTSKLSVISVEDPPQRTAGVKVETTEDLVAKLKEIGRI

SEQ ID NO: 16615 - protein, 141 aa, Artificial Sequence; identical to SEQ ID NO: 16614
  Synthetic polypeptide

SEQ ID NO: 16616 - protein, 117 aa, Artificial Sequence
  Synthetic polypeptide
DIYYICSTIEKAIDDDCNQTGQMTAGFLDWPQGTFASQVTLEGDKLKVEREIDGGLETLRLKLPAVVTADLRLNEPRYATLPNIMKAKKKKIEVIKPGDLGVDLTSKLSVISVEDPP

SEQ ID NO: 16617 - protein, 56 aa, Artificial Sequence
  Synthetic polypeptide
GRTQWLAPIIPALQGAKAGFAMYFGYGIPHSLENNQQPPASSSQTPHENIPSPLLN

SEQ ID NO: 16618 - protein, 45 aa, Artificial Sequence
  Synthetic polypeptide
SQHFRGPRQDLLCILDMGSHTAWRTINSHQRQAPKLLMKTSLVPC

SEQ ID NO: 16619 - protein, 46 aa, Artificial Sequence
  Synthetic polypeptide
PHAVARTYNPSTSGGQGRICYVFWIWDPTQLGEQSTATSVKLPNSS

SEQ ID NO: 16620 - protein, 25 aa, Artificial Sequence
  Synthetic polypeptide
ARSPCCLFSSGQHLCTCLPDDADDH

SEQ ID NO: 16621 - protein, 75 aa, Artificial Sequence
  Synthetic polypeptide
PGPPVACSPLVSISAHVYLMMQMTTETWAQCGVWMLIGFAMYFGYGIPHSLENNQQPPASSSQTPHENIPSPLLN

SEQ ID NO: 16622 - protein, 18 aa, Artificial Sequence
  Synthetic polypeptide
QVPLLPVLLWSASLHMFT

SEQ ID NO: 16623 - protein, 141 aa, Artificial Sequence
  Synthetic polypeptide
HFRRLRQVDHLSCPAVHAMPGIGPLAQTPVLWRADLHRSGCVAAGAHCGIHFHRLETAPEQHSSLLQGPPVACSPLVSISAHVYLMMQMTTETWAQCGVWMLIGFAMYFGYGIPHSLENNQQPPASSSQTPHENIPSPLLN

SEQ ID NO: 16624 - protein, 31 aa, Artificial Sequence
  Synthetic polypeptide
KAEASGSLELSCCPCYAWYWPIGPNACSLES

SEQ ID NO: 16625 - protein, 40 aa, Artificial Sequence
  Synthetic polypeptide
LFSYLLSSLVDVLGRGDVFCLVNCRLPSTRPGTAFRWATN

SEQ ID NO: 16626 - protein, 40 aa, Artificial Sequence; identical to SEQ ID NO: 16625
  Synthetic polypeptide

SEQ ID NO: 16627 - protein, 20 aa, Artificial Sequence
  Synthetic polypeptide
TVVCQAPGLAQRSGGLRTEG

SEQ ID NO: 16628 - protein, 20 aa, Artificial Sequence
  Synthetic polypeptide
TVVCQAPGLAQRSGGLRTEG

SEQ ID NO: 16629 - protein, 220 aa, Artificial Sequence
  Synthetic polypeptide
IIQLPSVFLGRCTRERRRFLSCELSFAKHPAWHSVQVGYELKDEIERKFDKWQEPPPVKQVKPLPAPLDGQRKKRGGRRYRKMKERLGLTEIRKQANRMSFGEIEEDAYQEDLGFSLGHLGKSGSGRVRQTQVNEATKARISKTLQRTLQKQSVVYGGKSTIRDRSSGTASSVAFTPLQGLEIVNPQAAEKKVAEANQKYFSSMAEFLKVKGEKSGLMST

SEQ ID NO: 16630 - protein, 171 aa, Artificial Sequence
  Synthetic polypeptide
IIQLPSVFLGRCTRERRRFLSCELSFAKHPAWHSVQVGYELKDEIERKFDKWQEPPPVKQVKPLPAPLDGQRKKRGGRRYRKMKERLGLTEIRKQANRMSFGEIEEDAYQEDLGFSLGHLDAAADPAEAERRIWREVHHPRPLLGHGLQRGLHPTPGPGDCEPTGGREEGG

SEQ ID NO: 16631 - protein, 141 aa, Artificial Sequence
  Synthetic polypeptide
DILYINAPASQGLKAEHLYILIGVSVVFLFCLLLLVLFCLHRQNQIKQGPPRSKDEEQKPQQRPDLAVDVLERTADKATVNGLPEKDRETDTSALAAGSSQEVTYAQLDHWALTQRTARAVSPQSTKPMAESITYAAVARH

SEQ ID NO: 16632 - protein, 141 aa, Artificial Sequence; identical to SEQ ID NO: 16631
  Synthetic polypeptide

SEQ ID NO: 16633 - protein, 141 aa, Artificial Sequence; identical to SEQ ID NO: 16631
  Synthetic polypeptide

SEQ ID NO: 16634 - protein, 141 aa, Artificial Sequence; identical to SEQ ID NO: 16631
  Synthetic polypeptide

SEQ ID NO: 16635 - protein, 141 aa, Artificial Sequence; identical to SEQ ID NO: 16631
  Synthetic polypeptide

SEQ ID NO: 16636 - protein, 141 aa, Artificial Sequence; identical to SEQ ID NO: 16631
  Synthetic polypeptide

SEQ ID NO: 16637 - protein, 64 aa, Artificial Sequence
  Synthetic polypeptide
GEGERGQALGLIRFLLCQWQSVSLCRGLQHSGPRWWKKGITIPVLQDYYLPKIFYILMHLLPKA

SEQ ID NO: 16638 - protein, 64 aa, Artificial Sequence; identical to SEQ ID NO: 16637
  Synthetic polypeptide

SEQ ID NO: 16639 - protein, 64 aa, Artificial Sequence; identical to SEQ ID NO: 16637
  Synthetic polypeptide

SEQ ID NO: 16640 - protein, 64 aa, Artificial Sequence; identical to SEQ ID NO: 16637
  Synthetic polypeptide

SEQ ID NO: 16641 - protein, 64 aa, Artificial Sequence; identical to SEQ ID NO: 16637
  Synthetic polypeptide

SEQ ID NO: 16642 - protein, 64 aa, Artificial Sequence; identical to SEQ ID NO: 16637
  Synthetic polypeptide

SEQ ID NO: 16643 - protein, 64 aa, Artificial Sequence; identical to SEQ ID NO: 16637
  Synthetic polypeptide

SEQ ID NO: 16644 - protein, 13 aa, Artificial Sequence
  Synthetic polypeptide
DILYINAPASQGL

SEQ ID NO: 16645 - protein, 16 aa, Artificial Sequence
  Synthetic polypeptide
KGSHLHWHWHRFLWQQ

SEQ ID NO: 16646 - protein, 16 aa, Artificial Sequence
  Synthetic polypeptide
KGSHLHWHWHRFLWQQ

SEQ ID NO: 16647 - protein, 16 aa, Artificial Sequence
  Synthetic polypeptide
KGSHLHWHWHRFLWQQ

SEQ ID NO: 16648 - protein, 16 aa, Artificial Sequence
  Synthetic polypeptide
KGSHLHWHWHRFLWQQ

SEQ ID NO: 16649 - protein, 16 aa, Artificial Sequence
  Synthetic polypeptide
KGSHLHWHWHRFLWQQ

SEQ ID NO: 16650 - protein, 16 aa, Artificial Sequence
  Synthetic polypeptide
KGSHLHWHWHRFLWQQ

SEQ ID NO: 16651 - protein, 64 aa, Artificial Sequence
  Synthetic polypeptide
RAAICTGIGIGFYGNSETSDGVSQLSSALLHANHTLSTIDHLVLETVERLGEAVRTELTTLEEV

SEQ ID NO: 16652 - protein, 53 aa, Artificial Sequence
  Synthetic polypeptide
GQPSALALASVSMATVRPVMGCPSSALRCCTPTTHSAPLTTWCWRRWRGWARR

SEQ ID NO: 16653 - protein, 53 aa, Artificial Sequence; identical to SEQ ID NO: 16652
  Synthetic polypeptide

SEQ ID NO: 16654 - protein, 53 aa, Artificial Sequence; identical to SEQ ID NO: 16652
  Synthetic polypeptide

SEQ ID NO: 16655 - protein, 53 aa, Artificial Sequence; identical to SEQ ID NO: 16652
  Synthetic polypeptide

SEQ ID NO: 16656 - protein, 53 aa, Artificial Sequence; identical to SEQ ID NO: 16652
  Synthetic polypeptide

SEQ ID NO: 16657 - protein, 53 aa, Artificial Sequence; identical to SEQ ID NO: 16652
  Synthetic polypeptide

SEQ ID NO: 16658 - protein, 354 aa, Artificial Sequence
  Synthetic polypeptide
RAAICTGIGIGFYGNSETSDGVSQLSSALLHANHTLSTIDHLVLETVERLGEAVRTELTTLEEVLEPRTELVAAARGARRQAEAAAQQLQGLAFWQGVPLSPLQVAENVSFVEEYRWLAYVLLLLLELLVCLFTLLGLAKQSKWLVIVMTVMSLLVLVLSWGSMGLEAATAVGLSDFCSNPDPYVLNLTQEETGLSSDILSYYLLCNRAVSNPFQQRLTLSQRALANIHSQLLGLEREAVPQFPSAQKPLLSLEETLNVTEGNFHQLVALLHCRSLHKDYGAALRGLCEDALEGLLFLLLFSLLSAGALATALCSLPRAWALFPPSDDYDDTDDDDPFNPQQESKRFVQWQSSI

SEQ ID NO: 16659 - protein, 353 aa, Artificial Sequence
  Synthetic polypeptide
RAAICTGIGIGFYGNSETSDGVSQLSSALLHANHTLSTIDHLVLETVERLGEAVRTELTTLEEVLEPRTELVAAARGARRQAEAAAQQLQGLAFWQGVPLSPLQVAENVSFVEEYRWLAYVLLLLLELLVCLFTLLGLAKQSKWLVIVMTVMSLLVLVLSWGSMGLEAATAVGLSDFCSNPDPYVLNLTQEETGLSSDILSYYLLCNRAVSNPFQQRLTLSQRALANIHSQLLGLEREAVPQFPSAQKPLLSLEETLNVTEGNFHQLVALLHCRSLHKDYGAALRGLCEDALEGLLFLLLFSLLSAGALATALCSLPRAWALFPPSDDYDDTDDDDPFNPQESKRFVQWQSSI

SEQ ID NO: 16660 - protein, 134 aa, Artificial Sequence
  Synthetic polypeptide
RAAICTGIGIGFYGNSETSDGVSQLSSALLHANHTLSTIDHLVLETVERLGEAVRTELTTLEEVLEPRTELVAAARGARRQAEAAAQQLQGLAFWQGVPLSPLQVAENVSFVEEYRWLAYVLLLLLELLVCLFT

SEQ ID NO: 16661 - protein, 307 aa, Artificial Sequence
  Synthetic polypeptide
RAAICTGIGIGFYGNSETSDGVSQLSSALLHANHTLSTIDHLVLETVERLGEAVRTELTTLEEVLEPRTELVAAARGARRQAEAAAQQLQGLAFWQGVPLSPLQVAENVSFVEEYRWLAYVLLLLLELLVCLFTLLGLAKQSKWLVIVMTVMSLLVLVLSWGSMGLEAATAVGLSDFCSNPDPYVLNLTQEETGLSSEADSVPASSGQHPLPAAGPGARSCASVPFSAEASAVLGGDSECDRRKFPPVGGTATLPQPAQGLWCSPAGPVRRRPGRPALPATLLPAVCRSAGHCPLQPAPSLGPLPTQ

SEQ ID NO: 16662 - protein, 363 aa, Artificial Sequence
  Synthetic polypeptide
RAAICTGIGIGFYGNSETSDGVSQLSSALLHANHTLSTIDHLVLETVERLGEAVRTELTTLEEVLEPRTELVAAARGARRQAEAAAQQLQGLAFWQGVPLSPLQVAENVSFVEEYRWLAYVLLLLLELLVCLFTLLGLAKQSKWLVIVMTVMSLLVLVLSWGSMGLEAATAVGLSDFCSNPDPYVLNLTQEETGLSSDILSYYLLCNRAVSNPFQQRLTLSQRALANIHSQLLGLEREAVPQFPSAQKPLLSLEETLNVTEGNFHQLVALLHCRSLHKDYGAALRGLCEDALEGLLFLLLFSLLSAGALATALCSLPRAWALFPPRNPSALCSGSRLSEPLLPAGLEPGSPLRSFPGCRRRPH

SEQ ID NO: 16663 - protein, 131 aa, Artificial Sequence
  Synthetic polypeptide
RDIRDEDEGGRALEPKRISSNIASAPSRQCDSGQVACLLWAATSFHHCKRRQRERDYGAALRGLCEDALEGLLFLLLFSLLSAGALATALCSLPRAWALFPPSDDYDDTDDDDPFNPQQESKRFVQWQSSI

SEQ ID NO: 16664 - protein, 96 aa, Artificial Sequence
  Synthetic polypeptide
LAFSGLQLLSTIARGGSVRGTMVQPCGACAKTPWKACSSCYSSPCCLQERWPLPSAACPEPGPSSHPVTTTMTQTMTTLSTLSRNPSALCSGSRLS

SEQ ID NO: 16665 - protein, 49 aa, Artificial Sequence
  Synthetic polypeptide
EGLWCSPAGPVRRRPGRPALPATLLPAVCRSAGHCPLQPAPSLGPLPTQ

SEQ ID NO: 16666 - protein, 49 aa, Artificial Sequence; identical to SEQ ID NO: 16665
  Synthetic polypeptide

SEQ ID NO: 16667 - protein, 49 aa, Artificial Sequence; identical to SEQ ID NO: 16665
  Synthetic polypeptide

SEQ ID NO: 16668 - protein, 130 aa, Artificial Sequence
  Synthetic polypeptide
RDIRDEDEGGRALEPKRISSNIASAPSRQCDSGQVACLLWAATSFHHCKRRQRERDYGAALRGLCEDALEGLLFLLLFSLLSAGALATALCSLPRAWALFPPSDDYDDTDDDDPFNPQESKRFVQWQSSI

SEQ ID NO: 16669 - protein, 95 aa, Artificial Sequence
  Synthetic polypeptide
LAFSGLQLLSTIARGGSVRGTMVQPCGACAKTPWKACSSCYSSPCCLQERWPLPSAACPEPGPSSHPVTTTMTQTMTTLSTLRNPSALCSGSRLS

SEQ ID NO: 16670 - protein, 103 aa, Artificial Sequence
  Synthetic polypeptide
RDIRDEDEGGRALEPKRISSNIASAPSRQCDSGQVACLLWAATSFHHCKRRQRERDYGAALRGLCEDALEGLLFLLLFSLLSAGALATALCSLPRAWALFPPS

SEQ ID NO: 16671 - protein, 68 aa, Artificial Sequence
  Synthetic polypeptide
LAFSGLQLLSTIARGGSVRGTMVQPCGACAKTPWKACSSCYSSPCCLQERWPLPSAACPEPGPSSHPV

SEQ ID NO: 16672 - protein, 140 aa, Artificial Sequence
  Synthetic polypeptide
RDIRDEDEGGRALEPKRISSNIASAPSRQCDSGQVACLLWAATSFHHCKRRQRERDYGAALRGLCEDALEGLLFLLLFSLLSAGALATALCSLPRAWALFPPRNPSALCSGSRLSEPLLPAGLEPGSPLRSFPGCRRRPH

SEQ ID NO: 16673 - protein, 105 aa, Artificial Sequence
  Synthetic polypeptide
LAFSGLQLLSTIARGGSVRGTMVQPCGACAKTPWKACSSCYSSPCCLQERWPLPSAACPEPGPSSHPGIQALCAVAVVYLSPSSRLDWSLAPLFVPSLAAGGDPT

SEQ ID NO: 16674 - protein, 61 aa, Artificial Sequence
  Synthetic polypeptide
EGLWCSPAGPVRRRPGRPALPATLLPAVCRSAGHCPLQPAPSLGPLPTQESKRFVQWQSSI

SEQ ID NO: 16675 - protein, 88 aa, Artificial Sequence
  Synthetic polypeptide
NTLKTEPPLPRQDYGAALRGLCEDALEGLLFLLLFSLLSAGALATALCSLPRAWALFPPSDDYDDTDDDDPFNPQQESKRFVQWQSSI

SEQ ID NO: 16676 - protein, 88 aa, Artificial Sequence
  Synthetic polypeptide
ILSKQSLHCPDRTMVQPCGACAKTPWKACSSCYSSPCCLQERWPLPSAACPEPGPSSHPVTTTMTQTMTTLSTLSRNPSALCSGSRLS

SEQ ID NO: 16677 - protein, 59 aa, Artificial Sequence
  Synthetic polypeptide
YSQNRASIAPTGLWCSPAGPVRRRPGRPALPATLLPAVCRSAGHCPLQPAPSLGPLPTQ

SEQ ID NO: 16678 - protein, 59 aa, Artificial Sequence; identical to SEQ ID NO: 16677
  Synthetic polypeptide

SEQ ID NO: 16679 - protein, 59 aa, Artificial Sequence; identical to SEQ ID NO: 16677
  Synthetic polypeptide

SEQ ID NO: 16680 - protein, 87 aa, Artificial Sequence
  Synthetic polypeptide
NTLKTEPPLPRQDYGAALRGLCEDALEGLLFLLLFSLLSAGALATALCSLPRAWALFPPSDDYDDTDDDDPFNPQESKRFVQWQSSI

SEQ ID NO: 16681 - protein, 87 aa, Artificial Sequence
  Synthetic polypeptide
ILSKQSLHCPDRTMVQPCGACAKTPWKACSSCYSSPCCLQERWPLPSAACPEPGPSSHPVTTTMTQTMTTLSTLRNPSALCSGSRLS

SEQ ID NO: 16682 - protein, 60 aa, Artificial Sequence
  Synthetic polypeptide
NTLKTEPPLPRQDYGAALRGLCEDALEGLLFLLLFSLLSAGALATALCSLPRAWALFPPS

SEQ ID NO: 16683 - protein, 60 aa, Artificial Sequence
  Synthetic polypeptide
ILSKQSLHCPDRTMVQPCGACAKTPWKACSSCYSSPCCLQERWPLPSAACPEPGPSSHPV

SEQ ID NO: 16684 - protein, 97 aa, Artificial Sequence
  Synthetic polypeptide
NTLKTEPPLPRQDYGAALRGLCEDALEGLLFLLLFSLLSAGALATALCSLPRAWALFPPRNPSALCSGSRLSEPLLPAGLEPGSPLRSFPGCRRRPH

SEQ ID NO: 16685 - protein, 97 aa, Artificial Sequence
  Synthetic polypeptide
ILSKQSLHCPDRTMVQPCGACAKTPWKACSSCYSSPCCLQERWPLPSAACPEPGPSSHPGIQALCAVAVVYLSPSSRLDWSLAPLFVPSLAAGGDPT

SEQ ID NO: 16686 - protein, 71 aa, Artificial Sequence
  Synthetic polypeptide
YSQNRASIAPTGLWCSPAGPVRRRPGRPALPATLLPAVCRSAGHCPLQPAPSLGPLPTQESKRFVQWQSSI

SEQ ID NO: 16687 - protein, 5 aa, Artificial Sequence
  Synthetic polypeptide
LGALT

SEQ ID NO: 16688 - protein, 5 aa, Artificial Sequence
  Synthetic polypeptide
LGALT

SEQ ID NO: 16689 - protein, 5 aa, Artificial Sequence
  Synthetic polypeptide
LGALT

SEQ ID NO: 16690 - protein, 5 aa, Artificial Sequence
  Synthetic polypeptide
LGALT

SEQ ID NO: 16691 - protein, 5 aa, Artificial Sequence
  Synthetic polypeptide
LGALT

SEQ ID NO: 16692 - protein, 5 aa, Artificial Sequence
  Synthetic polypeptide
LGALT

SEQ ID NO: 16693 - protein, 290 aa, Artificial Sequence
  Synthetic polypeptide
AGRGGSRLSSQHSGRPRLVSCSATTQQWADLSLALEVNQSLTCVNLSDNELLDEGAKLLYTTLRHPKCFLQRLSLENCHLTEANCKDLAAVLVVSRELTHLCLAKNPIGNTGVKFLCEGLRYPECKLQTLVLWNCDITSDGCCDLTKLLQEKSSLLCLDLGLNHIGVKGMKFLCEALRKPLCNLRCLWLWGCSIPPFSCEDLCSALSCNQSLVTLDLGQNPLGSSGVKMLFETLTCSSGTLRTLRLKIDDFNDELNKLLEEIEEKNPQLIIDTEKHHPWAERPSSHDFMI

SEQ ID NO: 16694 - protein, 290 aa, Artificial Sequence; identical to SEQ ID NO: 16693
  Synthetic polypeptide

SEQ ID NO: 16695 - protein, 290 aa, Artificial Sequence; identical to SEQ ID NO: 16693
  Synthetic polypeptide

SEQ ID NO: 16696 - protein, 290 aa, Artificial Sequence; identical to SEQ ID NO: 16693
  Synthetic polypeptide

SEQ ID NO: 16697 - protein, 290 aa, Artificial Sequence; identical to SEQ ID NO: 16693
  Synthetic polypeptide

SEQ ID NO: 16698 - protein, 290 aa, Artificial Sequence; identical to SEQ ID NO: 16693
  Synthetic polypeptide

SEQ ID NO: 16699 - protein, 290 aa, Artificial Sequence; identical to SEQ ID NO: 16693
  Synthetic polypeptide

SEQ ID NO: 16700 - protein, 290 aa, Artificial Sequence; identical to SEQ ID NO: 16693
  Synthetic polypeptide

SEQ ID NO: 16701 - protein, 40 aa, Artificial Sequence
  Synthetic polypeptide
PGAVAHACHPSTLGGRGWCLVPLPLSSGLISPWPLKSTSP

SEQ ID NO: 16702 - protein, 40 aa, Artificial Sequence; identical to SEQ ID NO: 16701
  Synthetic polypeptide

SEQ ID NO: 16703 - protein, 40 aa, Artificial Sequence; identical to SEQ ID NO: 16701
  Synthetic polypeptide

SEQ ID NO: 16704 - protein, 40 aa, Artificial Sequence; identical to SEQ ID NO: 16701
  Synthetic polypeptide

SEQ ID NO: 16705 - protein, 40 aa, Artificial Sequence; identical to SEQ ID NO: 16701
  Synthetic polypeptide

SEQ ID NO: 16706 - protein, 40 aa, Artificial Sequence; identical to SEQ ID NO: 16701
  Synthetic polypeptide

SEQ ID NO: 16707 - protein, 40 aa, Artificial Sequence; identical to SEQ ID NO: 16701
  Synthetic polypeptide

SEQ ID NO: 16708 - protein, 40 aa, Artificial Sequence; identical to SEQ ID NO: 16701
  Synthetic polypeptide

SEQ ID NO: 16709 - protein, 40 aa, Artificial Sequence; identical to SEQ ID NO: 16701
  Synthetic polypeptide

SEQ ID NO: 16710 - protein, 28 aa, Artificial Sequence
  Synthetic polypeptide
RARWLTPVIPALWEAEVGVLFRYHSAVG

SEQ ID NO: 16711 - protein, 28 aa, Artificial Sequence
  Synthetic polypeptide
RARWLTPVIPALWEAEVGVLFRYHSAVG

SEQ ID NO: 16712 - protein, 28 aa, Artificial Sequence
  Synthetic polypeptide
RARWLTPVIPALWEAEVGVLFRYHSAVG

SEQ ID NO: 16713 - protein, 28 aa, Artificial Sequence
  Synthetic polypeptide
RARWLTPVIPALWEAEVGVLFRYHSAVG

SEQ ID NO: 16714 - protein, 28 aa, Artificial Sequence
  Synthetic polypeptide
RARWLTPVIPALWEAEVGVLFRYHSAVG

SEQ ID NO: 16715 - protein, 28 aa, Artificial Sequence
  Synthetic polypeptide
RARWLTPVIPALWEAEVGVLFRYHSAVG

SEQ ID NO: 16716 - protein, 28 aa, Artificial Sequence
  Synthetic polypeptide
RARWLTPVIPALWEAEVGVLFRYHSAVG

SEQ ID NO: 16717 - protein, 28 aa, Artificial Sequence
  Synthetic polypeptide
RARWLTPVIPALWEAEVGVLFRYHSAVG

SEQ ID NO: 16718 - protein, 28 aa, Artificial Sequence
  Synthetic polypeptide
RARWLTPVIPALWEAEVGVLFRYHSAVG

SEQ ID NO: 16719 - protein, 68 aa, Artificial Sequence
  Synthetic polypeptide
AGRGGSRLSSQHSGRPRLVSCSATTQQWADLSLALEVNQSLTAAVLSIWGHRRAMVMPDLAVWNLSLM

SEQ ID NO: 16720 - protein, 86 aa, Artificial Sequence
  Synthetic polypeptide
RLESGCTQGPIFWLLVKSPELAAQPSTYLAVAEELADVSGKYFDGLKQKAPAPEAEDEEVARRLWAESARLVGLEAPSVREQPLPR

SEQ ID NO: 16721 - protein, 86 aa, Artificial Sequence; identical to SEQ ID NO: 16720
  Synthetic polypeptide

SEQ ID NO: 16722 - protein, 81 aa, Artificial Sequence
  Synthetic polypeptide
RGRGRGADAWSQAVLRGPSSGCWSRAPSWPPSPAHTWPWRRNWRMFPESTSMDSNRRPRPPRLRMRRWPGGFGLKVPAWWA

SEQ ID NO: 16723 - protein, 81 aa, Artificial Sequence; identical to SEQ ID NO: 16722
  Synthetic polypeptide

SEQ ID NO: 16724 - protein, 62 aa, Artificial Sequence
  Synthetic polypeptide
EEEAVELTPGVRLYSGAHLLAAGQEPRAGRPAQHIPGRGGGTGGCFRKVLRWTQTEGPGPRG

SEQ ID NO: 16725 - protein, 62 aa, Artificial Sequence; identical to SEQ ID NO: 16724
  Synthetic polypeptide

SEQ ID NO: 16726 - protein, 11 aa, Artificial Sequence
  Synthetic polypeptide
LHLERRSEWTF

SEQ ID NO: 16727 - protein, 11 aa, Artificial Sequence
  Synthetic polypeptide
LHLERRSEWTF

SEQ ID NO: 16728 - protein, 11 aa, Artificial Sequence
  Synthetic polypeptide
LHLERRSEWTF

SEQ ID NO: 16729 - protein, 11 aa, Artificial Sequence
  Synthetic polypeptide
LHLERRSEWTF

SEQ ID NO: 16730 - protein, 229 aa, Artificial Sequence
  Synthetic polypeptide
TPIPQHVTSFREEERVDILINNAGVMRCPHWTTEDGFEMQFGVNHLGHFLLTNLLLDKLKASAPSRIINLSSLAHVAGHIDFDDLNWQTRKYNTKAAYCQSKLAIVLFTKELSRRLQGSGVTVNALHPGVARTELGRHTGIHGSTFSSTTLGPIFWLLVKSPELAAQPSTYLAVAEELADVSGKYFDGLKQKAPAPEAEDEEVARRLWAESARLVGLEAPSVREQPLPR

SEQ ID NO: 16731 - protein, 229 aa, Artificial Sequence; identical to SEQ ID NO: 16730
  Synthetic polypeptide

SEQ ID NO: 16732 - protein, 118 aa, Artificial Sequence
  Synthetic polypeptide
TPIPQHVTSFREEERVDILINNAGVMRCPHWTTEDGFEMQFGVNHLGHFLLTNLLLDKLKASAPSRIINLSSLAHVAGHIDFDDLNWQTRKYNTKAAYCQSKLAIVLFTKELSRRLQG

SEQ ID NO: 16733 - protein, 118 aa, Artificial Sequence; identical to SEQ ID NO: 16732
  Synthetic polypeptide

SEQ ID NO: 16734 - protein, 156 aa, Artificial Sequence
  Synthetic polypeptide
GQVRWLTPVIPALREAEAGGSLEEEKMRKEEEEAKKRAEDDAKKKKVLSNMGAHFGGYLVKAEQKRGKRQTGREMKVRILSERKKPLDIDYMGEEQLREKAQELSDWIHQLESEKFDLMAKLKQQKYEINVLYNRISHAQKFRKGAGKGRVGGRWK

SEQ ID NO: 16735 - protein, 156 aa, Artificial Sequence; identical to SEQ ID NO: 16734
  Synthetic polypeptide

SEQ ID NO: 16736 - protein, 156 aa, Artificial Sequence; identical to SEQ ID NO: 16734
  Synthetic polypeptide

SEQ ID NO: 16737 - protein, 156 aa, Artificial Sequence; identical to SEQ ID NO: 16734
  Synthetic polypeptide

SEQ ID NO: 16738 - protein, 156 aa, Artificial Sequence; identical to SEQ ID NO: 16734
  Synthetic polypeptide

SEQ ID NO: 16739 - protein, 156 aa, Artificial Sequence; identical to SEQ ID NO: 16734
  Synthetic polypeptide

SEQ ID NO: 16740 - protein, 156 aa, Artificial Sequence; identical to SEQ ID NO: 16734
  Synthetic polypeptide

SEQ ID NO: 16741 - protein, 156 aa, Artificial Sequence; identical to SEQ ID NO: 16734
  Synthetic polypeptide

SEQ ID NO: 16742 - protein, 156 aa, Artificial Sequence; identical to SEQ ID NO: 16734
  Synthetic polypeptide

SEQ ID NO: 16743 - protein, 17 aa, Artificial Sequence
  Synthetic polypeptide
SQHSGRPRQADHLRRRR

SEQ ID NO: 16744 - protein, 17 aa, Artificial Sequence
  Synthetic polypeptide
SQHSGRPRQADHLRRRR

SEQ ID NO: 16745 - protein, 17 aa, Artificial Sequence
  Synthetic polypeptide
SQHSGRPRQADHLRRRR

SEQ ID NO: 16746 - protein, 17 aa, Artificial Sequence
  Synthetic polypeptide
SQHSGRPRQADHLRRRR

SEQ ID NO: 16747 - protein, 17 aa, Artificial Sequence
  Synthetic polypeptide
SQHSGRPRQADHLRRRR

SEQ ID NO: 16748 - protein, 17 aa, Artificial Sequence
  Synthetic polypeptide
SQHSGRPRQADHLRRRR

SEQ ID NO: 16749 - protein, 17 aa, Artificial Sequence
  Synthetic polypeptide
SQHSGRPRQADHLRRRR

SEQ ID NO: 16750 - protein, 17 aa, Artificial Sequence
  Synthetic polypeptide
SQHSGRPRQADHLRRRR

SEQ ID NO: 16751 - protein, 17 aa, Artificial Sequence
  Synthetic polypeptide
SQHSGRPRQADHLRRRR

SEQ ID NO: 16752 - protein, 17 aa, Artificial Sequence
  Synthetic polypeptide
SQHSGRPRQADHLRRRR

SEQ ID NO: 16753 - protein, 17 aa, Artificial Sequence
  Synthetic polypeptide
SQHSGRPRQADHLRRRR

SEQ ID NO: 16754 - protein, 17 aa, Artificial Sequence
  Synthetic polypeptide
SQHSGRPRQADHLRRRR

SEQ ID NO: 16755 - protein, 17 aa, Artificial Sequence
  Synthetic polypeptide
SQHSGRPRQADHLRRRR

SEQ ID NO: 16756 - protein, 172 aa, Artificial Sequence
  Synthetic polypeptide
GQVRWLTPVIPALREAEAGGSLEEEKMRKEEEEAKKRAEDDAKKKKVLSNMGAHFGGYLVKAEQKRGKRQTGREMKVRILSERKKPLDIDYMGEEQLRARSAWLPPSQPSCPAREKAQELSDWIHQLESEKFDLMAKLKQQKYEINVLYNRISHAQKFRKGAGKGRVGGRWK

SEQ ID NO: 16757 - protein, 97 aa, Artificial Sequence
  Synthetic polypeptide
GQVRWLTPVIPALREAEAGGSLEEEKMRKEEEEAKKRAEDDAKKKKVLSNMGAHFGGYLVKAEQKRGKRQTGREMKVRILSERKKPLDIDYMGEEQL

SEQ ID NO: 16758 - protein, 56 aa, Artificial Sequence
  Synthetic polypeptide
GQVRWLTPVIPALREAEAGGSLEEEKMRKEEEEAKKRAEDDAKKKKVLSNMGAHFG

SEQ ID NO: 16759 - protein, 42 aa, Artificial Sequence
  Synthetic polypeptide
GQVRWLTPVIPALREAEAGGSLEEEKMRKEEEEAKKRAEDDA

SEQ ID NO: 16760 - protein, 80 aa, Artificial Sequence
  Synthetic polypeptide
QPWIQKPGCLLSCVIARCGDLPAPAAAFVRESPHLSTHRGPVPLAAAAGHHVDLVLEAPDEEHRPQLLRGGDQGSRGHEQ

SEQ ID NO: 16761 - protein, 587 aa, Artificial Sequence
  Synthetic polypeptide
LPDAVTCQHLPQPSSGSRPISPRIGALCPLLLQPGTMSTSSLRRQMKNIVHNYSEAEIKVREATSNDPWGPSSSLMSEIADLTYNVVAFSEIMSMIWKRLNDHGKNWRHVYKAMTLMEYLIKTGSERVSQQCKENMYAVQTLKDFQYVDRDGKDQGVNVREKAKQLVALLRDEDRLREERAHALKTKEKLAQTATASSAAVGSGPPPEAEQAWPQSSGEEELQLQLALAMSKEEADQEERIRRGDDLRLQMAIEESKRETGGKEESSLMDLADVFTAPAPAPTTDPWGGPAPMAAAVPTAAPTSDPWGGPPVPPAADPWGGPAPTPASGDPWRPAAPAGPSVDPWGGTPAPAAGEGPTPDPWGSSDGGVPVSGPSASDPWTPAPAFSDPWGGSPAKPSTNGTTAAGGFDTEPDEFSDFDRLRTALPTSGSSAGELELLAGEVPARSPGAFDMSGVRGSLAEAVGSPPPAATPTPTPPTRKTPESFLGPNAALVDLDSLVSRPGPTPPGAKASNPFLPGGGPATGPSVTNPFQPAPPATLTLNQLRLSPVPPVPGAPPTYISPLGGGPGLPPMMPPGPPAPNTNPFLL

SEQ ID NO: 16762 - protein, 18 aa, Artificial Sequence
  Synthetic polypeptide
ALDSEARLPAKLCNCQMR

SEQ ID NO: 16763 - protein, 37 aa, Artificial Sequence
  Synthetic polypeptide
EHVPSEITDETFLLSPLAFHIGLNVLSSANPSQARES

SEQ ID NO: 16764 - protein, 56 aa, Artificial Sequence
  Synthetic polypeptide
TFYPVQILARQEKVKPFSGTTPSRKPLPKRKNTWNFLKCAYMVMTYLFVSYNKGDW

SEQ ID NO: 16765 - protein, 28 aa, Artificial Sequence
  Synthetic polypeptide
PGKRKLNPSQAPPHPGNHSPRGRTRGTS

SEQ ID NO: 16766 - protein, 828 aa, Artificial Sequence
  Synthetic polypeptide
FTPIIPALWEAEVKNKKLVELLRRKVRLAQPYVGVFLKRDDSNESDVVESLDEIYHTGTFAQIHEMQDLGDKLRMIVMGHRRVHISRQLEVEPEEPEAENKHKPRRKSKRGKKEAEDELSARHPAELAMEPTPELPAEVLMVEVENVVHEDFQVTEEVKALTAEIVKTIRDIIALNPLYRESVLQMMQAGQRVVDNPIYLSDMGAALTGAESHELQDVLEETNIPKRLYKALSLLKKEFELSKLQQRLGREVEEKIKQTHRKYLLQEQLKIIKKELGLEKDDKDAIEEKFRERLKELVVPKHVMDVVDEELSKLGLLDNHSSEFNVTRNYLDWLTSIPWGKYSNENLDLARAQAVLEEDHYGMEDVKKRILEFIAVSQLRGSTQGKILCFYGPPGVGKTSIARSIARALNREYFRFSVGGMTDVAEIKGHRRTYVGAMPGKIIQCLKKTKTENPLILIDEVDKIGRGYQGDPSSALLELLDPEQNANFLDHYLDVPVDLSKVLFICTANVTDTIPEPLRDRMEMINVSGYVAQEKLAIAERYLVPQARALCGLDESKAKLSSDVLTLLIKQYCRESGVRNLQKQVEKVLRKSAYKIVSGEAESVEVTPENLQDFVGKPVFTVERMYDVTPPGVVMGLAWTAMGGSTLFVETSLRRPQDKDAKGDKDGSLEVTGQLGEVMKESARIAYTFARAFLMQHAPANDYLVTSHIHLHVPEGATPKDGPSAGCTIVTALLSLAMGRPVRQNLAMTGEVSLTGKILPVGGIKEKTIAAKRAGVTCIVLPAENKKDFYDLAAFITEGLEVHFVEHYREIFDIAFPDEQAEALAVER

SEQ ID NO: 16767 - protein, 828 aa, Artificial Sequence; identical to SEQ ID NO: 16766
  Synthetic polypeptide

SEQ ID NO: 16768 - protein, 828 aa, Artificial Sequence; identical to SEQ ID NO: 16766
  Synthetic polypeptide

SEQ ID NO: 16769 - protein, 17 aa, Artificial Sequence
  Synthetic polypeptide
SQHFGRLRLKIRSWLSC

SEQ ID NO: 16770 - protein, 17 aa, Artificial Sequence
  Synthetic polypeptide
SQHFGRLRLKIRSWLSC

SEQ ID NO: 16771 - protein, 17 aa, Artificial Sequence
  Synthetic polypeptide
SQHFGRLRLKIRSWLSC

SEQ ID NO: 16772 - protein, 17 aa, Artificial Sequence
  Synthetic polypeptide
SQHFGRLRLKIRSWLSC

SEQ ID NO: 16773 - protein, 17 aa, Artificial Sequence
  Synthetic polypeptide
SQHFGRLRLKIRSWLSC

SEQ ID NO: 16774 - protein, 141 aa, Artificial Sequence
  Synthetic polypeptide
FTPIIPALWEAEVKNKKLVELLRRKVRLAQPYVGVFLKRDDSNESDVVESLDEIYHTGTFAQIHEMQDLGDKLRMIVMGHRREASAGSSSQPQRLIHTCLAPVSESISADSWRWSPRSRRRRTSTSPAGSQSGARRRRRTS

SEQ ID NO: 16775 - protein, 812 aa, Artificial Sequence
  Synthetic polypeptide
FTPIIPALWEAEVKNKKLVELLRRKVRLAQPYVGVFLKRDDSNESDVVESLDEIYHTGTFAQIHEMQDLGDKLRMIVMGHRRVHISRQLEVEPEEPEAENKHKPRRKSKRGKKEAEDELSARHPAELAMEPTPELPAEVLMVEALTAEIVKTIRDIIALNPLYRESVLQMMQAGQRVVDNPIYLSDMGAALTGAESHELQDVLEETNIPKRLYKALSLLKKEFELSKLQQRLGREVEEKIKQTHRKYLLQEQLKIIKKELGLEKDDKDAIEEKFRERLKELVVPKHVMDVVDEELSKLGLLDNHSSEFNVTRNYLDWLTSIPWGKYSNENLDLARAQAVLEEDHYGMEDVKKRILEFIAVSQLRGSTQGKILCFYGPPGVGKTSIARSIARALNREYFRFSVGGMTDVAEIKGHRRTYVGAMPGKIIQCLKKTKTENPLILIDEVDKIGRGYQGDPSSALLELLDPEQNANFLDHYLDVPVDLSKVLFICTANVTDTIPEPLRDRMEMINVSGYVAQEKLAIAERYLVPQARALCGLDESKAKLSSDVLTLLIKQYCRESGVRNLQKQVEKVLRKSAYKIVSGEAESVEVTPENLQDFVGKPVFTVERMYDVTPPGVVMGLAWTAMGGSTLFVETSLRRPQDKDAKGDKDGSLEVTGQLGEVMKESARIAYTFARAFLMQHAPANDYLVTSHIHLHVPEGATPKDGPSAGCTIVTALLSLAMGRPVRQNLAMTGEVSLTGKILPVGGIKEKTIAAKRAGVTCIVLPAENKKDFYDLAAFITEGLEVHFVEHYREIFDIAFPDEQAEALAVER

SEQ ID NO: 16776 - protein, 22 aa, Artificial Sequence
  Synthetic polypeptide
GQAWWLKPGIPALWDAEGTVTF

SEQ ID NO: 16777 - protein, 22 aa, Artificial Sequence
  Synthetic polypeptide
GQAWWLKPGIPALWDAEGTVTF

SEQ ID NO: 16778 - protein, 19 aa, Artificial Sequence
  Synthetic polypeptide
ARHGGSSLESQHFGMLRAL

SEQ ID NO: 16779 - protein, 19 aa, Artificial Sequence
  Synthetic polypeptide
ARHGGSSLESQHFGMLRAL

SEQ ID NO: 16780 - protein, 19 aa, Artificial Sequence
  Synthetic polypeptide
ARHGGSSLESQHFGMLRAL

SEQ ID NO: 16781 - protein, 19 aa, Artificial Sequence
  Synthetic polypeptide
ARHGGSSLESQHFGMLRAL

SEQ ID NO: 16782 - protein, 19 aa, Artificial Sequence
  Synthetic polypeptide
ARHGGSSLESQHFGMLRAL

SEQ ID NO: 16783 - protein, 19 aa, Artificial Sequence
  Synthetic polypeptide
ARHGGSSLESQHFGMLRAL

SEQ ID NO: 16784 - protein, 138 aa, Artificial Sequence
  Synthetic polypeptide
GQAWWLKPGIPALWDAEGTVTFEDVAVNFSQEEWCLLSEAQRCLYRDVMLENLALISSLGCWCGSKDEEAPCKQRISVQRESQSRTPRAGVSPKKAHPCEMCGLILEDVFHFADHQETHHKQKLNRSGACGKNLDDTA

SEQ ID NO: 16785 - protein, 171 aa, Artificial Sequence
  Synthetic polypeptide
GQAWWLKPGIPALWDAEGTVTFEDVAVNFSQEEWCLLSEAQRCLYRDVMLENLALISSLGCWCGSKDEEAPCKQRISVQRESQSRTPRAGVSPKKAHPCEMCGLILEDVFHFADHQETHHKQKLNRSGACGKNLDDTAYLHQHQKQHIGEKFYRKSVREASFVKKRKLRVS

SEQ ID NO: 16786 - protein, 580 aa, Artificial Sequence
  Synthetic polypeptide
GQAWWLKPGIPALWDAEGTVTFEDVAVNFSQEEWCLLSEAQRCLYRDVMLENLALISSLGCWCGSKDEEAPCKQRISVQRESQSRTPRAGVSPKKAHPCEMCGLILEDVFHFADHQETHHKQKLNRSGACGKNLDDTAYLHQHQKQHIGEKFYRKSVREASFVKKRKLRVSQEPFVFREFGKDVLPSSGLCQEEAAVEKTDSETMHGPPFQEGKTNYSCGKRTKAFSTKHSVIPHQKLFTRDGCYVCSDCGKSFSRYVSFSNHQRDHTAKGPYDCGECGKSYSRKSSLIQHQRVHTGQTAYPCEECGKSFSQKGSLISHQLVHTGEGPYECRECGKSFGQKGNLIQHQQGHTGERAYHCGECGKSFRQKFCFINHQRVHTGERPYKCGECGKSFGQKGNLVHHQRGHTGERPYECKECGKSFRYRSHLTEHQRLHTGERPYNCRECGKLFNRKYHLLVHERVHTGERPYACEVCGKLFGNKHSVTIHQRIHTGERPYECSECGKSFLSSSALHVHKRVHSGQKPYKCSECGKSFSECSSLIKHRRIHTGERPYECTKCGKTFQRSSTLLHHQSSHRRKAL

SEQ ID NO: 16787 - protein, 580 aa, Artificial Sequence; identical to SEQ ID NO: 16786
  Synthetic polypeptide

SEQ ID NO: 16788 - protein, 77 aa, Artificial Sequence
  Synthetic polypeptide
SKIQIPAHSLENSAGLASVLSHTPPQSLKLISCHSCPFLDPSHSSNRVRMQCPRHHLELIIAKYVSTLMLDFPTSRP

SEQ ID NO: 16789 - protein, 77 aa, Artificial Sequence; identical to SEQ ID NO: 16788
  Synthetic polypeptide

SEQ ID NO: 16790 - protein, 37 aa, Artificial Sequence
  Synthetic polypeptide
KTQQDWPLSYPTPHLSPSSSSPVIPAHFWTPATPQTG

SEQ ID NO: 16791 - protein, 37 aa, Artificial Sequence; identical to SEQ ID NO: 16790
  Synthetic polypeptide

SEQ ID NO: 16792 - protein, 55 aa, Artificial Sequence
  Synthetic polypeptide
NPNSSSQLRKLSRTGLCPIPHPTSVPQAHLLSFLPISGPQPLLKQGEDAVSKAPS

SEQ ID NO: 16793 - protein, 55 aa, Artificial Sequence; identical to SEQ ID NO: 16792
  Synthetic polypeptide

SEQ ID NO: 16794 - protein, 105 aa, Artificial Sequence
  Synthetic polypeptide
QDPHLCKKVKQLAGHDGLTAAAYRVTLNPPGTFLEGVAKVGQYTFTAAAVGAVFGLTTCISAHVREKPDDPLNYFLGGCAGGLTLGARKTGFHRVSQDGLDLLTS

SEQ ID NO: 16795 - protein, 5 aa, Artificial Sequence
  Synthetic polypeptide
LGMMA

SEQ ID NO: 16796 - protein, 5 aa, Artificial Sequence
  Synthetic polypeptide
LGMMA

SEQ ID NO: 16797 - protein, 5 aa, Artificial Sequence
  Synthetic polypeptide
LGMMA

SEQ ID NO: 16798 - protein, 5 aa, Artificial Sequence
  Synthetic polypeptide
LGMMA

SEQ ID NO: 16799 - protein, 5 aa, Artificial Sequence
  Synthetic polypeptide
LGMMA

SEQ ID NO: 16800 - protein, 5 aa, Artificial Sequence
  Synthetic polypeptide
LGMMA

SEQ ID NO: 16801 - protein, 129 aa, Artificial Sequence
  Synthetic polypeptide
QDPHLCKKVKQLAGHDGLTAAAYRVTLNPPGTFLEGVAKVGQYTFTAAAVGAVFGLTTCISAHVREKPDDPLNYFLGGCAGGLTLGARTTLTHGSPGPSQATVAVAPLSGRAAVSAAGGCVFLLLPACV

SEQ ID NO: 16802 - protein, 154 aa, Artificial Sequence
  Synthetic polypeptide
QDPHLCKKVKQLAGHDGLTAAAYRVTLNPPGTFLEGVAKVGQYTFTADTGSERPRGSCCARLEALALPVYPAAAVGAVFGLTTCISAHVREKPDDPLNYFLGGCAGGLTLGARTTLTHGSPGPSQATVAVAPLSGRAAVSAAGGCVFLLLPACV

SEQ ID NO: 16803 - protein, 212 aa, Artificial Sequence
  Synthetic polypeptide
QDPHLCKKVKQLAGHDGLTAAAYRVTLNPPGTFLEGVAKVGQYTFTAAAVGAVFGLTTCISAHVREKPDDPLNYFLGGCAGGLTLGARKTGSHCVVQAGLKLLASSSPHTSASQSAGIIGMSHCVQRFWVPSSSACLEVLSGESTDVHACSSTRGACNSSGSRPLPELGARASGSLRKGGHTHPAPRGAGALTPVQALIESLLNTLGSNPRT

SEQ ID NO: 16804 - protein, 104 aa, Artificial Sequence
  Synthetic polypeptide
QDPHLCKKVKQLAGHDGLTAAAYRVTLNPPGTFLEGVAKVGQYTFTAAAVGAVFGLTTCISAHVREKPDDPLNYFLGGCAGGLTLGARSEWPPPHPHPPPSLAE

SEQ ID NO: 16805 - protein, 125 aa, Artificial Sequence
  Synthetic polypeptide
QDPHLCKKVKQLAGHDGLTAAAYRVTLNPPGTFLEGVAKVGQYTFTAAAVGAVFGLTTCISAHVREKPDDPLNYFLGGCAGGLTLGARTHNYGIGAAACVYFGIAASLVKMGRLEGWEVFAKPKV

SEQ ID NO: 16806 - protein, 33 aa, Artificial Sequence
  Synthetic polypeptide
TQDSCPASHFDISIWMCHRKACHCSARLCVSEG

SEQ ID NO: 16807 - protein, 33 aa, Artificial Sequence; identical to SEQ ID NO: 16806
  Synthetic polypeptide

SEQ ID NO: 16808 - protein, 33 aa, Artificial Sequence; identical to SEQ ID NO: 16806
  Synthetic polypeptide

SEQ ID NO: 16809 - protein, 33 aa, Artificial Sequence; identical to SEQ ID NO: 16806
  Synthetic polypeptide

SEQ ID NO: 16810 - protein, 33 aa, Artificial Sequence; identical to SEQ ID NO: 16806
  Synthetic polypeptide

SEQ ID NO: 16811 - protein, 33 aa, Artificial Sequence; identical to SEQ ID NO: 16806
  Synthetic polypeptide

SEQ ID NO: 16812 - protein, 33 aa, Artificial Sequence; identical to SEQ ID NO: 16806
  Synthetic polypeptide

SEQ ID NO: 16813 - protein, 33 aa, Artificial Sequence; identical to SEQ ID NO: 16806
  Synthetic polypeptide

SEQ ID NO: 16814 - protein, 33 aa, Artificial Sequence; identical to SEQ ID NO: 16806
  Synthetic polypeptide

SEQ ID NO: 16815 - protein, 33 aa, Artificial Sequence; identical to SEQ ID NO: 16806
  Synthetic polypeptide

SEQ ID NO: 16816 - protein, 33 aa, Artificial Sequence; identical to SEQ ID NO: 16806
  Synthetic polypeptide

SEQ ID NO: 16817 - protein, 33 aa, Artificial Sequence; identical to SEQ ID NO: 16806
  Synthetic polypeptide

SEQ ID NO: 16818 - protein, 576 aa, Artificial Sequence
  Synthetic polypeptide
LLELRTHVQHHISTSPFGCVIEKPAIAPPVFVFQKDKGQKSPAEQKNLSDSGEEPRGEAEAPHHGTGHPESAGEHALEPPAPAGASASTPPPPAPEAQLPPFPRELAGRSAGGSSPEGGEDSDREDGNYCPPVKRERTSSLTQFPPSQSEERSSGFRLKPPTLIHGQAPSAGLPSQKPKEQQRSVLRPAVLQAPQPKALSQTVPSSGTNGVSLPADCTGAVPAASPDTAAWRSPSEAADEEKEPQKNESSNASEEEACEKKDPATQQAFVFGQNLRDRVKLINESVDEADMENAGHPSADTPTATNYFLQYISSSLENSTNSADASSNKFVFGQNMSERVLSPPKLNEVSSDANRENAAAESGSESSSQEATPEKESLAESAAAYTKATARKCLLEKVEVITGEEAESNVLQMQCKLFVFDKTSQSWVERGRGLLRLNDMASTDDGTLQSRLVMRTQGSLRLILNTKLWAQMQIDKASEKSIRITAMDTEDQGVKVFLISASSKDTGQLYAALHHRILALRSRVEQEQEAKMPAPEPGAAPSNEEDDSDDDDVLAPSGATAAGAGDEGDGQTTGST

SEQ ID NO: 16819 - protein, 581 aa, Artificial Sequence
  Synthetic polypeptide
LLELRTHVQHHISTSPFGCVIEKPAIAPPVFVFQKDKGQKSPAEQKNLSDSGEEPRGEAEAPHHGTGHPESAGEHALEPPAPAGASASTPPPPAPEAQLPPFPRELAGRSAGGSSPEGGEDSDREDGNYCPPVKRERTSSLTQFPPSQSEERSSGFRLKPPTLIHGQAPSAGLPSQKPKEQQRSVLRPAVLQAPQPKALSQTVPSSGTNGVSLPADCTGAVPAASPDTAAWRSPSEAADEVCALEEKEPQKNESSNASEEEACEKKDPATQQAFVFGQNLRDRVKLINESVDEADMENAGHPSADTPTATNYFLQYISSSLENSTNSADASSNKFVFGQNMSERVLSPPKLNEVSSDANRENAAAESGSESSSQEATPEKESLAESAAAYTKATARKCLLEKVEVITGEEAESNVLQMQCKLFVFDKTSQSWVERGRGLLRLNDMASTDDGTLQSRLVMRTQGSLRLILNTKLWAQMQIDKASEKSIRITAMDTEDQGVKVFLISASSKDTGQLYAALHHRILALRSRVEQEQEAKMPAPEPGAAPSNEEDDSDDDDVLAPSGATAAGAGDEGDGQTTGST

SEQ ID NO: 16820 - protein, 88 aa, Artificial Sequence
  Synthetic polypeptide
LLELRTHVQHHISTSPFGCVIEKPAIAPPVFVFQKDKGQKRSAGGSSPEGGEDSDREDGNYCPPVKRERTSSLTQFPPSQSEENFWKE

SEQ ID NO: 16821 - protein, 508 aa, Artificial Sequence
  Synthetic polypeptide
LLELRTHVQHHISTSPFGCVIEKPAIAPPVFVFQKDKGQKRSAGGSSPEGGEDSDREDGNYCPPVKRERTSSLTQFPPSQSEERSSGFRLKPPTLIHGQAPSAGLPSQKPKEQQRSVLRPAVLQAPQPKALSQTVPSSGTNGVSLPADCTGAVPAASPDTAAWRSPSEAADEEKEPQKNESSNASEEEACEKKDPATQQAFVFGQNLRDRVKLINESVDEADMENAGHPSADTPTATNYFLQYISSSLENSTNSADASSNKFVFGQNMSERVLSPPKLNEVSSDANRENAAAESGSESSSQEATPEKESLAESAAAYTKATARKCLLEKVEVITGEEAESNVLQMQCKLFVFDKTSQSWVERGRGLLRLNDMASTDDGTLQSRLVMRTQGSLRLILNTKLWAQMQIDKASEKSIRITAMDTEDQGVKVFLISASSKDTGQLYAALHHRILALRSRVEQEQEAKMPAPEPGAAPSNEEDDSDDDDVLAPSGATAAGAGDEGDGQTTGST

SEQ ID NO: 16822 - protein, 513 aa, Artificial Sequence
  Synthetic polypeptide
LLELRTHVQHHISTSPFGCVIEKPAIAPPVFVFQKDKGQKRSAGGSSPEGGEDSDREDGNYCPPVKRERTSSLTQFPPSQSEERSSGFRLKPPTLIHGQAPSAGLPSQKPKEQQRSVLRPAVLQAPQPKALSQTVPSSGTNGVSLPADCTGAVPAASPDTAAWRSPSEAADEVCALEEKEPQKNESSNASEEEACEKKDPATQQAFVFGQNLRDRVKLINESVDEADMENAGHPSADTPTATNYFLQYISSSLENSTNSADASSNKFVFGQNMSERVLSPPKLNEVSSDANRENAAAESGSESSSQEATPEKESLAESAAAYTKATARKCLLEKVEVITGEEAESNVLQMQCKLFVFDKTSQSWVERGRGLLRLNDMASTDDGTLQSRLVMRTQGSLRLILNTKLWAQMQIDKASEKSIRITAMDTEDQGVKVFLISASSKDTGQLYAALHHRILALRSRVEQEQEAKMPAPEPGAAPSNEEDDSDDDDVLAPSGATAAGAGDEGDGQTTGST

SEQ ID NO: 16823 - protein, 188 aa, Artificial Sequence
  Synthetic polypeptide
LLELRTHVQHHISTSPFGCVIEKPAIAPPVFVFQKDKGQKRSAGGSSPEGGEDSDREDGNYCPPVKRERTSSLTQFPPSQSEERSSGFRLKPPTLIHGQAPSAGLPSQKPKEQQRSVLRPAVLQAPQPKALSQTVPSSGTNGVSLPADCTGAVPAASPDTAAWRSPSEAADEVCALEVFALSPRLECS

SEQ ID NO: 16824 - protein, 73 aa, Artificial Sequence
  Synthetic polypeptide
LLELRTHVQHHISTSPFGCVIEKPAIAPPVFVFQKDKGQKRSAGGSSPEGGEDSDREDGNYCPPVKRERTSSL

SEQ ID NO: 16825 - protein, 76 aa, Artificial Sequence
  Synthetic polypeptide
LLELRTHVQHHISTSPFGCVIEKPAIAPPVFVFQKDKGQKVRGRGQLAAPVLKAEKILTEKMEITALLSSEKEHPL

SEQ ID NO: 16826 - protein, 87 aa, Artificial Sequence
  Synthetic polypeptide
LLELRTHVQHHISTSPFGCVIEKPAIAPPVFVFQKDKGQKRSAGGSSPEGGEDSDREDGNYCPPVKRERTSSLTQFPPSQSGAFQAC

SEQ ID NO: 16827 - protein, 77 aa, Artificial Sequence
  Synthetic polypeptide
LLELRTHVQHHISTSPFGCVIEKPAIAPPVFVFQKDKGQKSPAEQKNLSDSGEEPRGEAEAPHHGTGHPESAGEHAL

SEQ ID NO: 16828 - protein, 122 aa, Artificial Sequence
  Synthetic polypeptide
LLELRTHVQHHISTSPFGCVIEKPAIAPPVFVFQKDKGQKSPAEQKNLSDSGEEPRGEAEAPHHGTGHPESAGEHALEPPAPAGASASTPPPPAPEAQLPPFPRELAGEEEKTLPLNPEGIP

SEQ ID NO: 16829 - protein, 132 aa, Artificial Sequence
  Synthetic polypeptide
LLELRTHVQHHISTSPFGCVIEKPAIAPPVFVFQKDKGQKSPAEQKNLSDSGEEPRGEAEAPHHGTGHPESAGEHALEPPAPAGASASTPPPPAPEAQLPPFPRELAGRSAGGSSPEGGEDSDREDGNYCPP

SEQ ID NO: 16830 - protein, 554 aa, Artificial Sequence
  Synthetic polypeptide
AQEVEAAVSHDHDTALQADNRGGLRNNNEKDMALTAFVLISLQEAKDICEEQVNSLPGSITKAGDFLEANYMNLQRSYTVAIAGYALAQMGRLKGPLLNKFLTTAKDKNRWEDPGKQLYNVEATSYALLALLQLKDFDFVPPVVRWLNEQRYYGGGYGSTQATFMVFQALAQYQKDAPDHQELNLDVSLQLPSRSSKITHRIHWESASLLRSEETKENEGFTVTAEGKGQGTLSVVTMYHAKAKDQLTCNKFDLKVTIKPAPETEKRPQDAKNTMILEICTRYRGDQDATMSILDISMMTGFAPDTDDLKQLANGVDRYISKYELDKAFSDRNTLIIYLDKVSHSEDDCLAFKVHQYFNVELIQPGAVKVYAYYNLEESCTRFYHPEKEDGKLNKLCRDELCRCAEENCFIQKSDDKVTLEERLDKACEPGVDYVYKTRLVKVQLSNDFDEYIMAIEQTIKSGSDEVQVGQQRTFISPIKCREALKLEEKKHYLMWGLSSDFWGEKPNLSYIIGKDTWVEHWPEEDECQDEENQKQCQDLGAFTESMVVFGCPN

SEQ ID NO: 16831 - protein, 63 aa, Artificial Sequence
  Synthetic polypeptide
AMIMTLHSRLITEVDYGTTTRKTWPSRPLFSSRCRRLKIFARSRSTACQAASLKQETSLKPTT

SEQ ID NO: 16832 - protein, 25 aa, Artificial Sequence
  Synthetic polypeptide
QRWITEQQRERHGPHGLCSHLAAGG

SEQ ID NO: 16833 - protein, 560 aa, Artificial Sequence
  Synthetic polypeptide
CHRSFTGKAEALLQQNGDFLVRASGSRGGNPVISCRWRGSALHFEVFRVALRPRPGRPTALFQLEDEQFPSIPALVHSYMTGRRPLSQATGAVVSRPVTWQGPLRRSFSEDTLMDGPARIEPLRARKWSNSQPADLAHMGRSREDPAGMEASTMPISALPRTSSDPVLLKAPAPLGTVADSLRASDGQLQAKAPTKPPRTPSFELPDASERPPTYCELVPRVPSVQGTSPSQSCPEPEAPWWEAEEDEEEENRCFTRPQAEISFCPHDAPSCLLGPQNRPLEPQVLHTLRGLFLEHHPGSTALHLLLVDCQATGLLGVTRDQRGNMGVSSGLELLTLPHGHHLRLELLERHQTLALAGALAVLGCSGPLEERAAALRGLVELALALRPGAAGDLPGLAAVMGALLMPQVSRLEHTWRQLRRSHTEAALAFEQELKPLMRALDEGAGPCDPGEVALPHVAPMVRLLEGEEVAGPLDESCERLLRTLHGARHMVRDAPKFRKVAAQRLRGFRPNPELREALTTGFVRRLLWGSRGAGAPRAERFEKFQRVLGVLSQRLEPDR

SEQ ID NO: 16834 - protein, 31 aa, Artificial Sequence
  Synthetic polypeptide
ATEVSLGRLKLFFSKMATSWFAPLGPVGATP

SEQ ID NO: 16835 - protein, 31 aa, Artificial Sequence; identical to SEQ ID NO: 16834
  Synthetic polypeptide

SEQ ID NO: 16836 - protein, 8 aa, Artificial Sequence
  Synthetic polypeptide
PQKFHWEG

SEQ ID NO: 16837 - protein, 8 aa, Artificial Sequence
  Synthetic polypeptide
PQKFHWEG

SEQ ID NO: 16838 - protein, 222 aa, Artificial Sequence
  Synthetic polypeptide
CHRSFTGKAEALLQQNGDFLVRASGSRGGNPVISCRWRGSALHFEVFRVALRPRPGRPTALFQLEDEQFPSIPALVHSYMTGRRPLSQATGAVVSRPVTWQGPLRRSFSEDTLMDGPARIEPLRARKWSNSQPADLAHMGRSREDPAGMESAPGTPSPAYPPWPVPGAPSWEHRPSPAIGRLPGHRPPGSDQRSAGQHGSLIWPGAAHSSPWTPLEVGTAGE

SEQ ID NO: 16839 - protein, 13 aa, Artificial Sequence
  Synthetic polypeptide
AMSCPRSCGHIHA

SEQ ID NO: 16840 - protein, 51 aa, Artificial Sequence
  Synthetic polypeptide
FQLLERPRWEDRLSPGVPVCSELCLAPEAAGTSTPEMRRSVLVRNPGHKGL

SEQ ID NO: 16841 - protein, 37 aa, Artificial Sequence
  Synthetic polypeptide
AREFQSAVSYVLPQKLRAHPRLKCGAQSWSGTQATKA

SEQ ID NO: 16842 - protein, 75 aa, Artificial Sequence
  Synthetic polypeptide
RGCGANGAARIRRLSPGRRGSARRWRRARRRRPCRPPPAPQPLTPRTSAPMSWSCWPSSKSRTGSWRPTPSPCAP

SEQ ID NO: 16843 - protein, 75 aa, Artificial Sequence; identical to SEQ ID NO: 16842
  Synthetic polypeptide

SEQ ID NO: 16844 - protein, 42 aa, Artificial Sequence
  Synthetic polypeptide
GAAGRTARLGSGGSARGGEARHGDGGALGAGGPVGPHLLPNL

SEQ ID NO: 16845 - protein, 42 aa, Artificial Sequence; identical to SEQ ID NO: 16844
  Synthetic polypeptide

SEQ ID NO: 16846 - protein, 802 aa, Artificial Sequence
  Synthetic polypeptide
DPAAQPGAARLGTEMAARSAQEALSAPTCSPTSDSENLSPDELELLAKLEEQNRLLEADSKSMRSMNGSRRNSGSSLVSSSSASSNLSHLEEDTWILWGRIANEWEEWRRRKEKLLKELIRKGIPHHFRAIVWQLLCSATDMPVKNQYSELLKMSSPCEKLIRRDIARTYPEHEFFKGQDSLGQEVLFNVMKAYSLVDREVGYCQGSAFIVGLLLMQMPEEEAFCVFVRLMQEYRLRELFKPSMAELGLCIYQFEYMLQEQLPDLNTHFRSQSFHTSMYASSWFLTLFLTTFPLPVATRVFDIFMYEGLEIVFRVGLALLQVNQAELMQLDMEGMSQYFQRVIPHQFDSCPDKLVLKAYQVKYNPKKMKRLEKEYAAMKSKEMEEQIEIKRLRTENRLLKQRIETLEKGQVTRAQEAEENYVIKRELAVVRQQCSSAAEDLQKAQSTIRQLQEQQENPRLTEDFVSHLETELEQSRLRETETLGALREMQDKVLDMEKRNSSLPDENNVAQLQEELKALKVREGQAVASTRELKLQLQELSDTWQAHLARGGRWKESPRKLVVGELQDELMSVRLREAQALAEGRELRQRVVELETQDHIHRNLLNRVEAERAALQEKLQYLAAQNKGLQTQLSESRRKQAEAECKSKEEVMAVRLREADSMAAVAEMRQRIAELEIQREEGRIQGQLNHSDSSQYIRELKDQIEELKAEVRLLKGPPPFEDPLAFDGLSLARHLDEDSLPSSDEELLGVGVGAALQDALYPLSPRDARFFRRLERPAKDSEGSSDSDADELAAPYSQGLDN

SEQ ID NO: 16847 - protein, 813 aa, Artificial Sequence
  Synthetic polypeptide
DPAAQPGAARLGTEMAARSAQEALSAPTCSPTSDSENLSPDELELLAKLEEQNRLLEADSKSMRSMNGSRRNSGSSLVSSSSASSNLSHLEEDTWILWGRIANEWEEWRRRKEKLLKELIRKGIPHHFRAIVWQLLCSATDMPVKNQYSELLKMSSPCEKLIRRDIARTYPEHEFFKGQDSLGQEVLFNVMKAYSLVDREVGYCQGSAFIVGLLLMQMPEEEAFCVFVRLMQEYRLRELFKPSMAELGLCIYQFEYMLQEQLPDLNTHFRSQSFHTSMYASSWFLTLFLTTFPLPVATRVFDIFMYEGLEIVFRVGLALLQVNQAELMQLDMEGMSQYFQRVIPHQFDSCPDKLVLKAYQVKYNPKKMKRLEKEYAAMKSKEMEEQIEIKRLRTENRLLKQRIETLEKESAALADRLIQGQVTRAQEAEENYVIKRELAVVRQQCSSAAEDLQKAQSTIRQLQEQQENPRLTEDFVSHLETELEQSRLRETETLGALREMQDKVLDMEKRNSSLPDENNVAQLQEELKALKVREGQAVASTRELKLQLQELSDTWQAHLARGGRWKESPRKLVVGELQDELMSVRLREAQALAEGRELRQRVVELETQDHIHRNLLNRVEAERAALQEKLQYLAAQNKGLQTQLSESRRKQAEAECKSKEEVMAVRLREADSMAAVAEMRQRIAELEIQREEGRIQGQLNHSDSSQYIRELKDQIEELKAEVRLLKGPPPFEDPLAFDGLSLARHLDEDSLPSSDEELLGVGVGAALQDALYPLSPRDARFFRRLERPAKDSEGSSDSDADELAAPYSQGLDN

SEQ ID NO: 16848 - protein, 28 aa, Artificial Sequence
  Synthetic polypeptide
GQEWWLTPVIPALWEAKNSASSQAPCGS

SEQ ID NO: 16849 - protein, 28 aa, Artificial Sequence
  Synthetic polypeptide
GQEWWLTPVIPALWEAKNSASSQAPCGS

SEQ ID NO: 16850 - protein, 28 aa, Artificial Sequence
  Synthetic polypeptide
GQEWWLTPVIPALWEAKNSASSQAPCGS

SEQ ID NO: 16851 - protein, 28 aa, Artificial Sequence
  Synthetic polypeptide
GQEWWLTPVIPALWEAKNSASSQAPCGS

SEQ ID NO: 16852 - protein, 87 aa, Artificial Sequence
  Synthetic polypeptide
SQHFGRPRTQPPPKLPVGPSHKLSNNYYCTRDGRRESVPPSIIMSSQKALVSGKPAESSAVAATEKKAVTPAPPIKRWELSSDQPYL

SEQ ID NO: 16853 - protein, 87 aa, Artificial Sequence; identical to SEQ ID NO: 16852
  Synthetic polypeptide

SEQ ID NO: 16854 - protein, 87 aa, Artificial Sequence; identical to SEQ ID NO: 16852
  Synthetic polypeptide

SEQ ID NO: 16855 - protein, 69 aa, Artificial Sequence
  Synthetic polypeptide
PGVVAHACNPSTLGGQELSLLPSSLWVLATSSPTITIALAMAAGNLCPLPSSCRRRRRWCQASQQRALL

SEQ ID NO: 16856 - protein, 69 aa, Artificial Sequence; identical to SEQ ID NO: 16855
  Synthetic polypeptide

SEQ ID NO: 16857 - protein, 69 aa, Artificial Sequence; identical to SEQ ID NO: 16855
  Synthetic polypeptide

SEQ ID NO: 16858 - protein, 19 aa, Artificial Sequence
  Synthetic polypeptide
SQHFGRPRTQPPPKLPVGP

SEQ ID NO: 16859 - protein, 28 aa, Artificial Sequence
  Synthetic polypeptide
PGVVAHACNPSTLGGQELSLLPSSLWVL

SEQ ID NO: 16860 - protein, 72 aa, Artificial Sequence
  Synthetic polypeptide
GQAQWVIPVIPALWEAEEGGSHEEAGGLAPAAIPTSTASTSAPSHSSGRSLRRESSGRPGGAATTRCRPPPC

SEQ ID NO: 16861 - protein, 72 aa, Artificial Sequence; identical to SEQ ID NO: 16860
  Synthetic polypeptide

SEQ ID NO: 16862 - protein, 72 aa, Artificial Sequence; identical to SEQ ID NO: 16860
  Synthetic polypeptide

SEQ ID NO: 16863 - protein, 72 aa, Artificial Sequence; identical to SEQ ID NO: 16860
  Synthetic polypeptide

SEQ ID NO: 16864 - protein, 41 aa, Artificial Sequence
  Synthetic polypeptide
SQHFGRLRRVDHMRRLVVWHLQPFQPQRPVLPLHPTAAAEA

SEQ ID NO: 16865 - protein, 41 aa, Artificial Sequence; identical to SEQ ID NO: 16864
  Synthetic polypeptide

SEQ ID NO: 16866 - protein, 41 aa, Artificial Sequence; identical to SEQ ID NO: 16864
  Synthetic polypeptide

SEQ ID NO: 16867 - protein, 41 aa, Artificial Sequence; identical to SEQ ID NO: 16864
  Synthetic polypeptide

SEQ ID NO: 16868 - protein, 21 aa, Artificial Sequence
  Synthetic polypeptide
EVPFTSCHDFEASPAMWNYAT

SEQ ID NO: 16869 - protein, 21 aa, Artificial Sequence
  Synthetic polypeptide
EVPFTSCHDFEASPAMWNYAT

SEQ ID NO: 16870 - protein, 21 aa, Artificial Sequence
  Synthetic polypeptide
EVPFTSCHDFEASPAMWNYAT

SEQ ID NO: 16871 - protein, 21 aa, Artificial Sequence
  Synthetic polypeptide
EVPFTSCHDFEASPAMWNYAT

SEQ ID NO: 16872 - protein, 21 aa, Artificial Sequence
  Synthetic polypeptide
EVPFTSCHDFEASPAMWNYAT

SEQ ID NO: 16873 - protein, 21 aa, Artificial Sequence
  Synthetic polypeptide
EVPFTSCHDFEASPAMWNYAT

SEQ ID NO: 16874 - protein, 303 aa, Artificial Sequence
  Synthetic polypeptide
LLSHFLLLPPCKKCLSPPAMILRPPQPCGTMRPKVMWHLLRRYMASRLHSLRMGGYLFSGSQAPQLSPALLRALGQKCPNLKRLCLHVADLSMVPITSLPSTLRTLELHSCEISMAWLHKQQDPTVLPLLECIVLDRVPAFRDEHLQGLTRFRALRSLVLGGTYRVTETGLDAGLQELSYLQRLEVLGCTLSADSTLLAISRHLRDVRKIRLTVRGLSAPGLAVLEGMPALESLCLQGPLVTPEMPSPTEILSSCLTMPKLRVLELQGLGWEGQEAEKILCKGLPHCMVIVRACPKESMDWWM

SEQ ID NO: 16875 - protein, 303 aa, Artificial Sequence; identical to SEQ ID NO: 16874
  Synthetic polypeptide

SEQ ID NO: 16876 - protein, 303 aa, Artificial Sequence; identical to SEQ ID NO: 16874
  Synthetic polypeptide

SEQ ID NO: 16877 - protein, 48 aa, Artificial Sequence
  Synthetic polypeptide
GLPSHVELCDLKSCGTSFEGTWHPGSIPCGWVATCSLAPRPPSCPLLC

SEQ ID NO: 16878 - protein, 48 aa, Artificial Sequence; identical to SEQ ID NO: 16877
  Synthetic polypeptide

SEQ ID NO: 16879 - protein, 48 aa, Artificial Sequence; identical to SEQ ID NO: 16877
  Synthetic polypeptide

SEQ ID NO: 16880 - protein, 48 aa, Artificial Sequence; identical to SEQ ID NO: 16877
  Synthetic polypeptide

SEQ ID NO: 16881 - protein, 48 aa, Artificial Sequence; identical to SEQ ID NO: 16877
  Synthetic polypeptide

SEQ ID NO: 16882 - protein, 33 aa, Artificial Sequence
  Synthetic polypeptide
LLSHFLLLPPCKKCLSPPAMILRPPQPCGTMRP

SEQ ID NO: 16883 - protein, 11 aa, Artificial Sequence
  Synthetic polypeptide
GLPSHVELCDL

SEQ ID NO: 16884 - protein, 118 aa, Artificial Sequence
  Synthetic polypeptide
LLSHFLLLPPCKKCLSPPAMILRPPQPCGTMRPKVMWHLLRRYMASRLHSLRMGGYLFSGSQAPQLSPALLRALGQKCPNLKRLCLHVADLSMVPITSLPSTLRTLELHSCEISMAWL

SEQ ID NO: 16885 - protein, 71 aa, Artificial Sequence
  Synthetic polypeptide
LLSHFLLLPPCKKCLSPPAMILRPPQPCGTMRPKVMWHLLRRYMASRLHSLRMGGYLFSGSQAPQLSPALL

SEQ ID NO: 16886 - protein, 30 aa, Artificial Sequence
  Synthetic polypeptide
TPKLSSRTQKRAGSCTPQPRPLTGNASARP

SEQ ID NO: 16887 - protein, 30 aa, Artificial Sequence; identical to SEQ ID NO: 16886
  Synthetic polypeptide

SEQ ID NO: 16888 - protein, 71 aa, Artificial Sequence
  Synthetic polypeptide
ACQNASWNRTRIFHLPPLWPPPIITCLDLCSHPCPGLPPSFPRAARGHCEHPNSLPEPRRGLAAVHLSPGP

SEQ ID NO: 16889 - protein, 71 aa, Artificial Sequence; identical to SEQ ID NO: 16888
  Synthetic polypeptide

SEQ ID NO: 16890 - protein, 485 aa, Artificial Sequence
  Synthetic polypeptide
PVRMHPGIGPESSIYRLYGHHPSSPVWICAVTPALASLPRSLEQPEVTVNTQTLFQNPEEGWQLYTSAQAPDGKCICTAVIPAQSTCSRDGRSRELRQLMEKVQNVSQSMEVLELRTYRDLQYVRGMETLMRSLDARLRAADGSLSAKSFQELKDRMTELLPLSSVLEQYKADTRTIVRLREEVRNLSGSLAAIQEEMGAYGYEDLQQRVMALEARLHACAQKLGCGKLTGVSNPITVRAMGSRFGSWMTDTMAPSADSRVWYMDGYYKGRRVLEFRTLGDFIKGQNFIQHLLPQPWAGTGHVVYNGSLFYNKYQSNVVVKYHFRSRSVLVQRSLPGAGYNNTFPYSWGGFSDMDFMVDESGLWAVYTTNQNAGNIVVSRLDPHTLEVMRSWDTGYPKRSAGEAFMICGVLYVTNSHLAGAKVYFAYFTNTSSYEYTDVPFHNQYSHISMLDYNPRERALYTWNNGHQVLYNVTLFHVISTSGDP

SEQ ID NO: 16891 - protein, 342 aa, Artificial Sequence
  Synthetic polypeptide
PVRMHPGIGPESSIYRLYGHHPSSPVWICAVTPALASLPRSLEQPEVTVNTQTLFQNPEEGWQLYTSAQAPDGKCICTAVIPAQSTCSRDGRSRELRQLMEKVQNVSQSMEVLELRTYRDLQYVRGMETLMRSLDARLRAADGSLSAKSFQELKDRMTELLPLSSVLEQYKADTRTIVRLREEVRNLSGSLAAIQEEMGAYGYEDLQQRVMALEARLHACAQKLGCGKLTGVSNPITVRAMGSRFGSWMTDTMAPSADSRVWYMDGYYKGRRVLEFRTLGDFIKGQNFIQHLLPQPWAGTGHVVYNGSLFYNKYQSNVVVKYHFRSRSVLVQRSLPGAGYNN

SEQ ID NO: 16892 - protein, 369 aa, Artificial Sequence
  Synthetic polypeptide
LRGRVSEWLRCDNMHHQWLLLAACFWVIFMFMVASKFITLTFKDPDVYSAKQEFLFLTTMPEVRKLPEEKHIPEELKPTGKELPDSQLVQPLVYMERLELIRNVCRDDALKNLSHTPVSKFVLDRIFVCDKHKILFCQTPKVGNTQWKKVLIVLNGAFSSIEEIPENVVHDHEKNGLPRLSSFSDAEIQKRLKTYFKFFIVRDPFERLISAFKDKFVHNPRFEPWYRHEIAPGIIRKYRRNRTETRGIQFEDFVRYLGDPNHRWLDLQFGDHIIHWVTYVELCAPCEIMYSVIGHHETLEDDAPYILKEAGIDHLVSYPTIPPGITVYNRTKVEHYFLGISKRDIRRLYARFEGDFKLFGYQKPDFLLN

SEQ ID NO: 16893 - protein, 44 aa, Artificial Sequence
  Synthetic polypeptide
MAGGELPTAGCIQVWPDNYVEESVNGCGVTTCTTSGFCWPHAFG

SEQ ID NO: 16894 - protein, 44 aa, Artificial Sequence; identical to SEQ ID NO: 16893
  Synthetic polypeptide

SEQ ID NO: 16895 - protein, 23 aa, Artificial Sequence
  Synthetic polypeptide
WQVVSSPLQAVFRCGRITTWKSQ

SEQ ID NO: 16896 - protein, 23 aa, Artificial Sequence
  Synthetic polypeptide
WQVVSSPLQAVFRCGRITTWKSQ

SEQ ID NO: 16897 - protein, 107 aa, Artificial Sequence
  Synthetic polypeptide
LRGRVSEWLRCDNMHHQWLLLAACFWVIFMFMVASKFITLTFKDPDVYSAKQEFLFLTTMPEVRKLPEEKHIPEELKPTGKELPDSQLVQPLVYMERLELIRNVCRD

SEQ ID NO: 16898 - protein, 375 aa, Artificial Sequence
  Synthetic polypeptide
APHCRLYSGRVSEWLRCDNMHHQWLLLAACFWVIFMFMVASKFITLTFKDPDVYSAKQEFLFLTTMPEVRKLPEEKHIPEELKPTGKELPDSQLVQPLVYMERLELIRNVCRDDALKNLSHTPVSKFVLDRIFVCDKHKILFCQTPKVGNTQWKKVLIVLNGAFSSIEEIPENVVHDHEKNGLPRLSSFSDAEIQKRLKTYFKFFIVRDPFERLISAFKDKFVHNPRFEPWYRHEIAPGIIRKYRRNRTETRGIQFEDFVRYLGDPNHRWLDLQFGDHIIHWVTYVELCAPCEIMYSVIGHHETLEDDAPYILKEAGIDHLVSYPTIPPGITVYNRTKVEHYFLGISKRDIRRLYARFEGDFKLFGYQKPDFLLN

SEQ ID NO: 16899 - protein, 37 aa, Artificial Sequence
  Synthetic polypeptide
MAGGELPTAGCIQEESVNGCGVTTCTTSGFCWPHAFG

SEQ ID NO: 16900 - protein, 37 aa, Artificial Sequence; identical to SEQ ID NO: 16899
  Synthetic polypeptide

SEQ ID NO: 16901 - protein, 16 aa, Artificial Sequence
  Synthetic polypeptide
WQVVSSPLQAVFRKSQ

SEQ ID NO: 16902 - protein, 16 aa, Artificial Sequence
  Synthetic polypeptide
WQVVSSPLQAVFRKSQ

SEQ ID NO: 16903 - protein, 113 aa, Artificial Sequence
  Synthetic polypeptide
APHCRLYSGRVSEWLRCDNMHHQWLLLAACFWVIFMFMVASKFITLTFKDPDVYSAKQEFLFLTTMPEVRKLPEEKHIPEELKPTGKELPDSQLVQPLVYMERLELIRNVCRD

SEQ ID NO: 16904 - protein, 12 aa, Artificial Sequence
  Synthetic polypeptide
RRCSRRSEGKTA

SEQ ID NO: 16905 - protein, 12 aa, Artificial Sequence
  Synthetic polypeptide
RRCSRRSEGKTA

SEQ ID NO: 16906 - protein, 19 aa, Artificial Sequence
  Synthetic polypeptide
AKGDAAGDQREKLHRKSNG

SEQ ID NO: 16907 - protein, 19 aa, Artificial Sequence
  Synthetic polypeptide
AKGDAAGDQREKLHRKSNG

SEQ ID NO: 16908 - protein, 159 aa, Artificial Sequence
  Synthetic polypeptide
LKEMQQEIRGKNCIENLMDEDEKDRAKRASRNKSEKKRRDQFNVLIKELSSMLPGNTRKMDKTTVLEKVIGFLQKHNEVSAQTEICDIQQDWKPSFLSNEEFTQLMLEALDGFIIAVTTDGSIIYVSDSITPLLGHLPSDVMDQNLLNFLPEQEHSEVY

SEQ ID NO: 16909 - protein, 841 aa, Artificial Sequence
  Synthetic polypeptide
LKEMQQEIRGKNCIENLMDEDEKDRAKRASRNKSEKKRRDQFNVLIKELSSMLPGNTRKMDKTTVLEKVIGFLQKHNEVSAQTEICDIQQDWKPSFLSNEEFTQLMLEALDGFIIAVTTDGSIIYVSDSITPLLGHLPSDVMDQNLLNFLPEQEHSEVYKILSSHMLVTDSPSPEYLKSDSDLEFYCHLLRGSLNPKEFPTYEYIKFVGNFRSYNNVPSPSCNGFDNTLSRPCRVPLGKEVCFIATVRLATPQFLKEMCIVDEPLEEFTSRHSLEWKFLFLDHRAPPIIGYLPFEVLGTSGYDYYHIDDLELLARCHQHLMQFGKGKSCCYRFLTKGQQWIWLQTHYYITYHQWNSKPEFIVCTHSVVSYADVRVERRQELALEDPPSEALHSSALKDKGSSLEPRQHFNTLDVGASGLNTSHSPSASSRSSHKSSHTAMSEPTSTPTKLMAEASTPALPRSATLPQELPVPGLSQAATMPAPLPSPSSCDLTQQLLPQTVLQSTPAPMAQFSAQFSMFQTIKDQLEQRTRILQANIRWQQEELHKIQEQLCLVQDSNVQMFLQQPAVSLSFSSTQRPEAQQQLQQRSAAVTQPQLGAGPQLPGQISSAQVTSQHLLRESSVISTQGPKPMRSSQLMQSSGRSGSSLVSPFSSATAALPPSLNLTTPASTSQDASQCQPSPDFSHDRQLRLLLSQPIQPMMPGSCDARQPSEVSRTGRQVKYAQSQTVFQNPDAHPANSSSAPMPVLLMGQAVLHPSFPASQPSPLQPAQARQQPPQHYLQVQAPTSLHSEQQDSLLLSTYSQQPGTLGYPQPPPAQPQPLRPPRRVSSLSESSGLQQPPR

SEQ ID NO: 16910 - protein, 626 aa, Artificial Sequence
  Synthetic polypeptide
NVPSPSCNGFDNTLSRPCRVPLGKEVCFIATVRLATPQFLKEMCIVDEPLEEFTSRHSLEWKFLFLDHRAPPIIGYLPFEVLGTSGYDYYHIDDLELLARCHQHLMQFGKGKSCCYRFLTKGQQWIWLQTHYYITYHQWNSKPEFIVCTHSVVSYADVRVERRQELALEDPPSEALHSSALKDKGSSLEPRQHFNTLDVGASGLNTSHSPSASSRSSHKSSHTAMSEPTSTPTKLMAEASTPALPRSATLPQELPVPGLSQAATMPAPLPSPSSCDLTQQLLPQTVLQSTPAPMAQFSAQFSMFQTIKDQLEQRTRILQANIRWQQEELHKIQEQLCLVQDSNVQMFLQQPAVSLSFSSTQRPEAQQQLQQRSAAVTQPQLGAGPQLPGQISSAQVTSQHLLRESSVISTQGPKPMRSSQLMQSSGRSGSSLVSPFSSATAALPPSLNLTTPASTSQDASQCQPSPDFSHDRQLRLLLSQPIQPMMPGSCDARQPSEVSRTGRQVKYAQSQTVFQNPDAHPANSSSAPMPVLLMGQAVLHPSFPASQPSPLQPAQARQQPPQHYLQVQAPTSLHSEQQDSLLLSTYSQQPGTLGYPQPPPAQPQPLRPPRRVSSLSESSGLQQPPR

SEQ ID NO: 16911 - protein, 626 aa, Artificial Sequence; identical to SEQ ID NO: 16910
  Synthetic polypeptide

SEQ ID NO: 16912 - protein, 33 aa, Artificial Sequence
  Synthetic polypeptide
GTIAKFIETESRMCLAPPVMVLTTPFQDLAGCH

SEQ ID NO: 16913 - protein, 33 aa, Artificial Sequence; identical to SEQ ID NO: 16912
  Synthetic polypeptide

SEQ ID NO: 16914 - protein, 7 aa, Artificial Sequence
  Synthetic polypeptide
KQKVECA

SEQ ID NO: 16915 - protein, 7 aa, Artificial Sequence
  Synthetic polypeptide
KQKVECA

SEQ ID NO: 16916 - protein, 5 aa, Artificial Sequence
  Synthetic polypeptide
RIMSP

SEQ ID NO: 16917 - protein, 5 aa, Artificial Sequence
  Synthetic polypeptide
RIMSP

SEQ ID NO: 16918 - protein, 552 aa, Artificial Sequence
  Synthetic polypeptide
DHESMNILTSVLLLYTKEEEAFWLLVAVCERMLPDYFNHRVIGAQVDQSVFEELIKGHLPELAEHMNDLSALASVSLSWFLTLFLSIMPLESAVNVVDCFFYDGIKAIFQLGLAVLEANAEDLCSSKDDGQALMILSRFLDHIKNEDSPGPPVGSHHAFFSDDQEPYPVTDISDLIRDSYEKFGDQSVEQIEHLRYKHRIRVLQGHEDTTKQNVLRVVIPEVSILPEDLEELYDLFKREHMMSCYWEQPRPMASRHDPSRPYAEQYRIDARQFAHLFQLVSPWTCGAHTEILAERTFRLLDDNMDQLIEFKAFVSCLDIMYNGEMNEKIKLLYRLHIPPALTENDRDSQSPLRNPLLSTSRPLVFGKPNGDAVDYQKQLKQMIKDLAKEKDKTEKELPKMSQREFIQFCKTLYSMFHEDPEENDLYQAIATVTTLLLQIGEVGQRGSSSGSCSQECGEELRASAPSPEDSVFADTGKTPQDSQAFPEAAERDWTVSLEHILASLLTEQSLVNFFEKPLDMKSKLENAKINQYNLKTFEMSHQSQSELKLSNL

SEQ ID NO: 16919 - protein, 552 aa, Artificial Sequence; identical to SEQ ID NO: 16918
  Synthetic polypeptide

SEQ ID NO: 16920 - protein, 15 aa, Artificial Sequence
  Synthetic polypeptide
CLLRFFKATKERAGS

SEQ ID NO: 16921 - protein, 15 aa, Artificial Sequence
  Synthetic polypeptide
CLLRFFKATKERAGS

SEQ ID NO: 16922 - protein, 15 aa, Artificial Sequence
  Synthetic polypeptide
CLLRFFKATKERAGS

SEQ ID NO: 16923 - protein, 15 aa, Artificial Sequence
  Synthetic polypeptide
CLLRFFKATKERAGS

SEQ ID NO: 16924 - protein, 15 aa, Artificial Sequence
  Synthetic polypeptide
CLLRFFKATKERAGS

SEQ ID NO: 16925 - protein, 15 aa, Artificial Sequence
  Synthetic polypeptide
CLLRFFKATKERAGS

SEQ ID NO: 16926 - protein, 15 aa, Artificial Sequence
  Synthetic polypeptide
CLLRFFKATKERAGS

SEQ ID NO: 16927 - protein, 15 aa, Artificial Sequence
  Synthetic polypeptide
CLLRFFKATKERAGS

SEQ ID NO: 16928 - protein, 15 aa, Artificial Sequence
  Synthetic polypeptide
CLLRFFKATKERAGS

SEQ ID NO: 16929 - protein, 15 aa, Artificial Sequence
  Synthetic polypeptide
CLLRFFKATKERAGS

SEQ ID NO: 16930 - protein, 15 aa, Artificial Sequence
  Synthetic polypeptide
CLLRFFKATKERAGS

SEQ ID NO: 16931 - protein, 868 aa, Artificial Sequence
  Synthetic polypeptide
VFYVFLKQQRREREARRQQEREQRRREQEEKRRLEELERRRKEEEERRRAEEEKRRVEREQEYIRRQLEEEQRHLEVLQQQLLQEQAMLLHDHRRPHPQHSQQPPPPQQERSKPSFHAPEPKAHYEPADRAREVEDRFRKTNHSSPEAQSKQTGRVLEPPVPSRSESFSNGNSESVHPALQRPAEPQVPVRTTSRSPVLSRRDSPLQGSGQQNSQAGQRNSTSIEPRLLWERVEKLVPRPGSGSSSGSSNSGSQPGSHPGSQSGSGERFRVRSSSKSEGSPSQRLENAVKKPEDKKEVFRPLKPADLTALAKELRAVEDVRPPHKVTDYSSSSEESGTTDEEDDDVEQEGADESTSGPEDTRAASSLNLSNGETESVKTMIVHDDVESEPAMTPSKEGTLIVRQSTVDQKRASHHESNGFAGRIHLLPDLLQQSHSSSTSSTSSSPSSSQPTPTMSPQTPQDKLTANETQSASSTLQKHKSSSSFTPFIDPRLLQISPSSGTTVTSVVGFSCDGMRPEAIRQDPTRKGSVVNVNPTNTRPQSDTPEIRKYKKRFNSEILCAALWGVNLLVGTESGLMLLDRSGQGKVYPLINRRRFQQMDVLEGLNVLVTISGKKDKLRVYYLSWLRNKILHNDPEVEKKQGWTTVGDLEGCVHYKVVKYERIKFLVIALKSSVEVYAWAPKPYHKFMAFKSFGELVHKPLLVDLTVEEGQRLKVIYGSCAGFHAVDVDSGSVYDIYLPTHIQCSIKPHAIIILPNTDGMELLVCYEDEGVYVNTYGRITKDVVLQWGEMPTSVAYIRSNQTMGWGEKAIEIRSVETGHLDGVFMHKRAQRLKFLCERNDKVFFASVRSGGSSQVYFMTLGRTSLLSW

SEQ ID NO: 16932 - protein, 785 aa, Artificial Sequence
  Synthetic polypeptide
VFYVFLKQQRREREARRQQEREQRRREQEEKRRLEELERRRKEEEERRRAEEEKRRVEREQEYIRRQLEEEQRHLEVLQQQLLQEQAMLLECRWREMEEHRQAERLQRQLQQEQAYLLSLQHDHRRPHPQHSQQPPPPQQERSKPSFHAPEPKAHYEPADRAREVPVRTTSRSPVLSRRDSPLQGSGQQNSQAGQRNSTSSIEPRLLWERVEKLVPRPGSGSSSGSSNSGSQPGSHPGSQSGSGERFRVRSSSKSEGSPSQRLENAVKKPEDKKEVFRPLKPAVRIDLTALAKELRAVEDVRPPHKVTDYSSSSEESGTTDEEDDDVEQEGADESTSGPEDTRAASSLNLSNGETESVKTMIVHDDVESEPAMTPSKEGTLIVRQTQSASSTLQKHKSSSSFTPFIDPRLLQISPSSGTTVTSVVGFSCDGMRPEAIRQDPTRKGSVVNVNPTNTRPQSDTPEIRKYKKRFNSEILCAALWGVNLLVGTESGLMLLDRSGQGKVYPLINRRRFQQMDVLEGLNVLVTISGKKDKLRVYYLSWLRNKILHNDPEVEKKQGWTTVGDLEGCVHYKVVKYERIKFLVIALKSSVEVYAWAPKPYHKFMAFKSFGELVHKPLLVDLTVEEGQRLKVIYGSCAGFHAVDVDSGSVYDIYLPTHIQCSIKPHAIIILPNTDGMELLVCYEDEGVYVNTYGRITKDVVLQWGEMPTSVAYIRSNQTMGWGEKAIEIRSVETGHLDGVFMHKRAQRLKFLCERNDKVFFASVRSGGSSQVYFMTLGRTSLLSW

SEQ ID NO: 16933 - protein, 916 aa, Artificial Sequence
  Synthetic polypeptide
VFYVFLKQQRREREARRQQEREQRRREQEEKRRLEELERRRKEEEERRRAEEEKRRVEREQEYIRRQLEEEQRHLEVLQQQLLQEQAMLLECRWREMEEHRQAERLQRQLQQEQAYLLSLQHDHRRPHPQHSQQPPPPQQERSKPSFHAPEPKAHYEPADRAREVEDRFRKTNHSSPEAQSKQTGRVLEPPVPSRSESFSNGNSESVHPALQRPAEPQVQWSHLASLKNNVSPVSRSHSFSDPSPKFAHHHLRSQDPCPPSRSEVLSQSSDSKSEAPDPTQKAWSRSDSDEVPPRVPVRTTSRSPVLSRRDSPLQGSGQQNSQAGQRNSTSSIEPRLLWERVEKLVPRPGSGSSSGSSNSGSQPGSHPGSQSGSGERFRVRSSSKSEGSPSQRLENAVKKPEDKKEVFRPLKPAVRIDLTALAKELRAVEDVRPPHKVTDYSSSSEESGTTDEEDDDVEQEGADESTSGPEDTRAASSLNLSNGETESVKTMIVHDDVESEPAMTPSKEGTLIVRQTQSASSTLQKHKSSSSFTPFIDPRLLQISPSSGTTVTSVVGFSCDGMRPEAIRQDPTRKGSVVNVNPTNTRPQSDTPEIRKYKKRFNSEILCAALWGVNLLVGTESGLMLLDRSGQGKVYPLINRRRFQQMDVLEGLNVLVTISGKKDKLRVYYLSWLRNKILHNDPEVEKKQGWTTVGDLEGCVHYKVVKYERIKFLVIALKSSVEVYAWAPKPYHKFMAFKSFGELVHKPLLVDLTVEEGQRLKVIYGSCAGFHAVDVDSGSVYDIYLPTHIQCSIKPHAIIILPNTDGMELLVCYEDEGVYVNTYGRITKDVVLQWGEMPTSVAYIRSNQTMGWGEKAIEIRSVETGHLDGVFMHKRAQRLKFLCERNDKVFFASVRSGGSSQVYFMTLGRTSLLSW

SEQ ID NO: 16934 - protein, 762 aa, Artificial Sequence
  Synthetic polypeptide
VFYVFLKQQRREREARRQQEREQRRREQEEKRRLEELERRRKEEEERRRAEEEKRRVEREQEYIRRQLEEEQRHLEVLQQQLLQEQAMLLHDHRRPHPQHSQQPPPPQQERSKPSFHAPEPKAHYEPADRAREVPVRTTSRSPVLSRRDSPLQGSGQQNSQAGQRNSTSSIEPRLLWERVEKLVPRPGSGSSSGSSNSGSQPGSHPGSQSGSGERFRVRSSSKSEGSPSQRLENAVKKPEDKKEVFRPLKPAVRIDLTALAKELRAVEDVRPPHKVTDYSSSSEESGTTDEEDDDVEQEGADESTSGPEDTRAASSLNLSNGETESVKTMIVHDDVESEPAMTPSKEGTLIVRQTQSASSTLQKHKSSSSFTPFIDPRLLQISPSSGTTVTSVVGFSCDGMRPEAIRQDPTRKGSVVNVNPTNTRPQSDTPEIRKYKKRFNSEILCAALWGVNLLVGTESGLMLLDRSGQGKVYPLINRRRFQQMDVLEGLNVLVTISGKKDKLRVYYLSWLRNKILHNDPEVEKKQGWTTVGDLEGCVHYKVVKYERIKFLVIALKSSVEVYAWAPKPYHKFMAFKSFGELVHKPLLVDLTVEEGQRLKVIYGSCAGFHAVDVDSGSVYDIYLPTHVRKNPHSMIQCSIKPHAIIILPNTDGMELLVCYEDEGVYVNTYGRITKDVVLQWGEMPTSVAYIRSNQTMGWGEKAIEIRSVETGHLDGVFMHKRAQRLKFLCERNDKVFFASVRSGGSSQVYFMTLGRTSLLSW

SEQ ID NO: 16935 - protein, 750 aa, Artificial Sequence
  Synthetic polypeptide
VFYVFLKQQRREREARRQQEREQRRREQEEKRRLEELERRRKEEEERRRAEEEKRRVEREQEYIRRQLEEEQRHLEVLQQQLLQEQAMLLHDHRRPHPQHSQQPPPPQQERSKPSFHAPEPKAHYEPADRAREVPVRTTSRSPVLSRRDSPLQGSGQQNSQAGQRNSTSIEPRLLWERVEKLVPRPGSGSSSGSSNSGSQPGSHPGSQSGSGERFRVRSSSKSEGSPSQRLENAVKKPEDKKEVFRPLKPADLTALAKELRAVEDVRPPHKVTDYSSSSEESGTTDEEDDDVEQEGADESTSGPEDTRAASSLNLSNGETESVKTMIVHDDVESEPAMTPSKEGTLIVRQTQSASSTLQKHKSSSSFTPFIDPRLLQISPSSGTTVTSVVGFSCDGMRPEAIRQDPTRKGSVVNVNPTNTRPQSDTPEIRKYKKRFNSEILCAALWGVNLLVGTESGLMLLDRSGQGKVYPLINRRRFQQMDVLEGLNVLVTISGKKDKLRVYYLSWLRNKILHNDPEVEKKQGWTTVGDLEGCVHYKVVKYERIKFLVIALKSSVEVYAWAPKPYHKFMAFKSFGELVHKPLLVDLTVEEGQRLKVIYGSCAGFHAVDVDSGSVYDIYLPTHIQCSIKPHAIIILPNTDGMELLVCYEDEGVYVNTYGRITKDVVLQWGEMPTSVAYIRSNQTMGWGEKAIEIRSVETGHLDGVFMHKRAQRLKFLCERNDKVFFASVRSGGSSQVYFMTLGRTSLLSW

SEQ ID NO: 16936 - protein, 835 aa, Artificial Sequence
  Synthetic polypeptide
VFYVFLKQQRREREARRQQEREQRRREQEEKRRLEELERRRKEEEERRRAEEEKRRVEREQEYIRRQLEEEQRHLEVLQQQLLQEQAMLLECRWREMEEHRQAERLQRQLQQEQAYLLSLQHDHRRPHPQHSQQPPPPQQERSKPSFHAPEPKAHYEPADRAREVEDRFRKTNHSSPEAQSKQTGRVLEPPVPSRSESFSNGNSESVHPALQRPAEPQVPVRTTSRSPVLSRRDSPLQGSGQQNSQAGQRNSTSIEPRLLWERVEKLVPRPGSGSSSGSSNSGSQPGSHPGSQSGSGERFRVRSSSKSEGSPSQRLENAVKKPEDKKEVFRPLKPADLTALAKELRAVEDVRPPHKVTDYSSSSEESGTTDEEDDDVEQEGADESTSGPEDTRAASSLNLSNGETESVKTMIVHDDVESEPAMTPSKEGTLIVRQTQSASSTLQKHKSSSSFTPFIDPRLLQISPSSGTTVTSVVGFSCDGMRPEAIRQDPTRKGSVVNVNPTNTRPQSDTPEIRKYKKRFNSEILCAALWGVNLLVGTESGLMLLDRSGQGKVYPLINRRRFQQMDVLEGLNVLVTISGKKDKLRVYYLSWLRNKILHNDPEVEKKQGWTTVGDLEGCVHYKVVKYERIKFLVIALKSSVEVYAWAPKPYHKFMAFKSFGELVHKPLLVDLTVEEGQRLKVIYGSCAGFHAVDVDSGSVYDIYLPTHIQCSIKPHAIIILPNTDGMELLVCYEDEGVYVNTYGRITKDVVLQWGEMPTSVAYIRSNQTMGWGEKAIEIRSVETGHLDGVFMHKRAQRLKFLCERNDKVFFASVRSGGSSQVYFMTLGRTSLLSW

SEQ ID NO: 16937 - protein, 781 aa, Artificial Sequence
  Synthetic polypeptide
VFYVFLKQQRREREARRQQEREQRRREQEEKRRLEELERRRKEEEERRRAEEEKRRVEREQEYIRRQLEEEQRHLEVLQQQLLQEQAMLLECRWREMEEHRQAERLQRQLQQEQAYLLSLQHDHRRPHPQHSQQPPPPQQERSKPSFHAPEPKAHYEPADRAREVPVRTTSRSPVLSRRDSPLQGSGQQNSQAGQRNSTSIEPRLLWERVEKLVPRPGSGSSSGSSNSGSQPGSHPGSQSGSGERFRVRSSSKSEGSPSQRLENAVKKPEDKKEVFRPLKPADLTALAKELRAVEDVRPPHKVTDYSSSSEESGTTDEEDDDVEQEGADESTSGPEDTRAASSLNLSNGETESVKTMIVHDDVESEPAMTPSKEGTLIVRQTQSASSTLQKHKSSSSFTPFIDPRLLQISPSSGTTVTSVVGFSCDGMRPEAIRQDPTRKGSVVNVNPTNTRPQSDTPEIRKYKKRFNSEILCAALWGVNLLVGTESGLMLLDRSGQGKVYPLINRRRFQQMDVLEGLNVLVTISGKKDKLRVYYLSWLRNKILHNDPEVEKKQGWTTVGDLEGCVHYKVVKYERIKFLVIALKSSVEVYAWAPKPYHKFMAFKSFGELVHKPLLVDLTVEEGQRLKVIYGSCAGFHAVDVDSGSVYDIYLPTHIQCSIKPHAIIILPNTDGMELLVCYEDEGVYVNTYGRITKDVVLQWGEMPTSVAYIRSNQTMGWGEKAIEIRSVETGHLDGVFMHKRAQRLKFLCERNDKVFFASVRSGGSSQVYFMTLGRTSLLSW

SEQ ID NO: 16938 - protein, 804 aa, Artificial Sequence
  Synthetic polypeptide
VFYVFLKQQRREREARRQQEREQRRREQEEKRRLEELERRRKEEEERRRAEEEKRRVEREQEYIRRQLEEEQRHLEVLQQQLLQEQAMLLHDHRRPHPQHSQQPPPPQQERSKPSFHAPEPKAHYEPADRAREVEDRFRKTNHSSPEAQSKQTGRVLEPPVPSRSESFSNGNSESVHPALQRPAEPQVPVRTTSRSPVLSRRDSPLQGSGQQNSQAGQRNSTSIEPRLLWERVEKLVPRPGSGSSSGSSNSGSQPGSHPGSQSGSGERFRVRSSSKSEGSPSQRLENAVKKPEDKKEVFRPLKPADLTALAKELRAVEDVRPPHKVTDYSSSSEESGTTDEEDDDVEQEGADESTSGPEDTRAASSLNLSNGETESVKTMIVHDDVESEPAMTPSKEGTLIVRQTQSASSTLQKHKSSSSFTPFIDPRLLQISPSSGTTVTSVVGFSCDGMRPEAIRQDPTRKGSVVNVNPTNTRPQSDTPEIRKYKKRFNSEILCAALWGVNLLVGTESGLMLLDRSGQGKVYPLINRRRFQQMDVLEGLNVLVTISGKKDKLRVYYLSWLRNKILHNDPEVEKKQGWTTVGDLEGCVHYKVVKYERIKFLVIALKSSVEVYAWAPKPYHKFMAFKSFGELVHKPLLVDLTVEEGQRLKVIYGSCAGFHAVDVDSGSVYDIYLPTHIQCSIKPHAIIILPNTDGMELLVCYEDEGVYVNTYGRITKDVVLQWGEMPTSVAYIRSNQTMGWGEKAIEIRSVETGHLDGVFMHKRAQRLKFLCERNDKVFFASVRSGGSSQVYFMTLGRTSLLSW

SEQ ID NO: 16939 - protein, 895 aa, Artificial Sequence
  Synthetic polypeptide
VFYVFLKQQRREREARRQQEREQRRREQEEKRRLEELERRRKEEEERRRAEEEKRRVEREQEYIRRQLEEEQRHLEVLQQQLLQEQAMLLHDHRRPHPQHSQQPPPPQQERSKPSFHAPEPKAHYEPADRAREVQWSHLASLKNNVSPVSRSHSFSDPSPKFAHHHLRSQDPCPPSRSEVLSQSSDSKSEAPDPTQKAWSRSDSDEVPPRVPVRTTSRSPVLSRRDSPLQGSGQQNSQAGQRNSTSSIEPRLLWERVEKLVPRPGSGSSSGSSNSGSQPGSHPGSQSGSGERFRVRSSSKSEGSPSQRLENAVKKPEDKKEVFRPLKPAVRIDLTALAKELRAVEDVRPPHKVTDYSSSSEESGTTDEEDDDVEQEGADESTSGPEDTRAASSLNLSNGETESVKTMIVHDDVESEPAMTPSKEGTLIVRQSTVDQKRASHHESNGFAGRIHLLPDLLQQSHSSSTSSTSSSPSSSQPTPTMSPQTPQDKLTANETQSASSTLQKHKSSSSFTPFIDPRLLQISPSSGTTVTSVVGFSCDGMRPEAIRQDPTRKGSVVNVNPTNTRPQSDTPEIRKYKKRFNSEILCAALWGVNLLVGTESGLMLLDRSGQGKVYPLINRRRFQQMDVLEGLNVLVTISGKKDKLRVYYLSWLRNKILHNDPEVEKKQGWTTVGDLEGCVHYKVVKYERIKFLVIALKSSVEVYAWAPKPYHKFMAFKSFGELVHKPLLVDLTVEEGQRLKVIYGSCAGFHAVDVDSGSVYDIYLPTHIQCSIKPHAIIILPNTDGMELLVCYEDEGVYVNTYGRITKDVVLQWGEMPTSVAYIRSNQTMGWGEKAIEIRSVETGHLDGVFMHKRAQRLKFLCERNDKVFFASVRSGGSSQVYFMTLGRTSLLSW

SEQ ID NO: 16940 - protein, 912 aa, Artificial Sequence
  Synthetic polypeptide
VFYVFLKQQRREREARRQQEREQRRREQEEKRRLEELERRRKEEEERRRAEEEKRRVEREQEYIRRQLEEEQRHLEVLQQQLLQEQAMLLECRWREMEEHRQAERLQRQLQQEQAYLLSLQHDHRRPHPQHSQQPPPPQQERSKPSFHAPEPKAHYEPADRAREVEDRFRKTNHSSPEAQSKQTGRVLEPPVPSRSESFSNGNSESVHPALQRPAEPQVQWSHLASLKNNVSPVSRSHSFSDPSPKFAHHHLRSQDPCPPSRSEVLSQSSDSKSEAPDPTQKAWSRSDSDEVPPRVPVRTTSRSPVLSRRDSPLQGSGQQNSQAGQRNSTSIEPRLLWERVEKLVPRPGSGSSSGSSNSGSQPGSHPGSQSGSGERFRVRSSSKSEGSPSQRLENAVKKPEDKKEVFRPLKPADLTALAKELRAVEDVRPPHKVTDYSSSSEESGTTDEEDDDVEQEGADESTSGPEDTRAASSLNLSNGETESVKTMIVHDDVESEPAMTPSKEGTLIVRQTQSASSTLQKHKSSSSFTPFIDPRLLQISPSSGTTVTSVVGFSCDGMRPEAIRQDPTRKGSVVNVNPTNTRPQSDTPEIRKYKKRFNSEILCAALWGVNLLVGTESGLMLLDRSGQGKVYPLINRRRFQQMDVLEGLNVLVTISGKKDKLRVYYLSWLRNKILHNDPEVEKKQGWTTVGDLEGCVHYKVVKYERIKFLVIALKSSVEVYAWAPKPYHKFMAFKSFGELVHKPLLVDLTVEEGQRLKVIYGSCAGFHAVDVDSGSVYDIYLPTHIQCSIKPHAIIILPNTDGMELLVCYEDEGVYVNTYGRITKDVVLQWGEMPTSVAYIRSNQTMGWGEKAIEIRSVETGHLDGVFMHKRAQRLKFLCERNDKVFFASVRSGGSSQVYFMTLGRTSLLSW

SEQ ID NO: 16941 - protein, 265 aa, Artificial Sequence
  Synthetic polypeptide
VFYVFLKQQRREREARRQQEREQRRREQEEKRRLEELERRRKEEEERRRAEEEKRRVEREQEYIRRQLEEEQRHLEVLQQQLLQEQAMLLECRWREMEEHRQAERLQRQLQQEQAYLLSLQHDHRRPHPQHSQQPPPPQQERSKPSFHAPEPKAHYEPADRAREVQWSHLASLKNNVSPVSRSHSFSDPSPKFAHHHLRSQDPCPPSRSEVLSQSSDSKSEAPDPTQKAWSRSDSDEVPPRVPVRTTSRSPVLSRRDSPLQGSGQ

SEQ ID NO: 16942 - protein, 23 aa, Artificial Sequence
  Synthetic polypeptide
KWPYCPRSGELYLLSGSEWSVFL

SEQ ID NO: 16943 - protein, 23 aa, Artificial Sequence
  Synthetic polypeptide
KWPYCPRSGELYLLSGSEWSVFL

SEQ ID NO: 16944 - protein, 23 aa, Artificial Sequence
  Synthetic polypeptide
KWPYCPRSGELYLLSGSEWSVFL

SEQ ID NO: 16945 - protein, 23 aa, Artificial Sequence
  Synthetic polypeptide
KWPYCPRSGELYLLSGSEWSVFL

SEQ ID NO: 16946 - protein, 23 aa, Artificial Sequence
  Synthetic polypeptide
KWPYCPRSGELYLLSGSEWSVFL

SEQ ID NO: 16947 - protein, 498 aa, Artificial Sequence
  Synthetic polypeptide
TPIHNCFKENKIPRNPTYKGCEGPLQGELQTTAQGNKRGYKQMEEHSMLMGRKNQYRENGHTAQGLVSCTFFLAVNGLYSSSDDVIELTPSNFNREVIQSDSLWLVEFYAPWCGHCQRLTPEWKKAATALKDVVKVGAVDADKHHSLGGQYGVQGFPTIKIFGSNKNRPEDYQGGRTGEAIVDAALSALRQLVKDRLGGRSGGYSSGKQGRSDSSSKKDVIELTDDSFDKNVLDSEDVWMVEFYAPWCGHCKNLEPEWAAAASEVKEQTKGKVKLAAVDATVNQVLASRYGIRGFPTIKIFQKGESPVDYDGGRTRSDIVSRALDLFSDNAPPPELLEIINEDIAKRTCEEHQLCVVAVLPHILDTGAAGRNSYLEVLLKLADKYKKKMWGWLWTEAGAQSELETALGIGGFGYPAMAAINARKMKFALLKGSFSEQGINEFLRELSFGRGSTAPVGGGAFPTIVEREPWDGRDGELPVEDDIDLSDVELDDLGKDEL

SEQ ID NO: 16948 - protein, 498 aa, Artificial Sequence; identical to SEQ ID NO: 16947
  Synthetic polypeptide

SEQ ID NO: 16949 - protein, 498 aa, Artificial Sequence; identical to SEQ ID NO: 16947
  Synthetic polypeptide

SEQ ID NO: 16950 - protein, 498 aa, Artificial Sequence; identical to SEQ ID NO: 16947
  Synthetic polypeptide

SEQ ID NO: 16951 - protein, 498 aa, Artificial Sequence; identical to SEQ ID NO: 16947
  Synthetic polypeptide

SEQ ID NO: 16952 - protein, 91 aa, Artificial Sequence
  Synthetic polypeptide
IQNQCTKITSILIHQQQTESQIMSELPFTIASKRIKYLGIQLTRDVKDLFKENYKPLLKEIKEDTNKWKNIPCSWVGRINIVKMAILPKVW

SEQ ID NO: 16953 - protein, 91 aa, Artificial Sequence; identical to SEQ ID NO: 16952
  Synthetic polypeptide

SEQ ID NO: 16954 - protein, 91 aa, Artificial Sequence; identical to SEQ ID NO: 16952
  Synthetic polypeptide

SEQ ID NO: 16955 - protein, 91 aa, Artificial Sequence; identical to SEQ ID NO: 16952
  Synthetic polypeptide

SEQ ID NO: 16956 - protein, 91 aa, Artificial Sequence; identical to SEQ ID NO: 16952
  Synthetic polypeptide

SEQ ID NO: 16957 - protein, 41 aa, Artificial Sequence
  Synthetic polypeptide
PLKIPGVSAVPVLLWVSAADLPGVPHPHRARCHPPALYLSF

SEQ ID NO: 16958 - protein, 41 aa, Artificial Sequence; identical to SEQ ID NO: 16957
  Synthetic polypeptide

SEQ ID NO: 16959 - protein, 41 aa, Artificial Sequence; identical to SEQ ID NO: 16957
  Synthetic polypeptide

SEQ ID NO: 16960 - protein, 41 aa, Artificial Sequence; identical to SEQ ID NO: 16957
  Synthetic polypeptide

SEQ ID NO: 16961 - protein, 41 aa, Artificial Sequence; identical to SEQ ID NO: 16957
  Synthetic polypeptide

SEQ ID NO: 16962 - protein, 41 aa, Artificial Sequence; identical to SEQ ID NO: 16957
  Synthetic polypeptide

SEQ ID NO: 16963 - protein, 37 aa, Artificial Sequence
  Synthetic polypeptide
YGPPFPQVVCKLWRPAWMTPEDSWCFCGTSVTMGIRR

SEQ ID NO: 16964 - protein, 37 aa, Artificial Sequence; identical to SEQ ID NO: 16963
  Synthetic polypeptide

SEQ ID NO: 16965 - protein, 37 aa, Artificial Sequence; identical to SEQ ID NO: 16963
  Synthetic polypeptide

SEQ ID NO: 16966 - protein, 37 aa, Artificial Sequence; identical to SEQ ID NO: 16963
  Synthetic polypeptide

SEQ ID NO: 16967 - protein, 37 aa, Artificial Sequence; identical to SEQ ID NO: 16963
  Synthetic polypeptide

SEQ ID NO: 16968 - protein, 37 aa, Artificial Sequence; identical to SEQ ID NO: 16963
  Synthetic polypeptide

SEQ ID NO: 16969 - protein, 8 aa, Artificial Sequence
  Synthetic polypeptide
NFIQRLLC

SEQ ID NO: 16970 - protein, 56 aa, Artificial Sequence
  Synthetic polypeptide
SVSFCQVNTQCSSPQEDTAFEVPSWKQRPDLTRHKLPGTLILDFIASRTLFRGCSA

SEQ ID NO: 16971 - protein, 11 aa, Artificial Sequence
  Synthetic polypeptide
PLELYSEAALL

SEQ ID NO: 16972 - protein, 20 aa, Artificial Sequence
  Synthetic polypeptide
STNVLCTLFMLNLPDLEEKV

SEQ ID NO: 16973 - protein, 20 aa, Artificial Sequence
  Synthetic polypeptide
STNVLCTLFMLNLPDLEEKV

SEQ ID NO: 16974 - protein, 323 aa, Artificial Sequence
  Synthetic polypeptide
KKRCERYWAQEQEPLQTGLFCITLIKEKWLNEDIMLRTLKVTFQKESRSVYQLQYMSWPDRGVPSSPDHMLAMVEEARRLQGSGPEPLCVHCSAGCGRTGVLCTVDYVRQLLLTQMIPPDFSLFDVVLKMRKQRPAAVQTEEQYRFLYHTVAQMFCSTLQNASPHYQNIKENCAPLYDDALFLRTPQALLAIPRPPGGVLRSISVPGSPGHAMADTYAVVQKRGAPAGAGSGTQTGTGTGTGARSAEEAPLYSKVTPRAQRPGAHAEDARGTLPGRVPADQSPAGSGAYEDVAGGAQTGGLGFNLRIGRPKGPRDPPAEWTRV

SEQ ID NO: 16975 - protein, 323 aa, Artificial Sequence; identical to SEQ ID NO: 16974
  Synthetic polypeptide

SEQ ID NO: 16976 - protein, 25 aa, Artificial Sequence
  Synthetic polypeptide
FRRKGVSGTGPRSRSHCRLGFSASL

SEQ ID NO: 16977 - protein, 25 aa, Artificial Sequence
  Synthetic polypeptide
FRRKGVSGTGPRSRSHCRLGFSASL

SEQ ID NO: 16978 - protein, 75 aa, Artificial Sequence
  Synthetic polypeptide
GRARWLTHVIPALWEAKAGGLPEVRSLRPAWPTWRICAQDCRASSSSTALGAALALGSHLCSWSGSQWITARSPS

SEQ ID NO: 16979 - protein, 79 aa, Artificial Sequence
  Synthetic polypeptide
DQPGLHGGSVHRTAGLPHLPQLWGRHWLWVRISAHGAALSGLRQEVQARVCHLPSPPGLHSRGGALQLHPDHPHDPGTF

SEQ ID NO: 16980 - protein, 336 aa, Artificial Sequence
  Synthetic polypeptide
GQEFETSLAYMADLCTGLQGFLIFHSFGGGTGSGFASLLMERLSVDYGKKSKLEFAIYPAPQVSTAVVEPYNSILTTHTTLEHSDCAFMVDNEAIYDICRRNLDIERPTYTNLNRLIGQIVSSITASLRFDGALNVDLTEFQTNLVPYPRIHFPLATYAPVISAEKAYHEQLSVAEITNACFEPANQMVKCDPRHGKYMACCMLYRGDVVPKDVNAAIATIKTKRTIQFVDWCPTGFKVGINYQPPTVVPGGDLAKVQRAVCMLSNTTAIAEAWARLDHKFDLMYAKRAFVHWYVGEGMEEGEFSEAREDLAALEKDYEEVGVDSVEAEAEEGEEY

SEQ ID NO: 16981 - protein, 36 aa, Artificial Sequence
  Synthetic polypeptide
LLCLFGESPLQAHNESDITEERQPLHVKLPVCQVHL

SEQ ID NO: 16982 - protein, 36 aa, Artificial Sequence; identical to SEQ ID NO: 16981
  Synthetic polypeptide

SEQ ID NO: 16983 - protein, 78 aa, Artificial Sequence
  Synthetic polypeptide
LLCLFGESPLQAHNESDITEERWPLRKPPFQGLCSLGRSLGLHQRSVGRAGRTQPCQAEGGLLTDTQARRQAWASCGR

SEQ ID NO: 16984 - protein, 13 aa, Artificial Sequence
  Synthetic polypeptide
VIVFIWRISITSS

SEQ ID NO: 16985 - protein, 13 aa, Artificial Sequence
  Synthetic polypeptide
VIVFIWRISITSS

SEQ ID NO: 16986 - protein, 13 aa, Artificial Sequence
  Synthetic polypeptide
VIVFIWRISITSS

SEQ ID NO: 16987 - protein, 301 aa, Artificial Sequence
  Synthetic polypeptide
YCVYLENLHYKLIMNQTSQKKDGPSGNHLSRASAPLGARWVCINGVWVEPGGPSPARLKEGSSRTHRPGGKRGRLAGGSADTVRSPADSLSMSSFQSVKSISNSGKARPQPGSFNKQDSKADVSQKADLEEEPLLHNSKLDKVPGVQGQARKEKAEASNAGAACMGNSQHQGRQMGAGAHPPMILPLPLRKPTTLRQCEVLIRELWNTNLLQTQELRHLKSLLEGSQRPQAAPEEASFPRDQEATHFPKVSTKSLSKKCLSPPVAERAILPALKQTPKNNFAERQKRLQAMQKRRLHRSVL

SEQ ID NO: 16988 - protein, 235 aa, Artificial Sequence
  Synthetic polypeptide
YCVYLENLHYKLIMNQTSQKKDSLSMSSFQSVKSISNSGKARPQPGSFNKQDSKADVSQKADLEEEPLLHNSKLDKVPGVQGQARKEKAEASNAGAACMGNSQHQGRQMGAGAHPPMILPLPLRKPTTLRQCEVLIRELWNTNLLQTQELRHLKSLLEGSQRPQAAPEEASFPRDQEATHFPKVSTKSLSKKCLSPPVAERAILPALKQTPKNNFAERQKRLQAMQKRRLHRSVL

SEQ ID NO: 16989 - protein, 134 aa, Artificial Sequence
  Synthetic polypeptide
YCVYLENLHYKLIMNQTSQKKDSLSMSSFQSVKSISNSGKARPQPGSFNKQDSKADVSQKADLEEEPLLHNSKLDKVPGVQGQASPPHLGSAKCSSASCGIPTSCRPKSCGTSSPSWKGARGPRQPRRKLAFPG

SEQ ID NO: 16990 - protein, 93 aa, Artificial Sequence
  Synthetic polypeptide
PGAAAHACNSSTLGGRDGRITRSPLQAHNESDITEERWPLRKPPFQGLCSLGRSLGLHQRSVGRAGRTQPCQAEGGLLTDTQARRQAWASCGR

SEQ ID NO: 16991 - protein, 316 aa, Artificial Sequence
  Synthetic polypeptide
RARRLTPVIPALWEAETGGSRDLHYKLIMNQTSQKKDGPSGNHLSRASAPLGARWVCINGVWVEPGGPSPARLKEGSSRTHRPGGKRGRLAGGSADTVRSPADSLSMSSFQSVKSISNSGKARPQPGSFNKQDSKADVSQKADLEEEPLLHNSKLDKVPGVQGQARKEKAEASNAGAACMGNSQHQGRQMGAGAHPPMILPLPLRKPTTLRQCEVLIRELWNTNLLQTQELRHLKSLLEGSQRPQAAPEEASFPRDQEATHFPKVSTKSLSKKCLSPPVAERAILPALKQTPKNNFAERQKRLQAMQKRRLHRSVL

SEQ ID NO: 16992 - protein, 19 aa, Artificial Sequence
  Synthetic polypeptide
FQHFGRPRRADHEISITSS

SEQ ID NO: 16993 - protein, 19 aa, Artificial Sequence
  Synthetic polypeptide
FQHFGRPRRADHEISITSS

SEQ ID NO: 16994 - protein, 19 aa, Artificial Sequence
  Synthetic polypeptide
FQHFGRPRRADHEISITSS

SEQ ID NO: 16995 - protein, 51 aa, Artificial Sequence
  Synthetic polypeptide
PGAAAHACNSSTLGGRDGRITRSPLQAHNESDITEERQPLHVKLPVCQVHL

SEQ ID NO: 16996 - protein, 51 aa, Artificial Sequence; identical to SEQ ID NO: 16995
  Synthetic polypeptide

SEQ ID NO: 16997 - protein, 250 aa, Artificial Sequence
  Synthetic polypeptide
RARRLTPVIPALWEAETGGSRDLHYKLIMNQTSQKKDSLSMSSFQSVKSISNSGKARPQPGSFNKQDSKADVSQKADLEEEPLLHNSKLDKVPGVQGQARKEKAEASNAGAACMGNSQHQGRQMGAGAHPPMILPLPLRKPTTLRQCEVLIRELWNTNLLQTQELRHLKSLLEGSQRPQAAPEEASFPRDQEATHFPKVSTKSLSKKCLSPPVAERAILPALKQTPKNNFAERQKRLQAMQKRRLHRSVL

SEQ ID NO: 16998 - protein, 149 aa, Artificial Sequence
  Synthetic polypeptide
RARRLTPVIPALWEAETGGSRDLHYKLIMNQTSQKKDSLSMSSFQSVKSISNSGKARPQPGSFNKQDSKADVSQKADLEEEPLLHNSKLDKVPGVQGQASPPHLGSAKCSSASCGIPTSCRPKSCGTSSPSWKGARGPRQPRRKLAFPG

SEQ ID NO: 16999 - protein, 216 aa, Artificial Sequence
  Synthetic polypeptide
SAQAGSVIKASLAHAPALSLCDALHLLSTLQGPHQQEEFDLGFLGLLNGLIVVTLAVCWMPNQIRRIMAAAKPKHDWTRSYFRAYMILLPFSETFFYLSSVINPLLYTVSSQQFRRVFVQVLCCRLSLQHANHEKRLRVHAHSTTDSARFVQRPLLFASRRQSSARRTEKIFLSTFQSEAEPQSKSQSLSLESLEPNSGAKPANSAAENGFQEHEV

SEQ ID NO: 17000 - protein, 2 aa, Artificial Sequence
  Synthetic polypeptide
MG

SEQ ID NO: 17001 - protein, 128 aa, Artificial Sequence
  Synthetic polypeptide
PWISRPPEWADCCDIGRMLDAQPDSEDHGCGQTQARLDEVLLPGVHDPPPLLGDVFLPQLGHQPAPVHGVLAAVSAGVRAGAVLPPVAAARQPREAPARTCALHHRQRPLCAAPVALRVPAPVLCKEN

SEQ ID NO: 17002 - protein, 125 aa, Artificial Sequence
  Synthetic polypeptide
SPTDQRADCCDIGRMLDAQPDSEDHGCGQTQARLDEVLLPGVHDPPPLLGDVFLPQLGHQPAPVHGVLAAVSAGVRAGAVLPPVAAARQPREAPARTCALHHRQRPLCAAPVALRVPAPVLCKEN

SEQ ID NO: 17003 - protein, 173 aa, Artificial Sequence
  Synthetic polypeptide
VPQIKGLIVVTLAVCWMPNQIRRIMAAAKPKHDWTRSYFRAYMILLPFSETFFYLSSVINPLLYTVSSQQFRRVFVQVLCCRLSLQHANHEKRLRVHAHSTTDSARFVQRPLLFASRRQSSARRTEKIFLSTFQSEAEPQSKSQSLSLESLEPNSGAKPANSAAENGFQEHEV

SEQ ID NO: 17004 - protein, 6 aa, Artificial Sequence
  Synthetic polypeptide
SHRSKG

SEQ ID NO: 17005 - protein, 109 aa, Artificial Sequence
  Synthetic polypeptide
PSNLRYLPKGNENTCLHKDSYTNVYCSFISNVKNWKQPICVLTGEWIKKSWCIHTVEDCSVVDTTDACGDVGGSQNSEGRFPVQCLHFKWDSLQHPGRVEVHAGEGSDQ

SEQ ID NO: 17006 - protein, 120 aa, Artificial Sequence
  Synthetic polypeptide
TLLTHAVMWVGLKIVKDDFLFSVSILSGILCSILAVLKFMLGKVLTSRALITDGFNSLVGGVMGFSILLSAEVFKHDSAVWYLDGSIGVLIGLTIFAYGVKLLIDMVPRVRQTRHYEMFE

SEQ ID NO: 17007 - protein, 37 aa, Artificial Sequence
  Synthetic polypeptide
FLHFHLSLMPSWTSCHRRLSCGVTATRPLCTLPIGST

SEQ ID NO: 17008 - protein, 199 aa, Artificial Sequence
  Synthetic polypeptide
GRSQDGRIGTAPVYSSQRERRRRRVISAFPSEFDAILDVLSSAIVLWRYSNAAAVHSAHREYIACVILGVIFLLSSICIVVKAIHDLSTRLLPEVDDFLFSVSILSGILCSILAVLKFMLGKVLTSRALITDGFNSLVGGVMGFSILLSAEVFKHDSAVWYLDGSIGVLIGLTIFAYGVKLLIDMVPRVRQTRHYEMFE

SEQ ID NO: 17009 - protein, 22 aa, Artificial Sequence
  Synthetic polypeptide
FLHFHLSCLRYEVQRLCFWVCI

SEQ ID NO: 17010 - protein, 36 aa, Artificial Sequence
  Synthetic polypeptide
GRSQDGRIGTAPVYSSQRERRRRRVISAFPSELSPL

SEQ ID NO: 17011 - protein, 8 aa, Artificial Sequence
  Synthetic polypeptide
SQHFGRPR

SEQ ID NO: 17012 - protein, 8 aa, Artificial Sequence
  Synthetic polypeptide
SQHFGRPR

SEQ ID NO: 17013 - protein, 55 aa, Artificial Sequence
  Synthetic polypeptide
GRTWLLTPVIPALWEAKVKLIFKFSPKFRLNTQEFVSTMKLLSQVLNKLPNTKSL

SEQ ID NO: 17014 - protein, 55 aa, Artificial Sequence; identical to SEQ ID NO: 17013
  Synthetic polypeptide

SEQ ID NO: 17015 - protein, 245 aa, Artificial Sequence
  Synthetic polypeptide
PDVVTHACNPSTLGGQGEIDLQILSKVQAQYPGVCINNEVVEPSAEQIAKYKELVAKTSNLENVKFAWHKETSSEYQSRMLEKKELQKWDFIHMIQMLYYVKDIPATLKFFHSLLGTNAKMLIIVVSGSSGWDKLWKKYGSRFPQDDLCQYITSDDLTQMLDNLGLKYECYDLLSTMDISDCFIDGNENGDLLWDFLTETCNFNATAPPDLRAELGKDLQEPEFSAKKEGKVLFNNTLSFIVIEA

SEQ ID NO: 17016 - protein, 245 aa, Artificial Sequence; identical to SEQ ID NO: 17015
  Synthetic polypeptide

SEQ ID NO: 17017 - protein, 19 aa, Artificial Sequence
  Synthetic polypeptide
NLRLSSLLGGRNLKNRGYP

SEQ ID NO: 17018 - protein, 19 aa, Artificial Sequence
  Synthetic polypeptide
NLRLSSLLGGRNLKNRGYP

SEQ ID NO: 17019 - protein, 19 aa, Artificial Sequence
  Synthetic polypeptide
NLRLSSLLGGRNLKNRGYP

SEQ ID NO: 17020 - protein, 294 aa, Artificial Sequence
  Synthetic polypeptide
WEELWLYSLANISSEISDSPVYWGEETLRIEDILEVIEKEGDSIAVILFSGVHFYTGQHFNIPAITKAGQAKGCYVGFDLAHAVGNVELYLHDWGVDFACWCSYKYLNAGAGGIAGAFIHEKHAHTIKPALVGWFGHELSTRFKMDNKLQLIPGVCGFRISNPPILLVCSLHASLEIFKQATMKALRKKSVLLTGYLEYLIKHNYGKDKAATKKPVVNIITPSHVEERGCQLTITFSVPNKDVFQELEKRGVVCDKRNPNGIRVAPVPLYNSFHDVYKFTNLLTSILDSAETKN

SEQ ID NO: 17021 - protein, 294 aa, Artificial Sequence; identical to SEQ ID NO: 17020
  Synthetic polypeptide

SEQ ID NO: 17022 - protein, 33 aa, Artificial Sequence
  Synthetic polypeptide
KGMWYNGKSFGFTVWLIFPVKSQTLQFTGGKKP

SEQ ID NO: 17023 - protein, 33 aa, Artificial Sequence; identical to SEQ ID NO: 17022
  Synthetic polypeptide

SEQ ID NO: 17024 - protein, 33 aa, Artificial Sequence; identical to SEQ ID NO: 17022
  Synthetic polypeptide

SEQ ID NO: 17025 - protein, 136 aa, Artificial Sequence
  Synthetic polypeptide
WEELWLYSLANISSEISDSPVYWGEETLRIEDILEVIEKEGDSIAVILFSGVHFYTGQHFNIPAITKAGQAKGCYVGFDLAHAVGNVELYLHDWGVDFACWCSYKYLNAGAGGIAGAFIHEKHAHTIKPARSEFFN

SEQ ID NO: 17026 - protein, 171 aa, Artificial Sequence
  Synthetic polypeptide
FLHFHLRLVGWFGHELSTRFKMDNKLQLIPGVCGFRISNPPILLVCSLHASLEIFKQATMKALRKKSVLLTGYLEYLIKHNYGKDKAATKKPVVNIITPSHVEERGCQLTITFSVPNKDVFQELEKRGVVCDKRNPNGIRVAPVPLYNSFHDVYKFTNLLTSILDSAETKN

SEQ ID NO: 17027 - protein, 171 aa, Artificial Sequence; identical to SEQ ID NO: 17026
  Synthetic polypeptide

SEQ ID NO: 17028 - protein, 39 aa, Artificial Sequence
  Synthetic polypeptide
GRSQDGRIGTAPVYSSQHEQRRRRVISAFPSEISGMVWP

SEQ ID NO: 17029 - protein, 39 aa, Artificial Sequence; identical to SEQ ID NO: 17028
  Synthetic polypeptide

SEQ ID NO: 17030 - protein, 152 aa, Artificial Sequence
  Synthetic polypeptide
GQEPGGKYSLPQWTRSVTLHKQQLPLDVFALFFKIFKQATMKALRKKSVLLTGYLEYLIKHNYGKDKAATKKPVVNIITPSHVEERGCQLTITFSVPNKDVFQELEKRGVVCDKRNPNGIRVAPVPLYNSFHDVYKFTNLLTSILDSAETKN

SEQ ID NO: 17031 - protein, 152 aa, Artificial Sequence; identical to SEQ ID NO: 17030
  Synthetic polypeptide

SEQ ID NO: 17032 - protein, 23 aa, Artificial Sequence
  Synthetic polypeptide
PYTSNNSLWMYLPYFLKSLSKRQ

SEQ ID NO: 17033 - protein, 23 aa, Artificial Sequence
  Synthetic polypeptide
PYTSNNSLWMYLPYFLKSLSKRQ

SEQ ID NO: 17034 - protein, 57 aa, Artificial Sequence
  Synthetic polypeptide
VLTRSGCLKVYSTFLFTPLCCWPCEDVLASPSPSPMIGSLLRPPQLFFYTACRTKRS

SEQ ID NO: 17035 - protein, 41 aa, Artificial Sequence
  Synthetic polypeptide
GLPSCSSIQPAELREAEFGRQPVGGHPRCHRSTEDVFPGAA

SEQ ID NO: 17036 - protein, 235 aa, Artificial Sequence
  Synthetic polypeptide
ETPYCVYLETLLINYSPLPPQMWMIKDPLRLITLSANLFTVPERSLTTTFSFSRYKSSDRPAHKVSMLLLCHALAIAVVQIVIFSESWAFAKNINFYNVRPPLDPTPFPNSFKCFTCENAGDNYNCNRWAEDKWCPQNTQYCLTVHHFTSHGRSTSITKKCASRSECHFVGCHHSRDSEHTECRSCCEGMICNVELPTNHTNAVFAVMHAQRTSGSSAPTLYLPVLAWVFVLPLL

SEQ ID NO: 17037 - protein, 235 aa, Artificial Sequence; identical to SEQ ID NO: 17036
  Synthetic polypeptide

SEQ ID NO: 17038 - protein, 41 aa, Artificial Sequence
  Synthetic polypeptide
LLSSSSPNVDDKGSFEADYSECKPFHCSREEPDNHILLLKI

SEQ ID NO: 17039 - protein, 41 aa, Artificial Sequence; identical to SEQ ID NO: 17038
  Synthetic polypeptide

SEQ ID NO: 17040 - protein, 102 aa, Artificial Sequence
  Synthetic polypeptide
ETPYCVYLETLLINYSPLPPQMWMIKDPLRLITLSANLFTVPERSLTTTFSFSRCERHCTEEDENHSKPNKGNAEEIFSAEYWKVRFPASRISGNVNEQHEA

SEQ ID NO: 17041 - protein, 41 aa, Artificial Sequence
  Synthetic polypeptide
LLSSSSPNVDDKGSFEADYSECKPFHCSREEPDNHILLLKM

SEQ ID NO: 17042 - protein, 3 aa, Artificial Sequence
  Synthetic polypeptide
HII

SEQ ID NO: 17043 - protein, 3 aa, Artificial Sequence
  Synthetic polypeptide
HII

SEQ ID NO: 17044 - protein, 3 aa, Artificial Sequence
  Synthetic polypeptide
HII

SEQ ID NO: 17045 - protein, 3 aa, Artificial Sequence
  Synthetic polypeptide
HII

SEQ ID NO: 17046 - protein, 3 aa, Artificial Sequence
  Synthetic polypeptide
HII

SEQ ID NO: 17047 - protein, 188 aa, Artificial Sequence
  Synthetic polypeptide
NMKPDTLYKSSDRPAHKVSMLLLCHALAIAVVQIVIFSESWAFAKNINFYNVRPPLDPTPFPNSFKCFTCENAGDNYNCNRWAEDKWCPQNTQYCLTVHHFTSHGRSTSITKKCASRSECHFVGCHHSRDSEHTECRSCCEGMICNVELPTNHTNAVFAVMHAQRTSGSSAPTLYLPVLAWVFVLPLL

SEQ ID NO: 17048 - protein, 188 aa, Artificial Sequence; identical to SEQ ID NO: 17047
  Synthetic polypeptide

SEQ ID NO: 17049 - protein, 188 aa, Artificial Sequence; identical to SEQ ID NO: 17047
  Synthetic polypeptide

SEQ ID NO: 17050 - protein, 188 aa, Artificial Sequence; identical to SEQ ID NO: 17047
  Synthetic polypeptide

SEQ ID NO: 17051 - protein, 26 aa, Artificial Sequence
  Synthetic polypeptide
SLTHYIRVRTAQHTRSACCSSVTLSL

SEQ ID NO: 17052 - protein, 26 aa, Artificial Sequence
  Synthetic polypeptide
SLTHYIRVRTAQHTRSACCSSVTLSL

SEQ ID NO: 17053 - protein, 26 aa, Artificial Sequence
  Synthetic polypeptide
SLTHYIRVRTAQHTRSACCSSVTLSL

SEQ ID NO: 17054 - protein, 26 aa, Artificial Sequence
  Synthetic polypeptide
SLTHYIRVRTAQHTRSACCSSVTLSL

SEQ ID NO: 17055 - protein, 26 aa, Artificial Sequence
  Synthetic polypeptide
SLTHYIRVRTAQHTRSACCSSVTLSL

SEQ ID NO: 17056 - protein, 59 aa, Artificial Sequence
  Synthetic polypeptide
NMKPDTLYKSSDRPAHKVSMLLLCHALAIAVVQIVIFSESWAFAKNINFYNVRPPLDHK

SEQ ID NO: 17057 - protein, 400 aa, Artificial Sequence
  Synthetic polypeptide
PVWCHFSQARIDGSRNHQRQSLVPAHPMAPPSPSTTSSNNNSSSSSNSGWDQLSKTNLYIRGLPPHTTDQDLVKLCQPYGKIVSTKAILDKTTNKCKGYGFVDFDSPAAAQKAVSALKASGVQAQMAKQQEQDPTNLYISNLPLSMDEQELENMLKPFGQVISTRILRDSSGTSRGVGFARMESTEKCEAVIGHFNGKFIKTPPGVSAPTEPLLCKFADGGQKKRQNPNKYIPNGRPWHREGEVRLAGMTLTYDPTTAAIQNGFYPSPYSIATNRMITQTSITPYIASPVSAYQVQSPSWMQPQPYILQHPGAVLTPSMEHTMSLQPASMISPLAQQMSHLSLGSTGTYMPATSAMQGAYLPQYAHMQTTAVPVEEASGQQQVAVETSNDHSPYTFQPNK

SEQ ID NO: 17058 - protein, 61 aa, Artificial Sequence
  Synthetic polypeptide
MGPEIIKGSLWSQPTPWPLPVPAPPAVITTVAAVATQDGISSAKRTSISEDCLPTPPTRTW

SEQ ID NO: 17059 - protein, 61 aa, Artificial Sequence; identical to SEQ ID NO: 17058
  Synthetic polypeptide

SEQ ID NO: 17060 - protein, 58 aa, Artificial Sequence
  Synthetic polypeptide
DNIMKCLVSPLQATISHESMTSMVSFLTSQNRWVQKSSKAVSGPSPPHGPSQSQHHQQ

SEQ ID NO: 17061 - protein, 58 aa, Artificial Sequence; identical to SEQ ID NO: 17060
  Synthetic polypeptide

SEQ ID NO: 17062 - protein, 413 aa, Artificial Sequence
  Synthetic polypeptide
PVWCHFSQARIDGSRNHQRQSLVPAHPMAPPSPSTTSSNNNSSSSSNSGWDQLSKTNLYIRGLPPHTTDQDLVKLCQPYGKIVSTKAILDKTTNKCKGYGFVDFDSPAAAQKAVSALKASGVQAQMAKQQEQDPTNLYISNLPLSMDEQELENMLKPFGQVISTRILRDSSGTSRGVGFARMESTEKCEAVIGHFNGKFIKTPPGVSAPTEPLLCKFADGGQKKRQNPNKYIPNGRPWHREGEAGMTLTYDPTTAAIQNGFYPSPYSIATNRMITQTSITPYIASPVSAYQVAKETRENKYRGSAIKVQSPSWMQPQPYILQHPGAVLTPSMEHTMSLQPASMISPLAQQMSHLSLGSTGTYMPATSAMQGAYLPQYAHMQTTAVPVEEASGQQQVAVETSNDHSPYTFQPNK

SEQ ID NO: 17063 - protein, 685 aa, Artificial Sequence
  Synthetic polypeptide
SPLTIPLPLPIFLNDEFGHSINDYSISPDGQFILLEYNYVKQWRHSYTASYDIYDLNKRQLITEERIPNNTQWVTWSPVGHKLAYVWNNDIYVKIEPNLPSYRITWTGKEDIIYNGITDWVYEEEVFSAYSALWWSPNGTFLAYAQFNDTEVPLIEYSFYSDESLQYPKTVRVPYPKAGAVNPTVKFFVVNTDSLSSVTNATSIQITAPASMLIGDHYLCDVTWATQERISLQWLRRIQNYSVMDICDYDESSGRWNCLVARQHIEMSTTGWVGRFRPSEPHFTLDGNSFYKIISNEEGYRHICYFQIDKKDCTFITKGTWEVIGIEALTSDYLYYISNEYKGMPGGRNLYKIQLSDYTKVTCLSCELNPERCQYYSVSFSKEAKYYQLRCSGPGLPLYTLHSSVNDKGLRVLEDNSALDKMLQNVQMPSKKLDFIILNETKFWYQMILPPHFDKSKKYPLLLDVYAGPCSQKADTVFRLNWATYLASTENIIVASFDGRGSGYQGDKIMHAINRRLGTFEVEDQIEAARQFSKMGFVDNKRIAIWGWSYGGYVTSMVLGSGSGVFKCGIAVAPVSRWEYYDSVYTERYMGLPTPEDNLDHYRNSTVMSRAENFKQVEYLLIHGTADDNVHFQQSAQISKALVDVGVDFQAMWYTDEDHGIASSTAHQHIYTHMSHFIKQCFSLP

SEQ ID NO: 17064 - protein, 90 aa, Artificial Sequence
  Synthetic polypeptide
SPLTIPLPLPIFLNDEFGHSINDYSISPDGQFILLEYNYVKQWRHSYTASYDIYDLNKRQLITEERIPNNTQWVTWSPVGHKLVSICLEQ

SEQ ID NO: 17065 - protein, 5 aa, Artificial Sequence
  Synthetic polypeptide
VSENS

SEQ ID NO: 17066 - protein, 5 aa, Artificial Sequence
  Synthetic polypeptide
VSENS

SEQ ID NO: 17067 - protein, 37 aa, Artificial Sequence
  Synthetic polypeptide
WGFGNLVLLNAAATSCVTMNPSFGLSESQKIHRNGFH

SEQ ID NO: 17068 - protein, 37 aa, Artificial Sequence; identical to SEQ ID NO: 17067
  Synthetic polypeptide

SEQ ID NO: 17069 - protein, 165 aa, Artificial Sequence
  Synthetic polypeptide
THLLASLSLRKFIEMGFIDEKRIAIWGWSYGGYVSSLALASGTGLFKCGIAVAPVSSWEYYASVYTERFMGLPTKDDNLEHYKNSTVMARAEYFRNVDYLLIHGTADDNVHFQNSAQIAKALVNAQVDFQAMWYSDQNHGLSGLSTNHLYTHMTHFLKQCFSLSD

SEQ ID NO: 17070 - protein, 165 aa, Artificial Sequence; identical to SEQ ID NO: 17069
  Synthetic polypeptide

SEQ ID NO: 17071 - protein, 62 aa, Artificial Sequence
  Synthetic polypeptide
CLSNPGSFLECVTFGQRLRIYHKLMVLKWKSNFFQPQFSQIWRRRSGAWRITHQNHLLQILL

SEQ ID NO: 17072 - protein, 5 aa, Artificial Sequence
  Synthetic polypeptide
PLARD

SEQ ID NO: 17073 - protein, 824 aa, Artificial Sequence
  Synthetic polypeptide
MCDLWPEIENLSQVDGPQVEEQLLSTTVQPNLEKEVWGMENNSSESSFADSSVVSESDTSLAEGSVSCLDESLGHNSNMGSDSGTMGSDSDEENVAARASPEPELQLRPYQMEVAQPALEGKNIIICLPTGSGKTRVAVYIAKDHLDKKKKASEPGKVIVLVNKVLLVEQLFRKEFQPFLKKWYRVIGLSGDTQLKISFPEVVKSCDIIISTAQILENSLLNLENGEDAGVQLSDFSLIIIDECHHTNKEAVYNNIMRHYLMQKLKNNRLKKENKPVIPLPQILGLTASPGVGGATKQAKAEEHILKLCANLDAFTIKTVKENLDQLKNQIQEPCKKFAIADATREDPFKEKLLEIMTRIQTYCQMSPMSDFGTQPYEQWAIQMEKKAAKEGNRKERVCAEHLRKYNEALQINDTIRMIDAYTHLETFYNEEKDKKFAVIEDDSDEGGDDEYCDGDEDEDDLKKPLKLDETDRFLMTLFFENNKMLKRLAENPEYENEKLTKLRNTIMEQYTRTEESARGIIFTKTRQSAYALSQWITENEKFAEVGVKAHHLIGAGHSSEFKPMTQNEQKEVISKFRTGKINLLIATTVAEEGLDIKECNIVIRYGLVTNEIAMVQARGRARADESTYVLVAHSGSGVIEHETVNDFREKMMYKAIHCVQNMKPEEYAHKILELQMQSIMEKKMKTKRNIAKHYKNNPSLITFLCKNCSVLACSGEDIHVIEKMHHVNMTPEFKELYIVRENKALQKKCADYQINGEIICKCGQAWGTMMVHKGLDLPCLKIRNFVVVFKNNSTKKQYKKWVELPITFPNLDYSECCLFSDED

SEQ ID NO: 17074 - protein, 12 aa, Artificial Sequence
  Synthetic polypeptide
SHLRLIWTMFRD

SEQ ID NO: 17075 - protein, 823 aa, Artificial Sequence
  Synthetic polypeptide
FGQCLEIENLSQVDGPQVEEQLLSTTVQPNLEKEVWGMENNSSESSFADSSVVSESDTSLAEGSVSCLDESLGHNSNMGSDSGTMGSDSDEENVAARASPEPELQLRPYQMEVAQPALEGKNIIICLPTGSGKTRVAVYIAKDHLDKKKKASEPGKVIVLVNKVLLVEQLFRKEFQPFLKKWYRVIGLSGDTQLKISFPEVVKSCDIIISTAQILENSLLNLENGEDAGVQLSDFSLIIIDECHHTNKEAVYNNIMRHYLMQKLKNNRLKKENKPVIPLPQILGLTASPGVGGATKQAKAEEHILKLCANLDAFTIKTVKENLDQLKNQIQEPCKKFAIADATREDPFKEKLLEIMTRIQTYCQMSPMSDFGTQPYEQWAIQMEKKAAKEGNRKERVCAEHLRKYNEALQINDTIRMIDAYTHLETFYNEEKDKKFAVIEDDSDEGGDDEYCDGDEDEDDLKKPLKLDETDRFLMTLFFENNKMLKRLAENPEYENEKLTKLRNTIMEQYTRTEESARGIIFTKTRQSAYALSQWITENEKFAEVGVKAHHLIGAGHSSEFKPMTQNEQKEVISKFRTGKINLLIATTVAEEGLDIKECNIVIRYGLVTNEIAMVQARGRARADESTYVLVAHSGSGVIEHETVNDFREKMMYKAIHCVQNMKPEEYAHKILELQMQSIMEKKMKTKRNIAKHYKNNPSLITFLCKNCSVLACSGEDIHVIEKMHHVNMTPEFKELYIVRENKALQKKCADYQINGEIICKCGQAWGTMMVHKGLDLPCLKIRNFVVVFKNNSTKKQYKKWVELPITFPNLDYSECCLFSDED

SEQ ID NO: 17076 - protein, 15 aa, Artificial Sequence
  Synthetic polypeptide
EAEARGSLETFPLFY

SEQ ID NO: 17077 - protein, 15 aa, Artificial Sequence
  Synthetic polypeptide
EAEARGSLETFPLFY

SEQ ID NO: 17078 - protein, 15 aa, Artificial Sequence
  Synthetic polypeptide
EAEARGSLETFPLFY

SEQ ID NO: 17079 - protein, 15 aa, Artificial Sequence
  Synthetic polypeptide
EAEARGSLETFPLFY

SEQ ID NO: 17080 - protein, 37 aa, Artificial Sequence
  Synthetic polypeptide
SQHFERPRHVDHLRLFPCFIDKRRGPLWNRYLPVFGQ

SEQ ID NO: 17081 - protein, 37 aa, Artificial Sequence; identical to SEQ ID NO: 17080
  Synthetic polypeptide

SEQ ID NO: 17082 - protein, 37 aa, Artificial Sequence; identical to SEQ ID NO: 17080
  Synthetic polypeptide

SEQ ID NO: 17083 - protein, 37 aa, Artificial Sequence; identical to SEQ ID NO: 17080
  Synthetic polypeptide

SEQ ID NO: 17084 - protein, 23 aa, Artificial Sequence
  Synthetic polypeptide
ADTLQPAVHTCLLPVFPKLDPLL

SEQ ID NO: 17085 - protein, 23 aa, Artificial Sequence
  Synthetic polypeptide
ADTLQPAVHTCLLPVFPKLDPLL

SEQ ID NO: 17086 - protein, 56 aa, Artificial Sequence
  Synthetic polypeptide
MTHCSLQSTPAYCLFFLSSTHFCNPATEYRGAGWGERHAGVQRHRPPPAADLLDER

SEQ ID NO: 17087 - protein, 56 aa, Artificial Sequence; identical to SEQ ID NO: 17086
  Synthetic polypeptide

SEQ ID NO: 17088 - protein, 20 aa, Artificial Sequence
  Synthetic polypeptide
RSKTDHLSGKKSSWVKWSPS

SEQ ID NO: 17089 - protein, 201 aa, Artificial Sequence
  Synthetic polypeptide
RNKEKILKSAREVKQITYQVRRVPGSSGHLHKTEDGDWEWSDDEMDEKSEEGKAAFSQEKSRRVKEENPEIAVSASTIPEQIQSLSVHDSQGPPNANEDYREASSCAVNLVLRLRNSRKELNDIRFEFTPGRDTADGVSQELFSAGLVDGHDVVIVAANLQKIVDDPKALKTLTFKLASGCDGSEIPDEVKLIGFAQLSVS

SEQ ID NO: 17090 - protein, 6 aa, Artificial Sequence
  Synthetic polypeptide
NRSPIR

SEQ ID NO: 17091 - protein, 40 aa, Artificial Sequence
  Synthetic polypeptide
HKNVTVRIFAVEVGIASLQTGGVMGPKTVQMTRMKLAALL

SEQ ID NO: 17092 - protein, 40 aa, Artificial Sequence; identical to SEQ ID NO: 17091
  Synthetic polypeptide

SEQ ID NO: 17093 - protein, 23 aa, Artificial Sequence
  Synthetic polypeptide
FFPDLFFPDLLSPLRLPPSDIRM

SEQ ID NO: 17094 - protein, 23 aa, Artificial Sequence
  Synthetic polypeptide
FFPDLFFPDLLSPLRLPPSDIRM

SEQ ID NO: 17095 - protein, 19 aa, Artificial Sequence
  Synthetic polypeptide
TPACAIRVDIEVDLIRFSF

SEQ ID NO: 17096 - protein, 19 aa, Artificial Sequence
  Synthetic polypeptide
TPACAIRVDIEVDLIRFSF

SEQ ID NO: 17097 - protein, 19 aa, Artificial Sequence
  Synthetic polypeptide
TPACAIRVDIEVDLIRFSF

SEQ ID NO: 17098 - protein, 19 aa, Artificial Sequence
  Synthetic polypeptide
TPACAIRVDIEVDLIRFSF

SEQ ID NO: 17099 - protein, 19 aa, Artificial Sequence
  Synthetic polypeptide
TPACAIRVDIEVDLIRFSF

SEQ ID NO: 17100 - protein, 19 aa, Artificial Sequence
  Synthetic polypeptide
TPACAIRVDIEVDLIRFSF

SEQ ID NO: 17101 - protein, 16 aa, Artificial Sequence
  Synthetic polypeptide
AEIAPLNSSLRDKSGH

SEQ ID NO: 17102 - protein, 16 aa, Artificial Sequence
  Synthetic polypeptide
AEIAPLNSSLRDKSGH

SEQ ID NO: 17103 - protein, 16 aa, Artificial Sequence
  Synthetic polypeptide
AEIAPLNSSLRDKSGH

SEQ ID NO: 17104 - protein, 16 aa, Artificial Sequence
  Synthetic polypeptide
AEIAPLNSSLRDKSGH

SEQ ID NO: 17105 - protein, 16 aa, Artificial Sequence
  Synthetic polypeptide
AEIAPLNSSLRDKSGH

SEQ ID NO: 17106 - protein, 16 aa, Artificial Sequence
  Synthetic polypeptide
AEIAPLNSSLRDKSGH

SEQ ID NO: 17107 - protein, 44 aa, Artificial Sequence
  Synthetic polypeptide
MKVARWRLLGGGSEVKMLYKLHAFCMQWWFFCPAHGYCIIPVSY

SEQ ID NO: 17108 - protein, 44 aa, Artificial Sequence; identical to SEQ ID NO: 17107
  Synthetic polypeptide

SEQ ID NO: 17109 - protein, 44 aa, Artificial Sequence; identical to SEQ ID NO: 17107
  Synthetic polypeptide

SEQ ID NO: 17110 - protein, 44 aa, Artificial Sequence; identical to SEQ ID NO: 17107
  Synthetic polypeptide

SEQ ID NO: 17111 - protein, 44 aa, Artificial Sequence; identical to SEQ ID NO: 17107
  Synthetic polypeptide

SEQ ID NO: 17112 - protein, 44 aa, Artificial Sequence; identical to SEQ ID NO: 17107
  Synthetic polypeptide

SEQ ID NO: 17113 - protein, 1005 aa, Artificial Sequence
  Synthetic polypeptide
KCYINCMLFACSGGSSVQHMATASSLCLIKDFERRPSVTHLLDHPFIKGVHGKVLFLQKQLAKVLQDQKHQNPVAKTRHERMHTRRPYHVEDAEKYCLEDDLVNLEVLDEDTIIHQLQKRYADLLIYTYVGDILIALNPFQNLSIYSPQFSRLYHGVKRASNPPHIFASADAAYQCMVTLSKDQCIVISGESGSGKTESAHLIVQHLTFLGKANNQTLREKILQVNSLVEAFGNSCTAINDNSSRFGKYLEMMFTPTGVVMGARISEYLLEKSRVIKQAAREKNFHIFYYIYAGLHHQKKLSDFRLPEEKPPRYIADETGRVMHDITSKESYRRQFEAIQHCFRIIGFTDKEVHSVYRILAGILNIGNIEFAAISSQHQTDKSEVPNAEALQNAASVLCISPEELQEALTSHCVVTRGETIIRANTVDRAADVRDAMSKALYGRLFSWIVNRINTLLQPDENICSAGGGMNVGILDIFGFENFQRNSFEQLCINIANEQIQYYFNQHVFALEQMEYQNEGIDAVPVEYEDNRPLLDMFLQKPLGLLALLDEESRFPQATDQTLVDKFEDNLRCKYFWRPKGVELCFGIQHYAGKVLYDASGVLEKNRDTLPADVVVVLRTSENKLLQQLFSIPLTKTGNLAQTRARITVASSSLPPHFSAGKAKVDTLEVIRHPEETTNMKRQTVASYFRYSLMDLLSKMVVGQPHFVRCIKPNDDREALQFSRERVLAQLRSTGILETVSIRRQGYSHRILFEEFVKRYYYLAFTAHQTPLASKESCVAILEKSRLDHWVLGKTKVFLKYYHVEQLNLLLREVIGRVVVLQAYTKGWLGARRYKRVREKREKGAIAIQSGDTSNQSSGPHSPVAAGTRGSAEVQDCSEPGDHKVLRGSVHRRSHSQAESNNGRTQTSSNSPAVTEKNGHSQAQSSPKGCDIFAGHANKHSVSGTDLLSSRICHPAPDQQGLSLWGAPQKPAFPHYGCNFYGFRKWSCTEASNTSPTMSAAQNAE

SEQ ID NO: 17114 - protein, 100 aa, Artificial Sequence
  Synthetic polypeptide
TACFLHAVVVLLSSTWLLHHPCVLLRILKGDLPSHISLTTHLLKEYMEKFCFCKNSWPRFSKTRSIKILLLKPGMRGCIPEDLIMWKMLKNTALRMIWST

SEQ ID NO: 17115 - protein, 100 aa, Artificial Sequence; identical to SEQ ID NO: 17114
  Synthetic polypeptide

SEQ ID NO: 17116 - protein, 100 aa, Artificial Sequence; identical to SEQ ID NO: 17114
  Synthetic polypeptide

SEQ ID NO: 17117 - protein, 100 aa, Artificial Sequence; identical to SEQ ID NO: 17114
  Synthetic polypeptide

SEQ ID NO: 17118 - protein, 100 aa, Artificial Sequence; identical to SEQ ID NO: 17114
  Synthetic polypeptide

SEQ ID NO: 17119 - protein, 100 aa, Artificial Sequence; identical to SEQ ID NO: 17114
  Synthetic polypeptide

SEQ ID NO: 17120 - protein, 1095 aa, Artificial Sequence
  Synthetic polypeptide
KCYINCMLFACSGGSSVQHMATASSLCLIKDFERRPSVTHLLDHPFIKGVHGKVLFLQKQLAKVLQDQKHQNPVAKTRHERMHTRRPYHVEDAEKYCLEDDLVNLEVLDEDTIIHQLQKRYADLLIYTYVGDILIALNPFQNLSIYSPQFSRLYHGVKRASNPPHIFASADAAYQCMVTLSKDQCIVISGESGSGKTESAHLIVQHLTFLGKANNQTLREKILQVNSLVEAFGNSCTAINDNSSRFGKYLEMMFTPTGVVMGARISEYLLEKSRVIKQAAREKNFHIFYYIYAGLHHQKKLSDFRLPEEKPPRYIADETGRVMHDITSKESYRRQFEAIQHCFRIIGFTDKEVHSVYRILAGILNIGNIEFAAISSQHQTDKSEVPNAEALQNAASVLCISPEELQEALTSHCVVTRGETIIRANTVDRAADVRDAMSKALYGRLFSWIVNRINTLLQPDENICSAGGGMNVGILDIFGFENFQRNSFEQLCINIANEQIQYYFNQHVFALEQMEYQNEGIDAVPVEYEDNRPLLDMFLQKPLGLLALLDEESRFPQATDQTLVDKFEDNLRCKYFWRPKGVELCFGIQHYAGKVLYDASGVLEKNRDTLPADVVVVLRTSENKLLQQLFSIPLTKTGNLAQTRARITVASSSLPPHFSAGKAKVDTLEVIRHPEETTNMKRQTVASYFRYSLMDLLSKMVVGQPHFVRCIKPNDDREALQFSRERVLAQLRSTGILETVSIRRQGYSHRILFEEFVKRYYYLAFTAHQTPLASKESCVAILEKSRLDHWVLGKTKVFLKYYHVEQLNLLLREVIGRVVVLQAYTKGWLGARRYKRVREKREKGAIAIQSAWRGYDARRKFKKISNRRNESAAHNQAGDTSNQSSGPHSPVAAGTRGSAEVQDCSEPGDHKVLRGSVHRRSHSQAESNNGRTQTSSNSPAVTEKNGHSQAQSSPKGCDIFAGHANKHSVSGTDLLSSRICHPAPDQQGLSLWGAPQKPGSENGLAQKHRTPRRRCQQPKMLSSPEDTMYYNQLNGTLEYQGSKRKPRKLGQIKVLDGEDEYYKSLSPVDCIPEENNSAHPSFFSSSSKGDSFAQH

SEQ ID NO: 17121 - protein, 1095 aa, Artificial Sequence; identical to SEQ ID NO: 17120
  Synthetic polypeptide

SEQ ID NO: 17122 - protein, 1068 aa, Artificial Sequence
  Synthetic polypeptide
KCYINCMLFACSGGSSVQHMATASSLCLIKDFERRPSVTHLLDHPFIKGVHGKVLFLQKQLAKVLQDQKHQNPVAKTRHERMHTRRPYHVEDAEKYCLEDDLVNLEVLDEDTIIHQLQKRYADLLIYTYVGDILIALNPFQNLSIYSPQFSRLYHGVKRASNPPHIFASADAAYQCMVTLSKDQCIVISGESGSGKTESAHLIVQHLTFLGKANNQTLREKILQVNSLVEAFGNSCTAINDNSSRFGKYLEMMFTPTGVVMGARISEYLLEKSRVIKQAAREKNFHIFYYIYAGLHHQKKLSDFRLPEEKPPRYIADETGRVMHDITSKESYRRQFEAIQHCFRIIGFTDKEVHSVYRILAGILNIGNIEFAAISSQHQTDKSEVPNAEALQNAASVLCISPEELQEALTSHCVVTRGETIIRANTVDRAADVRDAMSKALYGRLFSWIVNRINTLLQPDENICSAGGGMNVGILDIFGFENFQRNSFEQLCINIANEQIQYYFNQHVFALEQMEYQNEGIDAVPVEYEDNRPLLDMFLQKPLGLLALLDEESRFPQATDQTLVDKFEDNLRCKYFWRPKGVELCFGIQHYAGKVLYDASGVLEKNRDTLPADVVVVLRTSENKLLQQLFSIPLTKTGNLAQTRARITVASSSLPPHFSAGKAKVDTLEVIRHPEETTNMKRQTVASYFRYSLMDLLSKMVVGQPHFVRCIKPNDDREALQFSRERVLAQLRSTGILETVSIRRQGYSHRILFEEFVKRYYYLAFTAHQTPLASKESCVAILEKSRLDHWVLGKTKVFLKYYHVEQLNLLLREVIGRVVVLQAYTKGWLGARRYKRVREKREKGAIAIQSGDTSNQSSGPHSPVAAGTRGSAEVQDCSEPGDHKVLRGSVHRRSHSQAESNNGRTQTSSNSPAVTEKNGHSQAQSSPKGCDIFAGHANKHSVSGTDLLSSRICHPAPDQQGLSLWGAPQKPGSENGLAQKHRTPRRRCQQPKMLSSPEDTMYYNQLNGTLEYQGSKRKPRKLGQIKVLDGEDEYYKSLSPVDCIPEENNSAHPSFFSSSSKGDSFAQH

SEQ ID NO: 17123 - protein, 850 aa, Artificial Sequence
  Synthetic polypeptide
KCYINCMLFACSGGSSVQHMATASSLCLIKDFERRPSVTHLLDHPFIKGVHGKVLFLQKQLAKVLQDQKHQNPVAKTRHERMHTRRPYHVEDAEKYCLEDDLVNLEVLDEDTIIHQLQKRYADLLIYTYVGDILIALNPFQNLSIYSPQFSRLYHGVKRASNPPHIFASADAAYQCMVTLSKDQCIVISGESGSGKTESAHLIVQHLTFLGKANNQTLREKILQVNSLVEAFGNSCTAINDNSSRFGKYLEMMFTPTGVVMGARISEYLLEKSRVIKQAAREKNFHIFYYIYAGLHHQKKLSDFRLPEEKPPRYIADETGRVMHDITSKESYRRQFEAIQHCFRIIGFTDKEVHSVYRILAGILNIGNIEFAAISSQHQTDKSEVPNAEALQNAASVLCISPEELQEALTSHCVVTRGETIIRANTVDRAADVRDAMSKALYGRLFSWIVNRINTLLQPDENICSAGGGMNVGILDIFGFENFQRNSFEQLCINIANEQIQYYFNQHVFALEQMEYQNEGIDAVPVEYEDNRPLLDMFLQKPLGLLALLDEESRFPQATDQTLVDKFEDNLRCKYFWRPKGVELCFGIQHYAGKVLYDASGVLEKNRDTLPADVVVVLRTSENKLLQQLFSIPLTKTGNLAQTRARITVASSSLPPHFSAGKAKVDTLEVIRHPEETTNMKRQTVASYFRYSLMDLLSKMVVGQPHFVRCIKPNDDREALQFSRERVLAQLRSTGILETVSIRRQGYSHRILFEEFVKRYYYLAFTAHQTPLASKESCVAILEKSRLDHWVLGKTKVFLKYYHVEQLNLLLREVIGRVVVLQAYTKGWLGARRYKRVREKREKGAIAIQS

SEQ ID NO: 17124 - protein, 114 aa, Artificial Sequence
  Synthetic polypeptide
KCYINCMLFACSGGSSVQHMATASSLCLIKDFERRPSVTHLLDHPFIKGVHGKVLFLQKQLAKVLQDQKHQNPVAKTRHERMHTRRPYHVEDAEKYCLEDDLVNLEVLDEVLNI

SEQ ID NO: 17125 - protein, 121 aa, Artificial Sequence
  Synthetic polypeptide
MKVARWRLLGGGSEVKMLYKLHAFCMQWWFFCPAHGYCIIPVCVLLRILKGDLPSHISLTTHLLKEYMEKFCFCKNSWPRFSKTRSIKILLLKPGMRGCIPEDLIMWKMLKNTALRMIWST

SEQ ID NO: 17126 - protein, 121 aa, Artificial Sequence; identical to SEQ ID NO: 17125
  Synthetic polypeptide

SEQ ID NO: 17127 - protein, 121 aa, Artificial Sequence; identical to SEQ ID NO: 17125
  Synthetic polypeptide

SEQ ID NO: 17128 - protein, 121 aa, Artificial Sequence; identical to SEQ ID NO: 17125
  Synthetic polypeptide

SEQ ID NO: 17129 - protein, 121 aa, Artificial Sequence; identical to SEQ ID NO: 17125
  Synthetic polypeptide

SEQ ID NO: 17130 - protein, 121 aa, Artificial Sequence; identical to SEQ ID NO: 17125
  Synthetic polypeptide

SEQ ID NO: 17131 - protein, 30 aa, Artificial Sequence
  Synthetic polypeptide
KCYINCMLFACSGGSSVQHMATASSLYVSY

SEQ ID NO: 17132 - protein, 30 aa, Artificial Sequence; identical to SEQ ID NO: 17131
  Synthetic polypeptide

SEQ ID NO: 17133 - protein, 30 aa, Artificial Sequence; identical to SEQ ID NO: 17131
  Synthetic polypeptide

SEQ ID NO: 17134 - protein, 30 aa, Artificial Sequence; identical to SEQ ID NO: 17131
  Synthetic polypeptide

SEQ ID NO: 17135 - protein, 30 aa, Artificial Sequence; identical to SEQ ID NO: 17131
  Synthetic polypeptide

SEQ ID NO: 17136 - protein, 30 aa, Artificial Sequence; identical to SEQ ID NO: 17131
  Synthetic polypeptide

SEQ ID NO: 17137 - protein, 1002 aa, Artificial Sequence
  Synthetic polypeptide
TACFLHAVVVLLSSTWLLHHPCMCLIKDFERRPSVTHLLDHPFIKGVHGKVLFLQKQLAKVLQDQKHQNPVAKTRHERMHTRRPYHVEDAEKYCLEDDLVNLEVLDEDTIIHQLQKRYADLLIYTYVGDILIALNPFQNLSIYSPQFSRLYHGVKRASNPPHIFASADAAYQCMVTLSKDQCIVISGESGSGKTESAHLIVQHLTFLGKANNQTLREKILQVNSLVEAFGNSCTAINDNSSRFGKYLEMMFTPTGVVMGARISEYLLEKSRVIKQAAREKNFHIFYYIYAGLHHQKKLSDFRLPEEKPPRYIADETGRVMHDITSKESYRRQFEAIQHCFRIIGFTDKEVHSVYRILAGILNIGNIEFAAISSQHQTDKSEVPNAEALQNAASVLCISPEELQEALTSHCVVTRGETIIRANTVDRAADVRDAMSKALYGRLFSWIVNRINTLLQPDENICSAGGGMNVGILDIFGFENFQRNSFEQLCINIANEQIQYYFNQHVFALEQMEYQNEGIDAVPVEYEDNRPLLDMFLQKPLGLLALLDEESRFPQATDQTLVDKFEDNLRCKYFWRPKGVELCFGIQHYAGKVLYDASGVLEKNRDTLPADVVVVLRTSENKLLQQLFSIPLTKTGNLAQTRARITVASSSLPPHFSAGKAKVDTLEVIRHPEETTNMKRQTVASYFRYSLMDLLSKMVVGQPHFVRCIKPNDDREALQFSRERVLAQLRSTGILETVSIRRQGYSHRILFEEFVKRYYYLAFTAHQTPLASKESCVAILEKSRLDHWVLGKTKVFLKYYHVEQLNLLLREVIGRVVVLQAYTKGWLGARRYKRVREKREKGAIAIQSGDTSNQSSGPHSPVAAGTRGSAEVQDCSEPGDHKVLRGSVHRRSHSQAESNNGRTQTSSNSPAVTEKNGHSQAQSSPKGCDIFAGHANKHSVSGTDLLSSRICHPAPDQQGLSLWGAPQKPAFPHYGCNFYGFRKWSCTEASNTSPTMSAAQNAE

SEQ ID NO: 17138 - protein, 1092 aa, Artificial Sequence
  Synthetic polypeptide
TACFLHAVVVLLSSTWLLHHPCMCLIKDFERRPSVTHLLDHPFIKGVHGKVLFLQKQLAKVLQDQKHQNPVAKTRHERMHTRRPYHVEDAEKYCLEDDLVNLEVLDEDTIIHQLQKRYADLLIYTYVGDILIALNPFQNLSIYSPQFSRLYHGVKRASNPPHIFASADAAYQCMVTLSKDQCIVISGESGSGKTESAHLIVQHLTFLGKANNQTLREKILQVNSLVEAFGNSCTAINDNSSRFGKYLEMMFTPTGVVMGARISEYLLEKSRVIKQAAREKNFHIFYYIYAGLHHQKKLSDFRLPEEKPPRYIADETGRVMHDITSKESYRRQFEAIQHCFRIIGFTDKEVHSVYRILAGILNIGNIEFAAISSQHQTDKSEVPNAEALQNAASVLCISPEELQEALTSHCVVTRGETIIRANTVDRAADVRDAMSKALYGRLFSWIVNRINTLLQPDENICSAGGGMNVGILDIFGFENFQRNSFEQLCINIANEQIQYYFNQHVFALEQMEYQNEGIDAVPVEYEDNRPLLDMFLQKPLGLLALLDEESRFPQATDQTLVDKFEDNLRCKYFWRPKGVELCFGIQHYAGKVLYDASGVLEKNRDTLPADVVVVLRTSENKLLQQLFSIPLTKTGNLAQTRARITVASSSLPPHFSAGKAKVDTLEVIRHPEETTNMKRQTVASYFRYSLMDLLSKMVVGQPHFVRCIKPNDDREALQFSRERVLAQLRSTGILETVSIRRQGYSHRILFEEFVKRYYYLAFTAHQTPLASKESCVAILEKSRLDHWVLGKTKVFLKYYHVEQLNLLLREVIGRVVVLQAYTKGWLGARRYKRVREKREKGAIAIQSAWRGYDARRKFKKISNRRNESAAHNQAGDTSNQSSGPHSPVAAGTRGSAEVQDCSEPGDHKVLRGSVHRRSHSQAESNNGRTQTSSNSPAVTEKNGHSQAQSSPKGCDIFAGHANKHSVSGTDLLSSRICHPAPDQQGLSLWGAPQKPGSENGLAQKHRTPRRRCQQPKMLSSPEDTMYYNQLNGTLEYQGSKRKPRKLGQIKVLDGEDEYYKSLSPVDCIPEENNSAHPSFFSSSSKGDSFAQH

SEQ ID NO: 17139 - protein, 1092 aa, Artificial Sequence; identical to SEQ ID NO: 17138
  Synthetic polypeptide

SEQ ID NO: 17140 - protein, 1065 aa, Artificial Sequence
  Synthetic polypeptide
TACFLHAVVVLLSSTWLLHHPCMCLIKDFERRPSVTHLLDHPFIKGVHGKVLFLQKQLAKVLQDQKHQNPVAKTRHERMHTRRPYHVEDAEKYCLEDDLVNLEVLDEDTIIHQLQKRYADLLIYTYVGDILIALNPFQNLSIYSPQFSRLYHGVKRASNPPHIFASADAAYQCMVTLSKDQCIVISGESGSGKTESAHLIVQHLTFLGKANNQTLREKILQVNSLVEAFGNSCTAINDNSSRFGKYLEMMFTPTGVVMGARISEYLLEKSRVIKQAAREKNFHIFYYIYAGLHHQKKLSDFRLPEEKPPRYIADETGRVMHDITSKESYRRQFEAIQHCFRIIGFTDKEVHSVYRILAGILNIGNIEFAAISSQHQTDKSEVPNAEALQNAASVLCISPEELQEALTSHCVVTRGETIIRANTVDRAADVRDAMSKALYGRLFSWIVNRINTLLQPDENICSAGGGMNVGILDIFGFENFQRNSFEQLCINIANEQIQYYFNQHVFALEQMEYQNEGIDAVPVEYEDNRPLLDMFLQKPLGLLALLDEESRFPQATDQTLVDKFEDNLRCKYFWRPKGVELCFGIQHYAGKVLYDASGVLEKNRDTLPADVVVVLRTSENKLLQQLFSIPLTKTGNLAQTRARITVASSSLPPHFSAGKAKVDTLEVIRHPEETTNMKRQTVASYFRYSLMDLLSKMVVGQPHFVRCIKPNDDREALQFSRERVLAQLRSTGILETVSIRRQGYSHRILFEEFVKRYYYLAFTAHQTPLASKESCVAILEKSRLDHWVLGKTKVFLKYYHVEQLNLLLREVIGRVVVLQAYTKGWLGARRYKRVREKREKGAIAIQSGDTSNQSSGPHSPVAAGTRGSAEVQDCSEPGDHKVLRGSVHRRSHSQAESNNGRTQTSSNSPAVTEKNGHSQAQSSPKGCDIFAGHANKHSVSGTDLLSSRICHPAPDQQGLSLWGAPQKPGSENGLAQKHRTPRRRCQQPKMLSSPEDTMYYNQLNGTLEYQGSKRKPRKLGQIKVLDGEDEYYKSLSPVDCIPEENNSAHPSFFSSSSKGDSFAQH

SEQ ID NO: 17141 - protein, 847 aa, Artificial Sequence
  Synthetic polypeptide
TACFLHAVVVLLSSTWLLHHPCMCLIKDFERRPSVTHLLDHPFIKGVHGKVLFLQKQLAKVLQDQKHQNPVAKTRHERMHTRRPYHVEDAEKYCLEDDLVNLEVLDEDTIIHQLQKRYADLLIYTYVGDILIALNPFQNLSIYSPQFSRLYHGVKRASNPPHIFASADAAYQCMVTLSKDQCIVISGESGSGKTESAHLIVQHLTFLGKANNQTLREKILQVNSLVEAFGNSCTAINDNSSRFGKYLEMMFTPTGVVMGARISEYLLEKSRVIKQAAREKNFHIFYYIYAGLHHQKKLSDFRLPEEKPPRYIADETGRVMHDITSKESYRRQFEAIQHCFRIIGFTDKEVHSVYRILAGILNIGNIEFAAISSQHQTDKSEVPNAEALQNAASVLCISPEELQEALTSHCVVTRGETIIRANTVDRAADVRDAMSKALYGRLFSWIVNRINTLLQPDENICSAGGGMNVGILDIFGFENFQRNSFEQLCINIANEQIQYYFNQHVFALEQMEYQNEGIDAVPVEYEDNRPLLDMFLQKPLGLLALLDEESRFPQATDQTLVDKFEDNLRCKYFWRPKGVELCFGIQHYAGKVLYDASGVLEKNRDTLPADVVVVLRTSENKLLQQLFSIPLTKTGNLAQTRARITVASSSLPPHFSAGKAKVDTLEVIRHPEETTNMKRQTVASYFRYSLMDLLSKMVVGQPHFVRCIKPNDDREALQFSRERVLAQLRSTGILETVSIRRQGYSHRILFEEFVKRYYYLAFTAHQTPLASKESCVAILEKSRLDHWVLGKTKVFLKYYHVEQLNLLLREVIGRVVVLQAYTKGWLGARRYKRVREKREKGAIAIQS

SEQ ID NO: 17142 - protein, 111 aa, Artificial Sequence
  Synthetic polypeptide
TACFLHAVVVLLSSTWLLHHPCMCLIKDFERRPSVTHLLDHPFIKGVHGKVLFLQKQLAKVLQDQKHQNPVAKTRHERMHTRRPYHVEDAEKYCLEDDLVNLEVLDEVLNI

SEQ ID NO: 17143 - protein, 78 aa, Artificial Sequence
  Synthetic polypeptide
GGTAPPAPPRTWASTRPWHCWPPPVAASASRARRRPRTSCRCPTTPRWAHPPGSSTRGPPTCRRTRQAHCRPRIPAWG

SEQ ID NO: 17144 - protein, 24 aa, Artificial Sequence
  Synthetic polypeptide
VGPHPQRLPGPGQALAPGIAGRHL

SEQ ID NO: 17145 - protein, 382 aa, Artificial Sequence
  Synthetic polypeptide
WDRTPSASPDLGKHSPLALLAATCSRIGQPGAAAPPDFLQVPYDPALGSPSRLFHPWTADMPAHSPGALPPPHPSLGLTPQKTHLQPSFGAAHELPLTPPADPSYPYEFSPVKMLPSSMAALPASCAPAYVPYAAQAALPPGYSNLLPPPPPPPPPPTCRQLSPNPAPDDLPWWSIPQAGAGPGASGVPGSGLSGACAGAPHAPRFPASAAAAAAAAAALQRGLVLGPSDFAQYQSQIAALLQTKAPLAATARRCRRCRCPNCQAAGGAPEAEPGKKKQHVCHVPGCGKVYGKTSHLKAHLRWHTGERPFVCNWLFCGKSFTRSDELQRHLRTHTGEKRFACPECGKRFMRSDHLAKHVKTHQNKKLKVAEAGVKREDARDL

SEQ ID NO: 17146 - protein, 646 aa, Artificial Sequence
  Synthetic polypeptide
GASLPGRPIREVRRPSAWQLPRLRSEEPLRPAAAPSGKLISYQEFLAFESVLCAPDSMFIVAFQLFDKSGNGEVTFENVKEIFGQTIIHHHIPFNWDCEFIRLHFGHNRKKHLNYTEFTQFLQELQLEHARQAFALKDKSKSGMISGLDFSDIMVTIRSHMLTPFVEENLVSAAGGSISHQVSFSYFNAFNSLLNNMELVRKIYSTLAGTRKDVEVTKEEFAQSAIRYGQVTPLEIDILYQLADLYNASGRLTLADIERIAPLAEGALPYNLAELQRQQSPGLGRPIWLQIAESAYRFTLGSVAGAVGATAVYPIDLVKTRMQNQRGSGSVVGELMYKNSFDCFKKVLRYEGFFGLYRGLIPQLIGVAPEKAIKLTVNDFVRDKFTRRDGSVPLPAEVLAGGCAGGSQVIFTNPLEIVKIRLQVAGEITTGPRVSALNVLRDLGIFGLYKGAKACFLRDIPFSAIYFPVYAHCKLLLADENGHVGGLNLLAAGAMAGVPAASLVTPADVIKTRLQVAARAGQTTYSGVIDCFRKILREEGPSAFWKGTAARVFRSSPQFGVTLVTYELLQRWFYIDFGGLKPAGSEPTPKSRIADLPPANPDHIGGYRLATATFAGIENKFGLYLPKFKSPSVAVVQPKAAVAATQ

SEQ ID NO: 17147 - protein, 15 aa, Artificial Sequence
  Synthetic polypeptide
EVRSPSARQPPRLGS

SEQ ID NO: 17148 - protein, 15 aa, Artificial Sequence
  Synthetic polypeptide
EVRSPSARQPPRLGS

SEQ ID NO: 17149 - protein, 15 aa, Artificial Sequence
  Synthetic polypeptide
EVRSPSARQPPRLGS

SEQ ID NO: 17150 - protein, 22 aa, Artificial Sequence
  Synthetic polypeptide
GAPPPGSRPVWEVDLLSRVFGI

SEQ ID NO: 17151 - protein, 22 aa, Artificial Sequence
  Synthetic polypeptide
GAPPPGSRPVWEVDLLSRVFGI

SEQ ID NO: 17152 - protein, 22 aa, Artificial Sequence
  Synthetic polypeptide
GAPPPGSRPVWEVDLLSRVFGI

SEQ ID NO: 17153 - protein, 178 aa, Artificial Sequence
  Synthetic polypeptide
GASLPGRPIREVRRPSAWQLPRLRSEEPLRPAAAPSGKLISYQEFLAFESVLCAPDSMFIVAFQLFDKSGNGEVTFGGVLWPHRWYSSSFQAHSWNRHGGSLGEECQPRSEKMSKKFLDRLLFIIISLLTGIVNLSDCILGITGRSILTTQNSRSFSRSCNWNMQDKPLHSKTKAKVA

SEQ ID NO: 17154 - protein, 147 aa, Artificial Sequence
  Synthetic polypeptide
GASLPGRPIREVRRPSAWQLPRLRSEEPLRPAAAPSGKLISYQEFLAFESVLCAPDSMFIVAFQLFDKSGNGEVTFGFWIWGKGGVLWPHRWYSSSFQAHSWNRHGGSLGEECQPRSEGRNESCIPFQRKDENPISPVTSNAFFQLC

SEQ ID NO: 17155 - protein, 635 aa, Artificial Sequence
  Synthetic polypeptide
DVGSASAPPPRLGCEERLCPAATPSGRLISYQEFLAFESVLCAPDSMFIVAFQLFDKSGNGEVTFENVKEIFGQTIIHHHIPFNWDCEFIRLHFGHNRKKHLNYTEFTQFLQELQLEHARQAFALKDKSKSGMISGLDFSDIMVTIRSHMLTPFVEENLVSAAGGSISHQVSFSYFNAFNSLLNNMELVRKIYSTLAGTRKDVEVTKEEFAQSAIRYGQVTPLEIDILYQLADLYNASGRLTLADIERIAPLAEGALPYNLAELQRQQSPGLGRPIWLQIAESAYRFTLGSVAGAVGATAVYPIDLVKTRMQNQRGSGSVVGELMYKNSFDCFKKVLRYEGFFGLYRGLIPQLIGVAPEKAIKLTVNDFVRDKFTRRDGSVPLPAEVLAGGCAGGSQVIFTNPLEIVKIRLQVAGEITTGPRVSALNVLRDLGIFGLYKGAKACFLRDIPFSAIYFPVYAHCKLLLADENGHVGGLNLLAAGAMAGVPAASLVTPADVIKTRLQVAARAGQTTYSGVIDCFRKILREEGPSAFWKGTAARVFRSSPQFGVTLVTYELLQRWFYIDFGGLKPAGSEPTPKSRIADLPPANPDHIGGYRLATATFAGIENKFGLYLPKFKSPSVAVVQPKAAVAATQ

SEQ ID NO: 17156 - protein, 38 aa, Artificial Sequence
  Synthetic polypeptide
GASLPGRPSSEMWGAPLPHRPVWDVRSASAQPRPRLGG

SEQ ID NO: 17157 - protein, 38 aa, Artificial Sequence; identical to SEQ ID NO: 17156
  Synthetic polypeptide

SEQ ID NO: 17158 - protein, 38 aa, Artificial Sequence; identical to SEQ ID NO: 17156
  Synthetic polypeptide

SEQ ID NO: 17159 - protein, 22 aa, Artificial Sequence
  Synthetic polypeptide
GAPLPSRDPVWEVDLLSRVFGI

SEQ ID NO: 17160 - protein, 22 aa, Artificial Sequence
  Synthetic polypeptide
GAPLPSRDPVWEVDLLSRVFGI

SEQ ID NO: 17161 - protein, 22 aa, Artificial Sequence
  Synthetic polypeptide
GAPLPSRDPVWEVDLLSRVFGI

SEQ ID NO: 17162 - protein, 167 aa, Artificial Sequence
  Synthetic polypeptide
DVGSASAPPPRLGCEERLCPAATPSGRLISYQEFLAFESVLCAPDSMFIVAFQLFDKSGNGEVTFGGVLWPHRWYSSSFQAHSWNRHGGSLGEECQPRSEKMSKKFLDRLLFIIISLLTGIVNLSDCILGITGRSILTTQNSRSFSRSCNWNMQDKPLHSKTKAKVA

SEQ ID NO: 17163 - protein, 136 aa, Artificial Sequence
  Synthetic polypeptide
DVGSASAPPPRLGCEERLCPAATPSGRLISYQEFLAFESVLCAPDSMFIVAFQLFDKSGNGEVTFGFWIWGKGGVLWPHRWYSSSFQAHSWNRHGGSLGEECQPRSEGRNESCIPFQRKDENPISPVTSNAFFQLC

SEQ ID NO: 17164 - protein, 13 aa, Artificial Sequence
  Synthetic polypeptide
EKPGTWSLGDMSA

SEQ ID NO: 17165 - protein, 13 aa, Artificial Sequence
  Synthetic polypeptide
EKPGTWSLGDMSA

SEQ ID NO: 17166 - protein, 13 aa, Artificial Sequence
  Synthetic polypeptide
EKPGTWSLGDMSA

SEQ ID NO: 17167 - protein, 13 aa, Artificial Sequence
  Synthetic polypeptide
EKPGTWSLGDMSA

SEQ ID NO: 17168 - protein, 13 aa, Artificial Sequence
  Synthetic polypeptide
EKPGTWSLGDMSA

SEQ ID NO: 17169 - protein, 13 aa, Artificial Sequence
  Synthetic polypeptide
EKPGTWSLGDMSA

SEQ ID NO: 17170 - protein, 13 aa, Artificial Sequence
  Synthetic polypeptide
EKPGTWSLGDMSA

SEQ ID NO: 17171 - protein, 13 aa, Artificial Sequence
  Synthetic polypeptide
EKPGTWSLGDMSA

SEQ ID NO: 17172 - protein, 76 aa, Artificial Sequence
  Synthetic polypeptide
CGAVRKAGDLESGRHERMIANTARTVRYYRSQPFNPDAAQANKNHQDVRSYVRQLNVIDNQRTLSQMSHRLEPRRP

SEQ ID NO: 17173 - protein, 76 aa, Artificial Sequence; identical to SEQ ID NO: 17172
  Synthetic polypeptide

SEQ ID NO: 17174 - protein, 76 aa, Artificial Sequence; identical to SEQ ID NO: 17172
  Synthetic polypeptide

SEQ ID NO: 17175 - protein, 76 aa, Artificial Sequence; identical to SEQ ID NO: 17172
  Synthetic polypeptide

SEQ ID NO: 17176 - protein, 76 aa, Artificial Sequence; identical to SEQ ID NO: 17172
  Synthetic polypeptide

SEQ ID NO: 17177 - protein, 76 aa, Artificial Sequence; identical to SEQ ID NO: 17172
  Synthetic polypeptide

SEQ ID NO: 17178 - protein, 76 aa, Artificial Sequence; identical to SEQ ID NO: 17172
  Synthetic polypeptide

SEQ ID NO: 17179 - protein, 76 aa, Artificial Sequence; identical to SEQ ID NO: 17172
  Synthetic polypeptide

SEQ ID NO: 17180 - protein, 53 aa, Artificial Sequence
  Synthetic polypeptide
LSPQASSLTYLCLSLLISKVRITGPASGQCLAYSRNTQCPQSQKHHPVLWSNS

SEQ ID NO: 17181 - protein, 53 aa, Artificial Sequence; identical to SEQ ID NO: 17180
  Synthetic polypeptide

SEQ ID NO: 17182 - protein, 53 aa, Artificial Sequence; identical to SEQ ID NO: 17180
  Synthetic polypeptide

SEQ ID NO: 17183 - protein, 53 aa, Artificial Sequence; identical to SEQ ID NO: 17180
  Synthetic polypeptide

SEQ ID NO: 17184 - protein, 53 aa, Artificial Sequence; identical to SEQ ID NO: 17180
  Synthetic polypeptide

SEQ ID NO: 17185 - protein, 413 aa, Artificial Sequence
  Synthetic polypeptide
QDLPQDNAWHIAEILSVLSHRNIIQFYGVILEPPNYGIVTEYASLGSLYDYINSNRSEEMDMDHIMTWATDVAKGMHYLHMEAPVKVIHRDLKSRNVVIAADGVLKICDFGASRFHNHTTHMSLVGTFPWMAPEVIQSLPVSETCDTYSYGVVLWEMLTREVPFKGLEGLQVAWLVVEKNERLTIPSSCPRSFAELLHQCWEADAKKRPSFKQIISILESMSNDTSLPDKCNSFLHNKAEWRCEIEATLERLKKLERDLSFKEQELKERERRLKMWEQKLTEQSNTPLLLPLAARMSEESYFESKTEESNSAEMSCQITATSNGEGHGMNPSLQAMMLMGFGDIFSMNKAGAVMHSGMQINMQAKQNSSKTTSKRRGKKVNMALGFSDFDLSEGDDDDDDDGEEEDNDMDNSE

SEQ ID NO: 17186 - protein, 413 aa, Artificial Sequence; identical to SEQ ID NO: 17185
  Synthetic polypeptide

SEQ ID NO: 17187 - protein, 758 aa, Artificial Sequence
  Synthetic polypeptide
QDLPQDNAWHIAEILSVLSHRNIIQFYGVILEPPNYGIVTEYASLGSLYDYINSNRSEEMDMDHIMTWATDVAKGMHYLHMEAPVKVIHRDLKSRNVVIAADGVLKICDFGASRFHNHTTHMSLVGTFPWMAPEVIQSLPVSETCDTYSYGVVLWEMLTREVPFKGLEGLQVAWLVVEKNERLTIPSSCPRSFAELLHQCWEADAKKRPSFKQIISILESMSNDTSLPDKCNSFLHNKAEWRCEIEATLERLKKLERDLSFKEQELKERERRLKMWEQKLTEQSNTPLLPSFEIGAWTEDDVYCWVQQLVRKGDSSAEMSVYASLFKENNITGKRLLLLEEEDLKDMGIVSKGHIIHFKSAIEKLTHDYINLFHFPPLIKDSGGEPEENEEKIVNLELVFGFHLKPGTGPQDCKWKMYMEMDGDEIAITYIKDVTFNTNLPDAEILKMTKPPFVMEKWIVGIAKSQTVECTVTYESDVRTPKSTKHVHSIQWSRTKPQDEVKAVQLAIQTLFTNSDGNPGSRSDSSADCQWLDTLRMRQIASNTSLQRSQSNPILGSPFFSHFDGQDSYAAAVRRPQVPIKYQQITPVNQSRSSSPTQYGLTKNFSSLHLNSRDSGFSSGNTDTSSERGRYSDRSRNKYGRGSISLNSSPRGRYSGKSQHSTPSRGRYPGKFYRVSQSALNPHQSPDFKRSPRDLHQPNTIPGMPLHPETDSRASEEDSKVSEGGWTKVEYRKKPHRPSPAKTNKERARGDHRGWRNF

SEQ ID NO: 17188 - protein, 758 aa, Artificial Sequence; identical to SEQ ID NO: 17187
  Synthetic polypeptide

SEQ ID NO: 17189 - protein, 96 aa, Artificial Sequence
  Synthetic polypeptide
QDLPQDNAWHIAEILSVLSHRNIIQFYGVILEPPNYGIVTEYASLGSLYDYINSNRSEEMDMDHIMTWATDVAKGMHYLHMEAPVKVIHRDLKSRN

SEQ ID NO: 17190 - protein, 9 aa, Artificial Sequence
  Synthetic polypeptide
ITQSQVDKN

SEQ ID NO: 17191 - protein, 9 aa, Artificial Sequence
  Synthetic polypeptide
ITQSQVDKN

SEQ ID NO: 17192 - protein, 9 aa, Artificial Sequence
  Synthetic polypeptide
ITQSQVDKN

SEQ ID NO: 17193 - protein, 9 aa, Artificial Sequence
  Synthetic polypeptide
ITQSQVDKN

SEQ ID NO: 17194 - protein, 164 aa, Artificial Sequence
  Synthetic polypeptide
TSFLYKLPSLRLIKIKEWVDKYDPGALVIPFSGALELKLQELSAEERQKYLEANMTQSALPKIIKAGFAALQLEYFFTAGPDEVRAWTIRKGTKAPQAAGKIHTDFEKGFIMAEVMKYEDFKEEGSENAVKAAGKYRQQGRNYIVEDGDIIFFKFNTPQQPKKK

SEQ ID NO: 17195 - protein, 164 aa, Artificial Sequence; identical to SEQ ID NO: 17194
  Synthetic polypeptide

SEQ ID NO: 17196 - protein, 164 aa, Artificial Sequence; identical to SEQ ID NO: 17194
  Synthetic polypeptide

SEQ ID NO: 17197 - protein, 66 aa, Artificial Sequence
  Synthetic polypeptide
VLMRSGCLKVCSTYTFALFLLLRLCLLPVYLCHDWKFPEASPAVPHSLQNCEPVRPLFFINYPVSG

SEQ ID NO: 17198 - protein, 66 aa, Artificial Sequence; identical to SEQ ID NO: 17197
  Synthetic polypeptide

SEQ ID NO: 17199 - protein, 66 aa, Artificial Sequence; identical to SEQ ID NO: 17197
  Synthetic polypeptide

SEQ ID NO: 17200 - protein, 66 aa, Artificial Sequence; identical to SEQ ID NO: 17197
  Synthetic polypeptide

SEQ ID NO: 17201 - protein, 29 aa, Artificial Sequence
  Synthetic polypeptide
TSFLYKLPSLRLIKIKEWVDKYDPGALVI

SEQ ID NO: 17202 - protein, 46 aa, Artificial Sequence
  Synthetic polypeptide
KCVAPTPLLSSSFSGCACFLFTFAMIGSFLRPPQPCLTACRTVDKN

SEQ ID NO: 17203 - protein, 46 aa, Artificial Sequence; identical to SEQ ID NO: 17202
  Synthetic polypeptide

SEQ ID NO: 17204 - protein, 46 aa, Artificial Sequence; identical to SEQ ID NO: 17202
  Synthetic polypeptide

SEQ ID NO: 17205 - protein, 46 aa, Artificial Sequence; identical to SEQ ID NO: 17202
  Synthetic polypeptide

SEQ ID NO: 17206 - protein, 165 aa, Artificial Sequence
  Synthetic polypeptide
GLPSRASQPAELLIKIKEWVDKYDPGALVIPFSGALELKLQELSAEERQKYLEANMTQSALPKIIKAGFAALQLEYFFTAGPDEVRAWTIRKGTKAPQAAGKIHTDFEKGFIMAEVMKYEDFKEEGSENAVKAAGKYRQQGRNYIVEDGDIIFFKFNTPQQPKKK

SEQ ID NO: 17207 - protein, 165 aa, Artificial Sequence; identical to SEQ ID NO: 17206
  Synthetic polypeptide

SEQ ID NO: 17208 - protein, 165 aa, Artificial Sequence; identical to SEQ ID NO: 17206
  Synthetic polypeptide

SEQ ID NO: 17209 - protein, 51 aa, Artificial Sequence
  Synthetic polypeptide
VLMRSGCLKVCSTYTFALFLLLRLCLLPVYLCHDWKFPEASPAVPHSLQNC

SEQ ID NO: 17210 - protein, 51 aa, Artificial Sequence; identical to SEQ ID NO: 17209
  Synthetic polypeptide

SEQ ID NO: 17211 - protein, 51 aa, Artificial Sequence; identical to SEQ ID NO: 17209
  Synthetic polypeptide

SEQ ID NO: 17212 - protein, 51 aa, Artificial Sequence; identical to SEQ ID NO: 17209
  Synthetic polypeptide

SEQ ID NO: 17213 - protein, 30 aa, Artificial Sequence
  Synthetic polypeptide
GLPSRASQPAELLIKIKEWVDKYDPGALVI

SEQ ID NO: 17214 - protein, 18 aa, Artificial Sequence
  Synthetic polypeptide
DDWTAGVDFLLAVLVIMS

SEQ ID NO: 17215 - protein, 18 aa, Artificial Sequence
  Synthetic polypeptide
DDWTAGVDFLLAVLVIMS

SEQ ID NO: 17216 - protein, 18 aa, Artificial Sequence
  Synthetic polypeptide
DDWTAGVDFLLAVLVIMS

SEQ ID NO: 17217 - protein, 18 aa, Artificial Sequence
  Synthetic polypeptide
DDWTAGVDFLLAVLVIMS

SEQ ID NO: 17218 - protein, 181 aa, Artificial Sequence
  Synthetic polypeptide
FPVLEEGPGMRRLDRRGGFPSCCSRDNELIKIKEWVDKYDPGALVIPFSGALELKLQELSAEERQKYLEANMTQSALPKIIKAGFAALQLEYFFTAGPDEVRAWTIRKGTKAPQAAGKIHTDFEKGFIMAEVMKYEDFKEEGSENAVKAAGKYRQQGRNYIVEDGDIIFFKFNTPQQPKKK

SEQ ID NO: 17219 - protein, 181 aa, Artificial Sequence; identical to SEQ ID NO: 17218
  Synthetic polypeptide

SEQ ID NO: 17220 - protein, 181 aa, Artificial Sequence; identical to SEQ ID NO: 17218
  Synthetic polypeptide

SEQ ID NO: 17221 - protein, 46 aa, Artificial Sequence
  Synthetic polypeptide
FPVLEEGPGMRRLDRRGGFPSCCSRDNELIKIKEWVDKYDPGALVI

SEQ ID NO: 17222 - protein, 429 aa, Artificial Sequence
  Synthetic polypeptide
TGYLHGLKVENRPKYYGREFHGMISREAADQLLIVAEGSYLIRESQRQPGTYTLALRFGSQTRNFRLYYDGKHFVGEKRFESIHDLVTDGLITLYIETKAAEYIAKMTINPIYEHVGYTTLNREPAYKKHMPVLKETHDERDSTGQDGVSEKRLTSLVRRATLKENEQIPKYEKIHNFKVHTFRGPHWCEYCANFMWGLIAQGVKCADCGLNVHKQCSKMVPNDCKPDLKHVKKVYSCDLTTLVKAHTTKRPMVVDMCIREIESRGLNSEGLYRVSGFSDLIEDVKMAFDRDGEKADISVNMYEDINIITGALKLYFRDLPIPLITYDAYPKFIESAKIMDPDEQLETLHEALKLLPPAHCETLRYLMAHLKRVTLHEKENLMNAENLGIVFGPTLMRSPELDAMAALNDIRYQRLVVELLIKNEDILF

SEQ ID NO: 17223 - protein, 44 aa, Artificial Sequence
  Synthetic polypeptide
LTPGKDHQSLDVKTIGRKAVGEQDIYMVSRWKTDQSIMEESFMA

SEQ ID NO: 17224 - protein, 44 aa, Artificial Sequence; identical to SEQ ID NO: 17223
  Synthetic polypeptide

SEQ ID NO: 17225 - protein, 37 aa, Artificial Sequence
  Synthetic polypeptide
VNRIFTWSQGGKQTKVLWKRVSWHDLQRSSRPALDCG

SEQ ID NO: 17226 - protein, 37 aa, Artificial Sequence; identical to SEQ ID NO: 17225
  Synthetic polypeptide

SEQ ID NO: 17227 - protein, 403 aa, Artificial Sequence
  Synthetic polypeptide
TGYLHGLKVENRPKYYGREFHGMISREAADQLLIVAEGSYLIRESQRQPGTYTLALRFGSQTRNFRLYYDGKHFVGEKRFESIHDLVTDGLITLYIETKAAEYIAKMTINPIYEHVGYTTLNREPAYKKHMPVLKETHDERDSTGQDGVSEKRVHTFRGPHWCEYCANFMWGLIAQGVKCADCGLNVHKQCSKMVPNDCKPDLKHVKKVYSCDLTTLVKAHTTKRPMVVDMCIREIESRGLNSEGLYRVSGFSDLIEDVKMAFDRDGEKADISVNMYEDINIITGALKLYFRDLPIPLITYDAYPKFIESAKIMDPDEQLETLHEALKLLPPAHCETLRYLMAHLKRVTLHEKENLMNAENLGIVFGPTLMRSPELDAMAALNDIRYQRLVVELLIKNEDILF

SEQ ID NO: 17228 - protein, 89 aa, Artificial Sequence
  Synthetic polypeptide
FFCLFVWRELRGQEPARPSIQAGTHGIHERAAGGIGKGIPLQPLLVPAAPRGDGQPAESHGTPDQDLVPEPAHEVQEGPEGQGHPALAG

SEQ ID NO: 17229 - protein, 89 aa, Artificial Sequence; identical to SEQ ID NO: 17228
  Synthetic polypeptide

SEQ ID NO: 17230 - protein, 89 aa, Artificial Sequence; identical to SEQ ID NO: 17228
  Synthetic polypeptide

SEQ ID NO: 17231 - protein, 258 aa, Artificial Sequence
  Synthetic polypeptide
FFVCLFGESCEDKSPPGPASKRVRTAYTSAQLVELEKEFHFNRYLCRPRRVEMANLLNLTERQIKIWFQNRRMKYKKDQKAKGILHSPASQSPERSPPLGGAAGHVAYSGQLPPVPGLAYDAPSPPAFAKSQPNMYGLAAYTAPLSSCLPQQKRYAAPEFEPHPMASNGGGFASANLQGSPVYVGGNFVESMAPASGPVFNLGHLSHPSSASVDYSCAAQIPGNHHHGPCDPHPTYTDLSAHHSSQGRLPEAPKLTHL

SEQ ID NO: 17232 - protein, 258 aa, Artificial Sequence; identical to SEQ ID NO: 17231
  Synthetic polypeptide

SEQ ID NO: 17233 - protein, 258 aa, Artificial Sequence; identical to SEQ ID NO: 17231
  Synthetic polypeptide

SEQ ID NO: 17234 - protein, 56 aa, Artificial Sequence
  Synthetic polypeptide
FLFVCLERAARTRARQAQHPSGYARHTRARSWWNWKRNSTSTATCAGRAAWRWPTC

SEQ ID NO: 17235 - protein, 56 aa, Artificial Sequence; identical to SEQ ID NO: 17234
  Synthetic polypeptide

SEQ ID NO: 17236 - protein, 56 aa, Artificial Sequence; identical to SEQ ID NO: 17234
  Synthetic polypeptide

SEQ ID NO: 17237 - protein, 201 aa, Artificial Sequence
  Synthetic polypeptide
YSRQYQEARETYLDLDSKVRTLKKFIKLLGEIMEHRFKTYQQFRRCLTLRCKLYFDNLLSQRAYCGKMNFDHKNETLSISVQPGEGNKAAFNDMRALSGGERSFSTVCFILSLWSIAESPFRCLDEFDVYMDMVNRRIAMDLILKMADSQRFRQFILLTPQSMSSLPSSKLIRILRMSDPERGQTTLPFRPVTQEEDDDQR

SEQ ID NO: 17238 - protein, 201 aa, Artificial Sequence; identical to SEQ ID NO: 17237
  Synthetic polypeptide

SEQ ID NO: 17239 - protein, 201 aa, Artificial Sequence; identical to SEQ ID NO: 17237
  Synthetic polypeptide

SEQ ID NO: 17240 - protein, 201 aa, Artificial Sequence; identical to SEQ ID NO: 17237
  Synthetic polypeptide

SEQ ID NO: 17241 - protein, 24 aa, Artificial Sequence
  Synthetic polypeptide
DENNTNILGSTKKQERPILIWIVK

SEQ ID NO: 17242 - protein, 24 aa, Artificial Sequence
  Synthetic polypeptide
DENNTNILGSTKKQERPILIWIVK

SEQ ID NO: 17243 - protein, 24 aa, Artificial Sequence
  Synthetic polypeptide
DENNTNILGSTKKQERPILIWIVK

SEQ ID NO: 17244 - protein, 24 aa, Artificial Sequence
  Synthetic polypeptide
DENNTNILGSTKKQERPILIWIVK

SEQ ID NO: 17245 - protein, 16 aa, Artificial Sequence
  Synthetic polypeptide
EINKSLTLQIRPFSSN

SEQ ID NO: 17246 - protein, 16 aa, Artificial Sequence
  Synthetic polypeptide
EINKSLTLQIRPFSSN

SEQ ID NO: 17247 - protein, 16 aa, Artificial Sequence
  Synthetic polypeptide
EINKSLTLQIRPFSSN

SEQ ID NO: 17248 - protein, 16 aa, Artificial Sequence
  Synthetic polypeptide
EINKSLTLQIRPFSSN

SEQ ID NO: 17249 - protein, 1038 aa, Artificial Sequence
  Synthetic polypeptide
SWISFKRSINPSPCKLGRFRQIEVLTTVANAFSSLYSQVSGTPLQRIGSMSSVTSNKETDPPPPLTRSNTANRLMKTLSKLNLCVDKTEKGESSSPSPSAEKGKILNVSVIEESGNKNDQKSQKIMKKKESSSMLATVKEEVSGSSAAVTENADSDRISDEANSNFNQGTENEQSKETQSHESKLGEESGIVESKLDSDFNISSHSELENSSELKSVHISTPEKEPCAPLTIPSIRNIMTQQKDSFEMEEVQSTEGEAPHVPATYQLGLTKSKRDHLLRTASQHSDSSGFAEDSTDCLSLNHLQVQESLQAMGSSADSCDSETTVTSLGEDLATPTAQDQPYFNESEEESLVPLQKGLEKAAAVADKRKSGSQDFPQCNTIENTGTKQSTCSPGDHIIEITEVEEDLFPAETVELLREASAESDVGKSSESEFTQYTTHHILKSLASIEAKCSDMSSENTTGPPSSMDRVNTALQRAQMKVCSLSNQRMGRSLLKSKDLLKQRYLFAKAGYPLRRSQSLPTTLLSPVRVVSSVNVRLSPGKETRCSPPSFTYKYTPEEEQELEKRVMEHDGQSLVKSTIFISPSSVKKEEAPQSEAPRVEECHHGRTPTCSRLAPPPMSQSTCSLHSIHSEWQERPLCEHTRTLSTHSVPNISGATCSAFASPFGCPYSHRHATYPYRVCSVNPPSAIEMQLRRVLHDIRNSLQNLSQYPMMRGPDPAAAPYSTQKSSVLPLYENTFQELQVMRRSLNLFRTQMMDLELAMLRQQTMVYHHMTEEERFEVDQLQGLRNSVRMELQDLELQLEERLLGLEEQLRAVRMPSPFRSSALMGMCGSRSADNLSCPSPLNVMEPVTELMQEQSYLKSELGLGLGEMGFEIPPGESSESVFSQATSESSSVCSGPSHANRRTGVPSTASVGKSKTPLVARKKVFRASVALTPTAPSRTGSVQTPPDLESSEEVDAAEGAPEVVGPKSEVEEGHGKLPSMPAAEEMHKNVEQDELQQVIREIKESIVGEIRREIVSGLLAAVSSSKASNSKQDYH

SEQ ID NO: 17250 - protein, 1035 aa, Artificial Sequence
  Synthetic polypeptide
SWISFKRSINPSPCKLGRFRQIEVLTTVANAFSSLYSQVSGTPLQRIGSMSSVTSNKETDPPPPLTRSNTANRLMKTLSKLNLCVDKTEKGESSSPSPSAEKGKILNVSVIEESGNKNDQKSQKIMKKKESSSMLATVKEEVSGSSAAVTENADSDRISDEANSNFNQGTENEQSKETQSHESKLGEESGIVESKLDSDFNISSHSELENSSELKSVHISTPEKEPCAPLTIPSIRNIMTQQKDSFEMEEVQSTEGEAPHVPATYQLGLTKSKRDHLLRTASQHSDSSGFAEDSTDCLSLNHLQVQESLQAMGSSADSCDSETTVTSLGEDLATPTAQDQPYFNESEEESLVPLQKGLEKAAAVADKRKSGSQDFPQCNTIENTGTKQSTCSPGDHIIEITEVEEDLFPAETVELLREASAESDVGKSSESEFTQYTTHHILKSLASIEAKCSDMSSENTTGPPSSMDRVNTALQRAQMKVCSLSNQRMGRSLLKSKDLLKQRYLFAKAGYPLRRSQSLPTTLLSPVRVVSSVNVRLSPGKETRCSPPSFTYKYTPEEEQELEKRVMEHDGQSLVKSTIFISPSSVKKEEAPQSEAPRVEECHHGRTPTCSRLAPPPMSQSTCSLHSIHSEWQERPLCEHTRTLSTHSVPNISGATCSAFASPFGCPYSHRHATYPYRVCSVNPPSAIEMQLRRVLHDIRNSLQNLSQYPMMRGPDPAAAPYSTQKSSVLPLYENTFQELQVMRRSLNLFRTQMMDLELAMLRQQTMVYHHMTEEERFEVDQLQGLRNSVRMELQDLELQLEERLLGLEEQLRAVRMPSPFRSSALMGMCGSRSADNLSCPSPLNVMEPVTELMQEQSYLKSELGLGLGEMGFEIPPGESSESVFSQATSESSSVCSGPSHANRRTGVPSTASVGKSKTPLVARKKVFRASVALTPTAPSRTGSVQTPPDLESSEEVDAAEGAPEVVGPKSEVEEGHGKLPSMPAAEEMHKNVEQDELQQVIREVGMDPISCVILELSMICTGGGVICALEDTCC

SEQ ID NO: 17251 - protein, 1016 aa, Artificial Sequence
  Synthetic polypeptide
SWISFKRSINPSPCKLGRFRQIEVLTTVANAFSSLYSQVSGTPLQRIGSMSSVTSNKETDPPPPLTRSNTANRLMKTLSKLNLCVDKTEKGESSSPSPSAEKGKILNVSVIEESGNKNDQKSQKIMKKKESSSMLATVKEEVSGSSAAVTENADSDRISDEANSNFNQGTENEQSKETQSHESKLGEESGIVESKLDSDFNISSHSELENSSELKSVHISTPEKEPCAPLTIPSIRNIMTQQKDSFEMEEVQSTEGEAPHVPATYQLGLTKSKRDHLLRTASQHSDSSGFAEDSTDCLSLNHLQVQESLQAMGSSADSCDSETTVTSLGEDLATPTAQDQPYFNESEEESLVPLQKGLEKAAAVADKRKSGSQDFPQCNTIENTGTKQSTCSPGDHIIEITEVEEDLFPAETVELLREASAESDVGKSSESEFTQYTTHHILKSLASIEAKCSDMSSENTTGPPSSMDRVNTALQRAQMKVCSLSNQRMGRSLLKSKDLLKQRYLFAKAGYPLRRSQSLPTTLLSPVRVVSSVNVRLSPGKETRCSPPSFTYKYTPEEEQELEKRVMEHDGQSLVKSTIFISPSSVKKEEAPQSEAPRVEECHHGRTPTCSRLAPPPMSQSTCSLHSIHSEWQERPLCEHTRTLSTHSVPNISGATCSAFASPFGCPYSHRHATYPYRVCSVNPPSAIEMQLRRVLHDIRNSLQNLSQYPMMRGPDPAAAPYSTQKSSVLPLYENTFQELQVMRRSLNLFRTQMMDLELAMLRQQTMVYHHMTEEERFEVDQLQGLRNSVRMELQDLELQLEERLLGLEEQLRAVRMPSPFRSSALMVTELMQEQSYLKSELGLGLGEMGFEIPPGESSESVFSQATSESSSVCSGPSHANRRTGVPSTASVGKSKTPLVARKKVFRASVALTPTAPSRTGSVQTPPDLESSEEVDAAEGAPEVVGPKSEVEEGHGKLPSMPAAEEMHKNVEQDELQQVIREIKESIVGEIRREIVSGLLAAVSSSKASNSKQDYH

SEQ ID NO: 17252 - protein, 1016 aa, Artificial Sequence; identical to SEQ ID NO: 17251
  Synthetic polypeptide

SEQ ID NO: 17253 - protein, 39 aa, Artificial Sequence
  Synthetic polypeptide
ELLKEDVPILVSPMRIEMSGSQNHAKYVSVTQDPFSAMT

SEQ ID NO: 17254 - protein, 39 aa, Artificial Sequence; identical to SEQ ID NO: 17253
  Synthetic polypeptide

SEQ ID NO: 17255 - protein, 26 aa, Artificial Sequence
  Synthetic polypeptide
AHKAFGSMKQNRYSNYSEQSLQDRSC

SEQ ID NO: 17256 - protein, 26 aa, Artificial Sequence
  Synthetic polypeptide
AHKAFGSMKQNRYSNYSEQSLQDRSC

SEQ ID NO: 17257 - protein, 1456 aa, Artificial Sequence
  Synthetic polypeptide
SKIDIQTTQSSPYKIGAVEGGCSHLGQSYADRDVWKPEPCQICVCDSGSVLCDDIICDDQELDCPNPEIPFGECCAVCPQPPTAPTRPPNGQGPQGPKGDPGPPGIPGRNGDPGIPGQPGSPGSPGPPGICESCPTGPQNYSPQYDSYDVKSGVAVGGLAGYPGPAGPPGPPGPPGTSGHPGSPGSPGYQGPPGEPGQAGPSGPPGPPGAIGPSGPAGKDGESGRPGRPGERGLPGPPGIKGPAGIPGFPGMKGHRGFDGRNGEKGETGAPGLKGENGLPGENGAPGPMGPRGAPGERGRPGLPGAAGARGNDGARGSDGQPGPPGPPGTAGFPGSPGAKGEVGPAGSPGSNGAPGQRGEPGPQGHAGAQGPPGPPGINGSPGGKGEMGPAGIPGAPGLMGARGPPGPAGANGAPGLRGGAGEPGKNGAKGEPGPRGERGEAGIPGVPGAKGEDGKDGSPGEPGANGLPGAAGERGAPGFRGPAGPNGIPGEKGPAGERGAPGPAGPRGAAGEPGRDGVPGGPGMRGMPGSPGGPGSDGKPGPPGSQGESGRPGPPGPSGPRGQPGVMGFPGPKGNDGAPGKNGERGGPGGPGPQGPPGKNGETGPQGPPGPTGPGGDKGDTGPPGPQGLQGLPGTGGPPGENGKPGEPGPKGDAGAPGAPGGKGDAGAPGERGPPGLAGAPGLRGGAGPPGPEGGKGAAGPPGPPGAAGTPGLQGMPGERGGLGSPGPKGDKGEPGGPGADGVPGKDGPRGPTGPIGPPGPAGQPGDKGEGGAPGLPGIAGPRGSPGERGETGPPGPAGFPGAPGQNGEPGGKGERGAPGEKGEGGPPGVAGPPGGSGPAGPPGPQGVKGERGSPGGPGAAGFPGARGLPGPPGSNGNPGPPGPSGSPGKDGPPGPAGNTGAPGSPGVSGPKGDAGQPGEKGSPGAQGPPGAPGPLGIAGITGARGLAGPPGMPGPRGSPGPQGVKGESGKPGANGLSGERGPPGPQGLPGLAGTAGEPGRDGNPGSDGLPGRDGSPGGKGDRGENGSPGAPGAPGHPGPPGPVGPAGKSGDRGESGPAGPAGAPGPAGSRGAPGPQGPRGDKGETGERGAAGIKGHRGFPGNPGAPGSPGPAGQQGAIGSPGPAGPRGPVGPSGPPGKDGTSGHPGPIGPPGPRGNRGERGSEGSPGHPGQPGPPGPPGAPGPCCGGVGAAAIAGIGGEKAGGFAPYYGDEPMDFKINTDEIMTSLKSVNGQIESLISPDGSRKNPARNCRDLKFCHPELKSGEYWVDPNQGCKLDAIKVFCNMETGETCISANPLNVPRKHWWTDSSAEKKHVWFGESMDGGFQFSYGNPELPEDVLDVHLAFLRLLSSRASQNITYHCKNSIAYMDQASGNVKKALKLMGSNEGEFKAEGNSKFTYTVLEDGCTKHTGEWSKTVFEYRTRKAVRLPIVDIAPYDIGGPDQEFGVDVGPVCFL

SEQ ID NO: 17258 - protein, 1153 aa, Artificial Sequence
  Synthetic polypeptide
SKIDIQTTQSSPYKIGAVEGGCSHLGQSYADRDVWKPEPCQICVCDSGSVLCDDIICDDQELDCPNPEIPFGECCAVCPQPPTAPTRPPNGQGPQGPKGDPGPPGIPGRNGDPGIPGQPGSPGSPGPPGICESCPTGPQNYSPQYDSYDVKSGVAVGGLAGYPGPAGPPGPPGPPGTSGHPGSPGSPGYQGPPGEPGQAGPSGPPGPPGAIGPSGPAGKDGESGRPGRPGERGLPGPPGIKGPAGIPGFPGMKGHRGFDGRNGEKGETGAPGLKGENGLPGENGAPGPMGPRGAPGERGRPGLPGAAGARGNDGARGSDGQPGPPGPPGTAGFPGSPGAKGEVGPAGSPGSNGAPGQRGEPGPQGHAGAQGPPGPPGINGSPGGKGEMGPAGIPGAPGLMGARGPPGPAGANGAPGLRGGAGEPGKNGAKGEPGPRGERGEAGIPGVPGAKGEDGKDGSPGEPGANGLPGAAGERGAPGFRGPAGPNGIPGEKGPAGERGAPGPAGPRGAAGEPGRDGVPGGPGMRGMPGSPGGPGSDGKPGPPGSQGESGRPGPPGPSGPRGQPGVMGFPGPKGNDGAPGKNGERGGPGGPGPQGPPGKNGETGPQGPPGPTGPGGDKGDTGPPGPQGLQGLPGTGGPPGENGKPGEPGPKGDAGAPGAPGGKGDAGAPGERGPPGLAGAPGLRGGAGPPGPEGGKGAAGPPGPPGAAGTPGLQGMPGERGGLGSPGPKGDKGEPGGPGADGVPGKDGPRGPTGPIGPPGPAGQPGDKGEGGAPGLPGIAGPRGSPGERGETGPPGPAGFPGAPGQNGEPGGKGERGAPGEKGEGGPPGLFGPPGKDGTSGHPGPIGPPGPRGNRGERGSEGSPGHPGQPGPPGPPGAPGPCCGGVGAAAIAGIGGEKAGGFAPYYGDEPMDFKINTDEIMTSLKSVNGQIESLISPDGSRKNPARNCRDLKFCHPELKSGEYWVDPNQGCKLDAIKVFCNMETGETCISANPLNVPRKHWWTDSSAEKKHVWFGESMDGGFQFSYGNPELPEDVLDVHLAFLRLLSSRASQNITYHCKNSIAYMDQASGNVKKALKLMGSNEGEFKAEGNSKFTYTVLEDGCTKHTGEWSKTVFEYRTRKAVRLPIVDIAPYDIGGPDQEFGVDVGPVCFL

SEQ ID NO: 17259 - protein, 880 aa, Artificial Sequence
  Synthetic polypeptide
YGAPGKNGERGGPGGPGPQGPPGKNGETGPQGPPGPTGPGGDKGDTGPPGPQGLQGLPGTGGPPGENGKPGEPGPKGDAGAPGAPGGKGDAGAPGERGPPGLAGAPGLRGGAGPPGPEGGKGAAGPPGPPGAAGTPGLQGMPGERGGLGSPGPKGDKGEPGGPGADGVPGKDGPRGPTGPIGPPGPAGQPGDKGEGGAPGLPGIAGPRGSPGERGETGPPGPAGFPGAPGQNGEPGGKGERGAPGEKGEGGPPGVAGPPGGSGPAGPPGPQGVKGERGSPGGPGAAGFPGARGLPGPPGSNGNPGPPGPSGSPGKDGPPGPAGNTGAPGSPGVSGPKGDAGQPGEKGSPGAQGPPGAPGPLGIAGITGARGLAGPPGMPGPRGSPGPQGVKGESGKPGANGLSGERGPPGPQGLPGLAGTAGEPGRDGNPGSDGLPGRDGSPGGKGDRGENGSPGAPGAPGHPGPPGPVGPAGKSGDRGESGPAGPAGAPGPAGSRGAPGPQGPRGDKGETGERGAAGIKGHRGFPGNPGAPGSPGPAGQQGAIGSPGPAGPRGPVGPSGPPGKDGTSGHPGPIGPPGPRGNRGERGSEGSPGHPGQPGPPGPPGAPGPCCGGVGAAAIAGIGGEKAGGFAPYYGDEPMDFKINTDEIMTSLKSVNGQIESLISPDGSRKNPARNCRDLKFCHPELKSGEYWVDPNQGCKLDAIKVFCNMETGETCISANPLNVPRKHWWTDSSAEKKHVWFGESMDGGFQFSYGNPELPEDVLDVHLAFLRLLSSRASQNITYHCKNSIAYMDQASGNVKKALKLMGSNEGEFKAEGNSKFTYTVLEDGCTKHTGEWSKTVFEYRTRKAVRLPIVDIAPYDIGGPDQEFGVDVGPVCFL

SEQ ID NO: 17260 - protein, 577 aa, Artificial Sequence
  Synthetic polypeptide
YGAPGKNGERGGPGGPGPQGPPGKNGETGPQGPPGPTGPGGDKGDTGPPGPQGLQGLPGTGGPPGENGKPGEPGPKGDAGAPGAPGGKGDAGAPGERGPPGLAGAPGLRGGAGPPGPEGGKGAAGPPGPPGAAGTPGLQGMPGERGGLGSPGPKGDKGEPGGPGADGVPGKDGPRGPTGPIGPPGPAGQPGDKGEGGAPGLPGIAGPRGSPGERGETGPPGPAGFPGAPGQNGEPGGKGERGAPGEKGEGGPPGLFGPPGKDGTSGHPGPIGPPGPRGNRGERGSEGSPGHPGQPGPPGPPGAPGPCCGGVGAAAIAGIGGEKAGGFAPYYGDEPMDFKINTDEIMTSLKSVNGQIESLISPDGSRKNPARNCRDLKFCHPELKSGEYWVDPNQGCKLDAIKVFCNMETGETCISANPLNVPRKHWWTDSSAEKKHVWFGESMDGGFQFSYGNPELPEDVLDVHLAFLRLLSSRASQNITYHCKNSIAYMDQASGNVKKALKLMGSNEGEFKAEGNSKFTYTVLEDGCTKHTGEWSKTVFEYRTRKAVRLPIVDIAPYDIGGPDQEFGVDVGPVCFL

SEQ ID NO: 17261 - protein, 34 aa, Artificial Sequence
  Synthetic polypeptide
HKGVLWVLLVLLVLLAQLASLEIRVKVVPPDFQV

SEQ ID NO: 17262 - protein, 34 aa, Artificial Sequence; identical to SEQ ID NO: 17261
  Synthetic polypeptide

SEQ ID NO: 17263 - protein, 34 aa, Artificial Sequence
  Synthetic polypeptide
ERERWMWLWRHDTRESYGSYWSYWSSWPSWPAWR

SEQ ID NO: 17264 - protein, 34 aa, Artificial Sequence; identical to SEQ ID NO: 17263
  Synthetic polypeptide

SEQ ID NO: 17265 - protein, 730 aa, Artificial Sequence
  Synthetic polypeptide
WLLAVKNEKERDGCGYGDMTQGSLMGPTGPIGPPGPAGQPGDKGEGGAPGLPGIAGPRGSPGERGETGPPGPAGFPGAPGQNGEPGGKGERGAPGEKGEGGPPGVAGPPGGSGPAGPPGPQGVKGERGSPGGPGAAGFPGARGLPGPPGSNGNPGPPGPSGSPGKDGPPGPAGNTGAPGSPGVSGPKGDAGQPGEKGSPGAQGPPGAPGPLGIAGITGARGLAGPPGMPGPRGSPGPQGVKGESGKPGANGLSGERGPPGPQGLPGLAGTAGEPGRDGNPGSDGLPGRDGSPGGKGDRGENGSPGAPGAPGHPGPPGPVGPAGKSGDRGESGPAGPAGAPGPAGSRGAPGPQGPRGDKGETGERGAAGIKGHRGFPGNPGAPGSPGPAGQQGAIGSPGPAGPRGPVGPSGPPGKDGTSGHPGPIGPPGPRGNRGERGSEGSPGHPGQPGPPGPPGAPGPCCGGVGAAAIAGIGGEKAGGFAPYYGDEPMDFKINTDEIMTSLKSVNGQIESLISPDGSRKNPARNCRDLKFCHPELKSGEYWVDPNQGCKLDAIKVFCNMETGETCISANPLNVPRKHWWTDSSAEKKHVWFGESMDGGFQFSYGNPELPEDVLDVHLAFLRLLSSRASQNITYHCKNSIAYMDQASGNVKKALKLMGSNEGEFKAEGNSKFTYTVLEDGCTKHTGEWSKTVFEYRTRKAVRLPIVDIAPYDIGGPDQEFGVDVGPVCFL

SEQ ID NO: 17266 - protein, 427 aa, Artificial Sequence
  Synthetic polypeptide
WLLAVKNEKERDGCGYGDMTQGSLMGPTGPIGPPGPAGQPGDKGEGGAPGLPGIAGPRGSPGERGETGPPGPAGFPGAPGQNGEPGGKGERGAPGEKGEGGPPGLFGPPGKDGTSGHPGPIGPPGPRGNRGERGSEGSPGHPGQPGPPGPPGAPGPCCGGVGAAAIAGIGGEKAGGFAPYYGDEPMDFKINTDEIMTSLKSVNGQIESLISPDGSRKNPARNCRDLKFCHPELKSGEYWVDPNQGCKLDAIKVFCNMETGETCISANPLNVPRKHWWTDSSAEKKHVWFGESMDGGFQFSYGNPELPEDVLDVHLAFLRLLSSRASQNITYHCKNSIAYMDQASGNVKKALKLMGSNEGEFKAEGNSKFTYTVLEDGCTKHTGEWSKTVFEYRTRKAVRLPIVDIAPYDIGGPDQEFGVDVGPVCFL

SEQ ID NO: 17267 - protein, 32 aa, Artificial Sequence
  Synthetic polypeptide
EVLSLPEGHSCRHTSLRLIETSLLYLRNTWTK

SEQ ID NO: 17268 - protein, 32 aa, Artificial Sequence; identical to SEQ ID NO: 17267
  Synthetic polypeptide

SEQ ID NO: 17269 - protein, 32 aa, Artificial Sequence; identical to SEQ ID NO: 17267
  Synthetic polypeptide

SEQ ID NO: 17270 - protein, 32 aa, Artificial Sequence; identical to SEQ ID NO: 17267
  Synthetic polypeptide

SEQ ID NO: 17271 - protein, 32 aa, Artificial Sequence; identical to SEQ ID NO: 17267
  Synthetic polypeptide

SEQ ID NO: 17272 - protein, 17 aa, Artificial Sequence
  Synthetic polypeptide
LERCFLSLKVTAAGIPV

SEQ ID NO: 17273 - protein, 17 aa, Artificial Sequence
  Synthetic polypeptide
LERCFLSLKVTAAGIPV

SEQ ID NO: 17274 - protein, 17 aa, Artificial Sequence
  Synthetic polypeptide
LERCFLSLKVTAAGIPV

SEQ ID NO: 17275 - protein, 17 aa, Artificial Sequence
  Synthetic polypeptide
LERCFLSLKVTAAGIPV

SEQ ID NO: 17276 - protein, 17 aa, Artificial Sequence
  Synthetic polypeptide
LERCFLSLKVTAAGIPV

SEQ ID NO: 17277 - protein, 96 aa, Artificial Sequence
  Synthetic polypeptide
RSQLQAYQSKIDRDKSFILEEHMDKINSCFSANTVEEIIENLQQDGSSFALEQLKVINKMSPTSLKITLRQLMEGSSKTLQEVLTMEYRLSQACMF

SEQ ID NO: 17278 - protein, 144 aa, Artificial Sequence
  Synthetic polypeptide
RSQLQAYQSKIDRDKSFILEEHMDKINSCFSANTVEEIIENLQQDGSSFALEQLKVINKMSPTSLKITLRQLMEGSSKTLQEVLTMEYRLSQACMRGHDFHEGVRAVLIDKDQSPKWKPADLKEVTEEDLNNHFKSLGSSDLKF

SEQ ID NO: 17279 - protein, 144 aa, Artificial Sequence; identical to SEQ ID NO: 17278
  Synthetic polypeptide

SEQ ID NO: 17280 - protein, 126 aa, Artificial Sequence
  Synthetic polypeptide
RSQLQAYQSKIDRDKSFILEEHMDKINSCFSANTVEEIIENLQQDGSSFALEQLKVINKMSPTSLKITLRQLMEGSSKTLQEVLTMEYRLSQACMRGHDFHEGVRAGKWQMGTYHFGEMGFVSICC

SEQ ID NO: 17281 - protein, 106 aa, Artificial Sequence
  Synthetic polypeptide
RSQLQAYQSKIDRDKSFILEEHMDKINSCFSANTVEEIIENLQQDGSSFALEQLKVINKMSPTSLKITLRQLMEGSSKTLQEVLTMEYRLSQACMRGHDFHEGVRA

SEQ ID NO: 17282 - protein, 21 aa, Artificial Sequence
  Synthetic polypeptide
QGTLALSGDIFDCLGKGQGEC

SEQ ID NO: 17283 - protein, 21 aa, Artificial Sequence
  Synthetic polypeptide
QGTLALSGDIFDCLGKGQGEC

SEQ ID NO: 17284 - protein, 116 aa, Artificial Sequence
  Synthetic polypeptide
RGHWHYLETFLIVWGRGRENANKLEESAREHHIPCPEHYNGFCMHGKCEHSINMQEPSCRCDAGYTGQHCEKKDYSVLYVVPGPVRFQYVLIAAVIGTIQIAVICVVVLCITRAKL

SEQ ID NO: 17285 - protein, 12 aa, Artificial Sequence
  Synthetic polypeptide
LSGEGAGRMLTN

SEQ ID NO: 17286 - protein, 12 aa, Artificial Sequence
  Synthetic polypeptide
LSGEGAGRMLTN

SEQ ID NO: 17287 - protein, 144 aa, Artificial Sequence
  Synthetic polypeptide
RGHWHYLETFLIVWGRGRENANKLEESAREHHIPCPEHYNGFCMHGKCEHSINMQEPSCRCDAGYTGQHCEKKDYSVLYVVPGPVRFQYVLIAAVIGTIQIAVICVVVLCITRKCPRSNRIHRQKQNTGHYSSDNTTRASTRLI

SEQ ID NO: 17288 - protein, 8 aa, Artificial Sequence
  Synthetic polypeptide
TRSVCHGP

SEQ ID NO: 17289 - protein, 8 aa, Artificial Sequence
  Synthetic polypeptide
TRSVCHGP

SEQ ID NO: 17290 - protein, 208 aa, Artificial Sequence
  Synthetic polypeptide
ARREVCATVHEGSGETSQKETSTCDICQFGAECDEDAEDVWCVCNIDCSQTNFNPLCASDGKSYDNACQIKEASCQKQEKIEVMSLGRCQDNTTTTTKSEDGHYARTDYAENANKLEESAREHHIPCPEHYNGFCMHGKCEHSINMQEPSCRCDAGYTGQHCEKKDYSVLYVVPGPVRFQYVLIAAVIGTIQIAVICVVVLCITRAKL

SEQ ID NO: 17291 - protein, 149 aa, Artificial Sequence
  Synthetic polypeptide
HANSDFLFNSSAVWRSVLIRILKPRVVLAGKSTRLDEKCVPRSMKALEKLVKRRHPPVIFASLVQNVTKMPRMSGVCVILTVLKPTSIPSALLMGNLMIMHAKSKKHRVRNRRKLKSCLWVDVKITQLQLLSLKMGIMQEQIMQRMLTN

SEQ ID NO: 17292 - protein, 149 aa, Artificial Sequence; identical to SEQ ID NO: 17291
  Synthetic polypeptide

SEQ ID NO: 17293 - protein, 236 aa, Artificial Sequence
  Synthetic polypeptide
ARREVCATVHEGSGETSQKETSTCDICQFGAECDEDAEDVWCVCNIDCSQTNFNPLCASDGKSYDNACQIKEASCQKQEKIEVMSLGRCQDNTTTTTKSEDGHYARTDYAENANKLEESAREHHIPCPEHYNGFCMHGKCEHSINMQEPSCRCDAGYTGQHCEKKDYSVLYVVPGPVRFQYVLIAAVIGTIQIAVICVVVLCITRKCPRSNRIHRQKQNTGHYSSDNTTRASTRLI

SEQ ID NO: 17294 - protein, 18 aa, Artificial Sequence
  Synthetic polypeptide
TGQGHELIKLHQTQKSSR

SEQ ID NO: 17295 - protein, 18 aa, Artificial Sequence
  Synthetic polypeptide
TGQGHELIKLHQTQKSSR

SEQ ID NO: 17296 - protein, 33 aa, Artificial Sequence
  Synthetic polypeptide
MDKVMNSSSFIKPRSHQDKFNSGYSNKSGKLLS

SEQ ID NO: 17297 - protein, 33 aa, Artificial Sequence; identical to SEQ ID NO: 17296
  Synthetic polypeptide

SEQ ID NO: 17298 - protein, 458 aa, Artificial Sequence
  Synthetic polypeptide
THQASSNPEVIKINSILDIVTKVENYYLKGYIVGAIHPVIQPVGQRKHLPASYLYRVVLLRLKLSPKNSAAPSGQRRPRLVIEECPLTSEAQTNDAAKELIEKINVAAKRGMKFVGFISQHYSPSKFCNGTNHDGDIESMLHVRHGSDENCRSWNEGTLSGQSSESGIEEELHHESGQYQMEQNGSPTSSKSRKGEASDNKLYTVFNAFDDDSTSWAYQEGILSMKVTRKGSVISTLDADWLELTTFYYKQGLSLIDSFVFWETSKGEHLPKSLEGFFIYEEEGSGVPGSSRKGNDAIVVEQWTVIEGCEIKTDYGPLLHTLAEFGWLLTSVLPTPVLRHDSEGNLATKQIVFLQRPVMWNSAAQTPDKKASRHIKGEDKNKATSRSIGLDTTSSQPAESRHLPEECRLSPSRECWTKEGRLAQHNSFSGFSSSDNVLRELDDGQFDQEDGVTQVTCM

SEQ ID NO: 17299 - protein, 73 aa, Artificial Sequence
  Synthetic polypeptide
THQASSNPEVIKINSILDIVTKVENYYLKGYIVGAIHPVIQPVGQRKHLPASYLYRVVLLRLKLSPKNSAAPS

SEQ ID NO: 17300 - protein, 48 aa, Artificial Sequence
  Synthetic polypeptide
GTGFISLGSARQWAQAKAVGPKLPLEYENKQHHYEKSKELWSQTVLHL

SEQ ID NO: 17301 - protein, 40 aa, Artificial Sequence
  Synthetic polypeptide
GVPDSGRRPRRWDRSYLWSMKISNTIMKSQKNFGVKQSCI

SEQ ID NO: 17302 - protein, 33 aa, Artificial Sequence
  Synthetic polypeptide
FLHFHLRYRVHLTRECQTVGAGQGGGTEVTSGV

SEQ ID NO: 17303 - protein, 578 aa, Artificial Sequence
  Synthetic polypeptide
TAITPLHSSLGNRAYSTRSKMAELNTHVNVKEKIYAVRSVVPNKSNNEIVLVLQQFDFNVDKAVQAFVDGSAIQVLKEWNMTGKKKNNKRKRSKSKQHQGNKDAKDKVERPEAGPLQPQPPQIQNGPMNGCEKDSSSTDSANEKPALIPREKKISILEEPSKALRGVTEGNRLLQQKLSLDGNPKPIHGTTERSDGLQWSAEQPCNPSKPKAKTSPVKSNTPAAHLEIKPDELAKKRGPNIEKSVKDLQRCTVSLTRYRVMIKEEVDSSVKKIKAAFAELHNCIIDKEVSLMAEMDKVKEEAMEILTARQKKAEELKRLTDLASQMAEMQLAELRAEIKHFVSERKYDEELGKAARFSCDIEQLKAQIMLCGEITHPKNNYSSRTPCSSLLPLLNAHAATSGKQSNFSRKSSTHNKPSEGKAANPKMVSSLPSTADPSHQTMPANKQNGSSNQRRRFNPQYHNNRLNGPAKSQGSGNEAEPLGKGNSRHEHRRQPHNGFRPKNKGGAKNQEASLGMKTPEAPAHSEKPRRRQHAADTSEARPFRGSVGRVSQCNLCPTRIEVSTDAAVLSVPAVTLVA

SEQ ID NO: 17304 - protein, 578 aa, Artificial Sequence; identical to SEQ ID NO: 17303
  Synthetic polypeptide

SEQ ID NO: 17305 - protein, 34 aa, Artificial Sequence
  Synthetic polypeptide
GDGGCSELRSRHCIPAWATGPIPLEARWLNSILM

SEQ ID NO: 17306 - protein, 34 aa, Artificial Sequence; identical to SEQ ID NO: 17305
  Synthetic polypeptide

SEQ ID NO: 17307 - protein, 25 aa, Artificial Sequence
  Synthetic polypeptide
VEEMEAAVNCDHATAFQPGQQGLFH

SEQ ID NO: 17308 - protein, 25 aa, Artificial Sequence
  Synthetic polypeptide
VEEMEAAVNCDHATAFQPGQQGLFH

SEQ ID NO: 17309 - protein, 17 aa, Artificial Sequence
  Synthetic polypeptide
GQEFETSLGNMAVQFKF

SEQ ID NO: 17310 - protein, 17 aa, Artificial Sequence
  Synthetic polypeptide
GQEFETSLGNMAVQFKF

SEQ ID NO: 17311 - protein, 17 aa, Artificial Sequence
  Synthetic polypeptide
GQEFETSLGNMAVQFKF

SEQ ID NO: 17312 - protein, 17 aa, Artificial Sequence
  Synthetic polypeptide
GQEFETSLGNMAVQFKF

SEQ ID NO: 17313 - protein, 17 aa, Artificial Sequence
  Synthetic polypeptide
GQEFETSLGNMAVQFKF

SEQ ID NO: 17314 - protein, 17 aa, Artificial Sequence
  Synthetic polypeptide
GQEFETSLGNMAVQFKF

SEQ ID NO: 17315 - protein, 17 aa, Artificial Sequence
  Synthetic polypeptide
GQEFETSLGNMAVQFKF

SEQ ID NO: 17316 - protein, 17 aa, Artificial Sequence
  Synthetic polypeptide
GQEFETSLGNMAVQFKF

SEQ ID NO: 17317 - protein, 17 aa, Artificial Sequence
  Synthetic polypeptide
GQEFETSLGNMAVQFKF

SEQ ID NO: 17318 - protein, 17 aa, Artificial Sequence
  Synthetic polypeptide
GQEFETSLGNMAVQFKF

SEQ ID NO: 17319 - protein, 17 aa, Artificial Sequence
  Synthetic polypeptide
GQEFETSLGNMAVQFKF

SEQ ID NO: 17320 - protein, 17 aa, Artificial Sequence
  Synthetic polypeptide
GQEFETSLGNMAVQFKF

SEQ ID NO: 17321 - protein, 17 aa, Artificial Sequence
  Synthetic polypeptide
GQEFETSLGNMAVQFKF

SEQ ID NO: 17322 - protein, 17 aa, Artificial Sequence
  Synthetic polypeptide
GQEFETSLGNMAVQFKF

SEQ ID NO: 17323 - protein, 17 aa, Artificial Sequence
  Synthetic polypeptide
GQEFETSLGNMAVQFKF

SEQ ID NO: 17324 - protein, 17 aa, Artificial Sequence
  Synthetic polypeptide
GQEFETSLGNMAVQFKF

SEQ ID NO: 17325 - protein, 17 aa, Artificial Sequence
  Synthetic polypeptide
GQEFETSLGNMAVQFKF

SEQ ID NO: 17326 - protein, 47 aa, Artificial Sequence
  Synthetic polypeptide
LTPVVPALRKAKVGRSLEARSSRPAWETWQCNSSSKRMEYDRKKEEQ

SEQ ID NO: 17327 - protein, 47 aa, Artificial Sequence; identical to SEQ ID NO: 17326
  Synthetic polypeptide

SEQ ID NO: 17328 - protein, 47 aa, Artificial Sequence; identical to SEQ ID NO: 17326
  Synthetic polypeptide

SEQ ID NO: 17329 - protein, 47 aa, Artificial Sequence; identical to SEQ ID NO: 17326
  Synthetic polypeptide

SEQ ID NO: 17330 - protein, 47 aa, Artificial Sequence; identical to SEQ ID NO: 17326
  Synthetic polypeptide

SEQ ID NO: 17331 - protein, 47 aa, Artificial Sequence; identical to SEQ ID NO: 17326
  Synthetic polypeptide

SEQ ID NO: 17332 - protein, 47 aa, Artificial Sequence; identical to SEQ ID NO: 17326
  Synthetic polypeptide

SEQ ID NO: 17333 - protein, 47 aa, Artificial Sequence; identical to SEQ ID NO: 17326
  Synthetic polypeptide

SEQ ID NO: 17334 - protein, 47 aa, Artificial Sequence; identical to SEQ ID NO: 17326
  Synthetic polypeptide

SEQ ID NO: 17335 - protein, 47 aa, Artificial Sequence; identical to SEQ ID NO: 17326
  Synthetic polypeptide

SEQ ID NO: 17336 - protein, 47 aa, Artificial Sequence; identical to SEQ ID NO: 17326
  Synthetic polypeptide

SEQ ID NO: 17337 - protein, 47 aa, Artificial Sequence; identical to SEQ ID NO: 17326
  Synthetic polypeptide

SEQ ID NO: 17338 - protein, 47 aa, Artificial Sequence; identical to SEQ ID NO: 17326
  Synthetic polypeptide

SEQ ID NO: 17339 - protein, 47 aa, Artificial Sequence; identical to SEQ ID NO: 17326
  Synthetic polypeptide

SEQ ID NO: 17340 - protein, 47 aa, Artificial Sequence; identical to SEQ ID NO: 17326
  Synthetic polypeptide

SEQ ID NO: 17341 - protein, 47 aa, Artificial Sequence; identical to SEQ ID NO: 17326
  Synthetic polypeptide

SEQ ID NO: 17342 - protein, 47 aa, Artificial Sequence; identical to SEQ ID NO: 17326
  Synthetic polypeptide

SEQ ID NO: 17343 - protein, 69 aa, Artificial Sequence
  Synthetic polypeptide
SQHFGRRRWADHLRPGVRDQPGKHGSAIQVLKEWNMTGKKKNNKRKRSKSKQHQGNKDAKDKVERPEAG

SEQ ID NO: 17344 - protein, 533 aa, Artificial Sequence
  Synthetic polypeptide
SQHFGRRRWADHLRPGVRDQPGKHGSAIQVLKEWNMTGKKKNNKRKRSKSKQHQGNKDAKDKVERPEAGPLQPQPPQIQNGPMNGCEKDSSSTDSANEKPALIPREKKISILEEPSKALRGVTEGNRLLQQKLSLDGNPKPIHGTTERSDGLQWSAEQPCNPSKPKAKTSPVKSNTPAAHLEIKPDELAKKRGPNIEKSVKDLQRCTVSLTRYRVMIKEEVDSSVKKIKAAFAELHNCIIDKEVSLMAEMDKVKEEAMEILTARQKKAEELKRLTDLASQMAEMQLAELRAEIKHFVSERKYDEELGKAARFSCDIEQLKAQIMLCGEITHPKNNYSSRTPCSSLLPLLNAHAATSGKQSNFSRKSSTHNKPSEGKAANPKMVSSLPSTADPSHQTMPANKQNGSSNQRRRFNPQYHNNRLNGPAKSQGSGNEAEPLGKGNSRHEHRRQPHNGFRPKNKGGAKNQEASLGMKTPEAPAHSEKPRRRQHAADTSEARPFRGSVGRVSQCNLCPTRIEVSTDAAVLSVPAVTLVA

SEQ ID NO: 17345 - protein, 533 aa, Artificial Sequence; identical to SEQ ID NO: 17344
  Synthetic polypeptide

SEQ ID NO: 17346 - protein, 533 aa, Artificial Sequence; identical to SEQ ID NO: 17344
  Synthetic polypeptide

SEQ ID NO: 17347 - protein, 533 aa, Artificial Sequence; identical to SEQ ID NO: 17344
  Synthetic polypeptide

SEQ ID NO: 17348 - protein, 533 aa, Artificial Sequence; identical to SEQ ID NO: 17344
  Synthetic polypeptide

SEQ ID NO: 17349 - protein, 533 aa, Artificial Sequence; identical to SEQ ID NO: 17344
  Synthetic polypeptide

SEQ ID NO: 17350 - protein, 533 aa, Artificial Sequence; identical to SEQ ID NO: 17344
  Synthetic polypeptide

SEQ ID NO: 17351 - protein, 90 aa, Artificial Sequence
  Synthetic polypeptide
SQHFGRRRWADHLRPGVRDQPGKHGSAIQVLKEWNMTGKKKNNKRKRSKSKQHQGNKDAKDKVERPEAGPLQPQPPQIQNGPMNGCEKDS

SEQ ID NO: 17352 - protein, 464 aa, Artificial Sequence
  Synthetic polypeptide
SQHFGRRRWADHLRPGVRDQPGKHGSAIQVLKEWNMTGKKKNNKRKRSKSKQHQGNKDAKDKVERPEAGPLQPQPPQIQNGPMNGCEKDSSSTDSANEKPALIPREKKISILEEPSKALRGVTGPNIEKSVKDLQRCTVSLTRYRVMIKEEVDSSVKKIKAAFAELHNCIIDKEVSLMAEMDKVKEEAMEILTARQKKAEELKRLTDLASQMAEMQLAELRAEIKHFVSERKYDEELGKAARFSCDIEQLKAQIMLCGEITHPKNNYSSRTPCSSLLPLLNAHAATSGKQSNFSRKSSTHNKPSEGKAANPKMVSSLPSTADPSHQTMPANKQNGSSNQRRRFNPQYHNNRLNGPAKSQGSGNEAEPLGKGNSRHEHRRQPHNGFRPKNKGGAKNQEASLGMKTPEAPAHSEKPRRRQHAADTSEARPFRGSVGRVSQCNLCPTRIEVSTDAAVLSVPAVTLVA

SEQ ID NO: 17353 - protein, 114 aa, Artificial Sequence
  Synthetic polypeptide
SQHFGRRRWADHLRPGVRDQPGKHGSAIQVLKEWNMTGKKKNNKRKRSKSKQHQGNKDAKDKVERPEAGPLQPQPPQIQNGPMNGCEKDSSSTDSANEKPALIPREKKISILEE

SEQ ID NO: 17354 - protein, 163 aa, Artificial Sequence
  Synthetic polypeptide
SQHFGRRRWADHLRPGVRDQPGKHGSAIQVLKEWNMTGKKKNNKRKRSKSKQHQGNKDAKDKVERPEAGPLQPQPPQIQNGPMNGCEKDSSSTDSANEKPALIPREKKISILEEPSKALRGVTEGNRLLQQKLSLDGNPKPIHGTTERSDGLQWSAEQPCNPS

SEQ ID NO: 17355 - protein, 168 aa, Artificial Sequence
  Synthetic polypeptide
SQHFGRRRWADHLRPGVRDQPGKHGSAIQVLKEWNMTGKKKNNKRKRSKSKQHQGNKDAKDKVERPEAGPLQPQPPQIQNGPMNGCEKDSSSTDSANEKPALIPREKKISILEEPSKALRGVTGPNIEKSVKDLQRCTVSLTRYRVMIKEEVDSSVKKIKAAFAELHN

SEQ ID NO: 17356 - protein, 240 aa, Artificial Sequence
  Synthetic polypeptide
SQHFGRRRWADHLRPGVRDQPGKHGSAIQVLKEWNMTGKKKNNKRKRSKSKQHQGNKDAKDKVERPEAGPLQPQPPQIQNGPMNGCEKDSSSTDSANEKPALIPREKKISILEEPSKALRGVTGPNIEKSVKDLQRCTVSLTRYRVMIKEEVDSSVKKIKAAFAELHNCIIDKEVSLMAEMDKVKEEAMEILTARQKKAEELKRLTDLASQMAEMQLAELRAEIKHFVSERKYDEELGKA

SEQ ID NO: 17357 - protein, 129 aa, Artificial Sequence
  Synthetic polypeptide
SQHFGRRRWADHLRPGVRDQPGKHGSAIQVLKEWNMTGKKKNNKRKRSKSKQHQGNKDAKDKVERPEAGPLQPQPPQIQNGPMNGCEKDSSSTDSANEKPALIPREKKISILEEPSKALRGVTEGNRLL

SEQ ID NO: 17358 - protein, 148 aa, Artificial Sequence
  Synthetic polypeptide
SQHFGRRRWADHLRPGVRDQPGKHGSAIQVLKEWNMTGKKKNNKRKRSKSKQHQGNKDAKDKVERPEAGPLQPQPPQIQNGPMNGCEKDSSSTDSANEKPALIPREKKISILEEPSKALRGVTGPNIEKSVKDLQRCTVSLTRYRVMI

SEQ ID NO: 17359 - protein, 218 aa, Artificial Sequence
  Synthetic polypeptide
SQHFGRRRWADHLRPGVRDQPGKHGSAIQVLKEWNMTGKKKNNKRKRSKSKQHQGNKDAKDKVERPEAGPLQPQPPQIQNGPMNGCEKDSSSTDSANEKPALIPREKKISILEEPSKALRGVTGPNIEKSVKDLQRCTVSLTRYRVMIKEEVDSSVKKIKAAFAELHNCIIDKEVSLMAEMDKVKEEAMEILTARQKKAEELKRLTDLASQMAEMQLA

SEQ ID NO: 17360 - protein, 49 aa, Artificial Sequence
  Synthetic polypeptide
AMAHTYNLRPFGRPRQEDCLRPRVRDQAWATYGNPDCSSEESRRTKETH

SEQ ID NO: 17361 - protein, 49 aa, Artificial Sequence; identical to SEQ ID NO: 17360
  Synthetic polypeptide

SEQ ID NO: 17362 - protein, 49 aa, Artificial Sequence; identical to SEQ ID NO: 17360
  Synthetic polypeptide

SEQ ID NO: 17363 - protein, 49 aa, Artificial Sequence; identical to SEQ ID NO: 17360
  Synthetic polypeptide

SEQ ID NO: 17364 - protein, 49 aa, Artificial Sequence; identical to SEQ ID NO: 17360
  Synthetic polypeptide

SEQ ID NO: 17365 - protein, 49 aa, Artificial Sequence; identical to SEQ ID NO: 17360
  Synthetic polypeptide

SEQ ID NO: 17366 - protein, 49 aa, Artificial Sequence; identical to SEQ ID NO: 17360
  Synthetic polypeptide

SEQ ID NO: 17367 - protein, 49 aa, Artificial Sequence; identical to SEQ ID NO: 17360
  Synthetic polypeptide

SEQ ID NO: 17368 - protein, 49 aa, Artificial Sequence; identical to SEQ ID NO: 17360
  Synthetic polypeptide

SEQ ID NO: 17369 - protein, 49 aa, Artificial Sequence; identical to SEQ ID NO: 17360
  Synthetic polypeptide

SEQ ID NO: 17370 - protein, 49 aa, Artificial Sequence; identical to SEQ ID NO: 17360
  Synthetic polypeptide

SEQ ID NO: 17371 - protein, 287 aa, Artificial Sequence
  Synthetic polypeptide
GQEFETKPGQHMEILTARQKKAEELKRLTDLASQMAEMQLAELRAEIKHFVSERKYDEELGKAARFSCDIEQLKAQIMLCGEITHPKNNYSSRTPCSSLLPLLNAHAATSGKQSNFSRKSSTHNKPSEGKAANPKMVSSLPSTADPSHQTMPANKQNGSSNQRRRFNPQYHNNRLNGPAKSQGSGNEAEPLGKGNSRHEHRRQPHNGFRPKNKGGAKNQEASLGMKTPEAPAHSEKPRRRQHAADTSEARPFRGSVGRVSQCNLCPTRIEVSTDAAVLSVPAVTLVA

SEQ ID NO: 17372 - protein, 287 aa, Artificial Sequence; identical to SEQ ID NO: 17371
  Synthetic polypeptide

SEQ ID NO: 17373 - protein, 287 aa, Artificial Sequence; identical to SEQ ID NO: 17371
  Synthetic polypeptide

SEQ ID NO: 17374 - protein, 287 aa, Artificial Sequence; identical to SEQ ID NO: 17371
  Synthetic polypeptide

SEQ ID NO: 17375 - protein, 287 aa, Artificial Sequence; identical to SEQ ID NO: 17371
  Synthetic polypeptide

SEQ ID NO: 17376 - protein, 287 aa, Artificial Sequence; identical to SEQ ID NO: 17371
  Synthetic polypeptide

SEQ ID NO: 17377 - protein, 287 aa, Artificial Sequence; identical to SEQ ID NO: 17371
  Synthetic polypeptide

SEQ ID NO: 17378 - protein, 287 aa, Artificial Sequence; identical to SEQ ID NO: 17371
  Synthetic polypeptide

SEQ ID NO: 17379 - protein, 287 aa, Artificial Sequence; identical to SEQ ID NO: 17371
  Synthetic polypeptide

SEQ ID NO: 17380 - protein, 28 aa, Artificial Sequence
  Synthetic polypeptide
SQTFWKTKAGGLLEAKSSRPSLGNIWKS

SEQ ID NO: 17381 - protein, 28 aa, Artificial Sequence
  Synthetic polypeptide
SQTFWKTKAGGLLEAKSSRPSLGNIWKS

SEQ ID NO: 17382 - protein, 28 aa, Artificial Sequence
  Synthetic polypeptide
SQTFWKTKAGGLLEAKSSRPSLGNIWKS

SEQ ID NO: 17383 - protein, 28 aa, Artificial Sequence
  Synthetic polypeptide
SQTFWKTKAGGLLEAKSSRPSLGNIWKS

SEQ ID NO: 17384 - protein, 28 aa, Artificial Sequence
  Synthetic polypeptide
SQTFWKTKAGGLLEAKSSRPSLGNIWKS

SEQ ID NO: 17385 - protein, 28 aa, Artificial Sequence
  Synthetic polypeptide
SQTFWKTKAGGLLEAKSSRPSLGNIWKS

SEQ ID NO: 17386 - protein, 28 aa, Artificial Sequence
  Synthetic polypeptide
SQTFWKTKAGGLLEAKSSRPSLGNIWKS

SEQ ID NO: 17387 - protein, 28 aa, Artificial Sequence
  Synthetic polypeptide
SQTFWKTKAGGLLEAKSSRPSLGNIWKS

SEQ ID NO: 17388 - protein, 28 aa, Artificial Sequence
  Synthetic polypeptide
SQTFWKTKAGGLLEAKSSRPSLGNIWKS

SEQ ID NO: 17389 - protein, 28 aa, Artificial Sequence
  Synthetic polypeptide
SQTFWKTKAGGLLEAKSSRPSLGNIWKS

SEQ ID NO: 17390 - protein, 28 aa, Artificial Sequence
  Synthetic polypeptide
SQTFWKTKAGGLLEAKSSRPSLGNIWKS

SEQ ID NO: 17391 - protein, 63 aa, Artificial Sequence
  Synthetic polypeptide
GQEFETKPGQHMEILTARQKKAEELKRLTDLASQMAEMQLAELRAEIKHFVSERKYDEELGKA

SEQ ID NO: 17392 - protein, 41 aa, Artificial Sequence
  Synthetic polypeptide
GQEFETKPGQHMEILTARQKKAEELKRLTDLASQMAEMQLA

SEQ ID NO: 17393 - protein, 71 aa, Artificial Sequence
  Synthetic polypeptide
GLCKMCFVKQMLEGSVLVKSHHHSLISSTQGHKHCGRPQGPLPRKASSRSRDKLQECSPSSNPKESQGSFK

SEQ ID NO: 17394 - protein, 71 aa, Artificial Sequence; identical to SEQ ID NO: 17393
  Synthetic polypeptide

SEQ ID NO: 17395 - protein, 71 aa, Artificial Sequence; identical to SEQ ID NO: 17393
  Synthetic polypeptide

SEQ ID NO: 17396 - protein, 71 aa, Artificial Sequence; identical to SEQ ID NO: 17393
  Synthetic polypeptide

SEQ ID NO: 17397 - protein, 71 aa, Artificial Sequence; identical to SEQ ID NO: 17393
  Synthetic polypeptide

SEQ ID NO: 17398 - protein, 71 aa, Artificial Sequence; identical to SEQ ID NO: 17393
  Synthetic polypeptide

SEQ ID NO: 17399 - protein, 71 aa, Artificial Sequence; identical to SEQ ID NO: 17393
  Synthetic polypeptide

SEQ ID NO: 17400 - protein, 71 aa, Artificial Sequence; identical to SEQ ID NO: 17393
  Synthetic polypeptide

SEQ ID NO: 17401 - protein, 71 aa, Artificial Sequence; identical to SEQ ID NO: 17393
  Synthetic polypeptide

SEQ ID NO: 17402 - protein, 71 aa, Artificial Sequence; identical to SEQ ID NO: 17393
  Synthetic polypeptide

SEQ ID NO: 17403 - protein, 71 aa, Artificial Sequence; identical to SEQ ID NO: 17393
  Synthetic polypeptide

SEQ ID NO: 17404 - protein, 71 aa, Artificial Sequence; identical to SEQ ID NO: 17393
  Synthetic polypeptide

SEQ ID NO: 17405 - protein, 71 aa, Artificial Sequence; identical to SEQ ID NO: 17393
  Synthetic polypeptide

SEQ ID NO: 17406 - protein, 71 aa, Artificial Sequence; identical to SEQ ID NO: 17393
  Synthetic polypeptide

SEQ ID NO: 17407 - protein, 71 aa, Artificial Sequence; identical to SEQ ID NO: 17393
  Synthetic polypeptide

SEQ ID NO: 17408 - protein, 327 aa, Artificial Sequence
  Synthetic polypeptide
SQVPRDTNTAEGRRDLCLGKPVQGAGTSYRNVLQAAIQKSLKDPSNNFRLHNGRSKEQRLKEQLGAQQEPVKKSIQESEAFLPQSIPEERYKMKSKPLGICLIIDCIGNETELLRDTFTSLGYEVQKFLHLSMHGISQILGQFACMPEHRDYDSFVCVLVSRGGSQSVYGVDQTHSGLPLHHIRRMFMGDSCPYLAGKPKMFFIQNYVVSEGQLEDSSLLEVDGPAMKNVEFKAQKRGLCTVHREADFFWSLCTADMSLLEQSHSSPSLYLQCLSQKLRQERKRPLLDLHIELNGYMYDWNSRVSAKEKYYVWLQHTLRKKLILSYT

SEQ ID NO: 17409 - protein, 327 aa, Artificial Sequence; identical to SEQ ID NO: 17408
  Synthetic polypeptide

SEQ ID NO: 17410 - protein, 327 aa, Artificial Sequence; identical to SEQ ID NO: 17408
  Synthetic polypeptide

SEQ ID NO: 17411 - protein, 52 aa, Artificial Sequence
  Synthetic polypeptide
ESQFKEQGQVTGMFSKQQSKRVSRILQITSGSIMGEVKNKDLRNSLALNKNQ

SEQ ID NO: 17412 - protein, 52 aa, Artificial Sequence; identical to SEQ ID NO: 17411
  Synthetic polypeptide

SEQ ID NO: 17413 - protein, 52 aa, Artificial Sequence; identical to SEQ ID NO: 17411
  Synthetic polypeptide

SEQ ID NO: 17414 - protein, 52 aa, Artificial Sequence; identical to SEQ ID NO: 17411
  Synthetic polypeptide

SEQ ID NO: 17415 - protein, 52 aa, Artificial Sequence; identical to SEQ ID NO: 17411
  Synthetic polypeptide

SEQ ID NO: 17416 - protein, 52 aa, Artificial Sequence; identical to SEQ ID NO: 17411
  Synthetic polypeptide

SEQ ID NO: 17417 - protein, 52 aa, Artificial Sequence; identical to SEQ ID NO: 17411
  Synthetic polypeptide

SEQ ID NO: 17418 - protein, 52 aa, Artificial Sequence; identical to SEQ ID NO: 17411
  Synthetic polypeptide

SEQ ID NO: 17419 - protein, 52 aa, Artificial Sequence; identical to SEQ ID NO: 17411
  Synthetic polypeptide

SEQ ID NO: 17420 - protein, 68 aa, Artificial Sequence
  Synthetic polypeptide
SQVPRDTNTAEGRRDLCLGKPVQGAGTSYRNVLQAAIQKSLKDPSNNFRMITPYAHCPDLKILGNCSM

SEQ ID NO: 17421 - protein, 68 aa, Artificial Sequence; identical to SEQ ID NO: 17420
  Synthetic polypeptide

SEQ ID NO: 17422 - protein, 31 aa, Artificial Sequence
  Synthetic polypeptide
ESQFKEQGQVTGMFSKQQSKRVSRILQITSG

SEQ ID NO: 17423 - protein, 31 aa, Artificial Sequence; identical to SEQ ID NO: 17422
  Synthetic polypeptide

SEQ ID NO: 17424 - protein, 31 aa, Artificial Sequence; identical to SEQ ID NO: 17422
  Synthetic polypeptide

SEQ ID NO: 17425 - protein, 31 aa, Artificial Sequence; identical to SEQ ID NO: 17422
  Synthetic polypeptide

SEQ ID NO: 17426 - protein, 309 aa, Artificial Sequence
  Synthetic polypeptide
SQVPRDTNTAEGRRDLCLGKPVQGAGTSYRNVLQAAIQKSLKDPSNNFRLHNGRSKEQRLKEQLGAQQEPVKKSIQESEAFLPQSIPEERYKMKSKPLGICLIIDCIGNETELLRDTFTSLGYEVQKFLHLSMHGISQILGQFACMPEHRDYDSFVCVLVSRGGSQSVYGVDQTHSGLPLHHIRRMFMGDSCPYLAGKPKMFFIQNYVVSEGQLEDSSLLEVDGPAMKNVEFKAQKRGLCTVHREADFFWSLCTADMSLLEQSHSSPSLYLQCLSQKLRQERGTIPGSGITESKDMHFSSLGCILLDVL

SEQ ID NO: 17427 - protein, 309 aa, Artificial Sequence; identical to SEQ ID NO: 17426
  Synthetic polypeptide

SEQ ID NO: 17428 - protein, 309 aa, Artificial Sequence; identical to SEQ ID NO: 17426
  Synthetic polypeptide

SEQ ID NO: 17429 - protein, 147 aa, Artificial Sequence
  Synthetic polypeptide
SQVPRDTNTAEGRRDLCLGKPVQGAGTSYRNVLQAAIQKSLKDPSNNFRLHNGRSKEQRLKEQLGAQQEPVKKSIQESEAFLPQSIPEERYKMKSKPLGICLIIDCIGNETENAHSWIFTLNSMATCMIGTAEFLPRRNIMSGCSTL

SEQ ID NO: 17430 - protein, 292 aa, Artificial Sequence
  Synthetic polypeptide
SQVPRDTNTAEGRRDLCLGKPVQGAGTSYRNVLQAAIQKSLKDPSNNFRSIPEERYKMKSKPLGICLIIDCIGNETELLRDTFTSLGYEVQKFLHLSMHGISQILGQFACMPEHRDYDSFVCVLVSRGGSQSVYGVDQTHSGLPLHHIRRMFMGDSCPYLAGKPKMFFIQNYVVSEGQLEDSSLLEVDGPAMKNVEFKAQKRGLCTVHREADFFWSLCTADMSLLEQSHSSPSLYLQCLSQKLRQERKRPLLDLHIELNGYMYDWNSRVSAKEKYYVWLQHTLRKKLILSYT

SEQ ID NO: 17431 - protein, 39 aa, Artificial Sequence
  Synthetic polypeptide
ESQFKEQGQVTGMFSKQQSKRVSRILQITSGAYLKRDTR

SEQ ID NO: 17432 - protein, 139 aa, Artificial Sequence
  Synthetic polypeptide
SQVPRDTNTAEGRRDLCLGKPVQGAGTSYRNVLQAAIQKSLKDPSNNFRLHNGRSKEQRLKEQLGAQQEPVKKSIQESEAFLPQSIPEERYKMKSKPLGICLIIDCIGNETGWSAMAQSQLTAISTSQVQAILLPQPPE

SEQ ID NO: 17433 - protein, 90 aa, Artificial Sequence
  Synthetic polypeptide
SQVPRDTNTAEGRRDLCLGKPVQGAGTSYRNVLQAAIQKSLKDPSNNFRAGVQWRDLGSPQPPPPGFKRFSHLSLPSSWDYRNVPPRPAP

SEQ ID NO: 17434 - protein, 72 aa, Artificial Sequence
  Synthetic polypeptide
ESQFKEQGQVTGMFSKQQSKRVSRILQITSGLECNGAILAHRNLRLPGSSDSPTSASQVAGITGMCHHARLH

SEQ ID NO: 17435 - protein, 60 aa, Artificial Sequence
  Synthetic polypeptide
SQVPRDTNTAEGRRDLCLGKPVQGAGTSYRNVLQAAIQKSLKDPSNNFRVSLEKTYGIPA

SEQ ID NO: 17436 - protein, 60 aa, Artificial Sequence
  Synthetic polypeptide
SQVPRDTNTAEGRRDLCLGKPVQGAGTSYRNVLQAAIQKSLKDPSNNFRMITPYAHCPDL

SEQ ID NO: 17437 - protein, 111 aa, Artificial Sequence
  Synthetic polypeptide
SQVPRDTNTAEGRRDLCLGKPVQGAGTSYRNVLQAAIQKSLKDPSNNFRLHNGRSKEQRLKEQLGAQQEPVKKSIQESEAFLPQSIPEERYKMKSKPLGICLIIDCIGNET

SEQ ID NO: 17438 - protein, 311 aa, Artificial Sequence
  Synthetic polypeptide
REKPTVQGAGTSYRNVLQAAIQKSLKDPSNNFRLHNGRSKEQRLKEQLGAQQEPVKKSIQESEAFLPQSIPEERYKMKSKPLGICLIIDCIGNETELLRDTFTSLGYEVQKFLHLSMHGISQILGQFACMPEHRDYDSFVCVLVSRGGSQSVYGVDQTHSGLPLHHIRRMFMGDSCPYLAGKPKMFFIQNYVVSEGQLEDSSLLEVDGPAMKNVEFKAQKRGLCTVHREADFFWSLCTADMSLLEQSHSSPSLYLQCLSQKLRQERKRPLLDLHIELNGYMYDWNSRVSAKEKYYVWLQHTLRKKLILSYT

SEQ ID NO: 17439 - protein, 311 aa, Artificial Sequence; identical to SEQ ID NO: 17438
  Synthetic polypeptide

SEQ ID NO: 17440 - protein, 311 aa, Artificial Sequence; identical to SEQ ID NO: 17438
  Synthetic polypeptide

SEQ ID NO: 17441 - protein, 82 aa, Artificial Sequence
  Synthetic polypeptide
TPVPWAPFFLSLYFASVSFFSKSLVPPNEKNPQFKEQGQVTGMFSKQQSKRVSRILQITSGSIMGEVKNKDLRNSLALNKNQ

SEQ ID NO: 17442 - protein, 82 aa, Artificial Sequence; identical to SEQ ID NO: 17441
  Synthetic polypeptide

SEQ ID NO: 17443 - protein, 82 aa, Artificial Sequence; identical to SEQ ID NO: 17441
  Synthetic polypeptide

SEQ ID NO: 17444 - protein, 82 aa, Artificial Sequence; identical to SEQ ID NO: 17441
  Synthetic polypeptide

SEQ ID NO: 17445 - protein, 82 aa, Artificial Sequence; identical to SEQ ID NO: 17441
  Synthetic polypeptide

SEQ ID NO: 17446 - protein, 82 aa, Artificial Sequence; identical to SEQ ID NO: 17441
  Synthetic polypeptide

SEQ ID NO: 17447 - protein, 82 aa, Artificial Sequence; identical to SEQ ID NO: 17441
  Synthetic polypeptide

SEQ ID NO: 17448 - protein, 82 aa, Artificial Sequence; identical to SEQ ID NO: 17441
  Synthetic polypeptide

SEQ ID NO: 17449 - protein, 82 aa, Artificial Sequence; identical to SEQ ID NO: 17441
  Synthetic polypeptide

SEQ ID NO: 17450 - protein, 72 aa, Artificial Sequence
  Synthetic polypeptide
ILRELRGRRDPPYAERRSPGPPFFFLYTLRLCLSFPSLSFHLTRKTHSSRSRDKLQECSPSSNPKESQGSFK

SEQ ID NO: 17451 - protein, 72 aa, Artificial Sequence; identical to SEQ ID NO: 17450
  Synthetic polypeptide

SEQ ID NO: 17452 - protein, 72 aa, Artificial Sequence; identical to SEQ ID NO: 17450
  Synthetic polypeptide

SEQ ID NO: 17453 - protein, 72 aa, Artificial Sequence; identical to SEQ ID NO: 17450
  Synthetic polypeptide

SEQ ID NO: 17454 - protein, 72 aa, Artificial Sequence; identical to SEQ ID NO: 17450
  Synthetic polypeptide

SEQ ID NO: 17455 - protein, 72 aa, Artificial Sequence; identical to SEQ ID NO: 17450
  Synthetic polypeptide

SEQ ID NO: 17456 - protein, 72 aa, Artificial Sequence; identical to SEQ ID NO: 17450
  Synthetic polypeptide

SEQ ID NO: 17457 - protein, 72 aa, Artificial Sequence; identical to SEQ ID NO: 17450
  Synthetic polypeptide

SEQ ID NO: 17458 - protein, 72 aa, Artificial Sequence; identical to SEQ ID NO: 17450
  Synthetic polypeptide

SEQ ID NO: 17459 - protein, 72 aa, Artificial Sequence; identical to SEQ ID NO: 17450
  Synthetic polypeptide

SEQ ID NO: 17460 - protein, 72 aa, Artificial Sequence; identical to SEQ ID NO: 17450
  Synthetic polypeptide

SEQ ID NO: 17461 - protein, 72 aa, Artificial Sequence; identical to SEQ ID NO: 17450
  Synthetic polypeptide

SEQ ID NO: 17462 - protein, 72 aa, Artificial Sequence; identical to SEQ ID NO: 17450
  Synthetic polypeptide

SEQ ID NO: 17463 - protein, 72 aa, Artificial Sequence; identical to SEQ ID NO: 17450
  Synthetic polypeptide

SEQ ID NO: 17464 - protein, 72 aa, Artificial Sequence; identical to SEQ ID NO: 17450
  Synthetic polypeptide

SEQ ID NO: 17465 - protein, 52 aa, Artificial Sequence
  Synthetic polypeptide
REKPTVQGAGTSYRNVLQAAIQKSLKDPSNNFRMITPYAHCPDLKILGNCSM

SEQ ID NO: 17466 - protein, 52 aa, Artificial Sequence; identical to SEQ ID NO: 17465
  Synthetic polypeptide

SEQ ID NO: 17467 - protein, 61 aa, Artificial Sequence
  Synthetic polypeptide
TPVPWAPFFLSLYFASVSFFSKSLVPPNEKNPQFKEQGQVTGMFSKQQSKRVSRILQITSG

SEQ ID NO: 17468 - protein, 61 aa, Artificial Sequence; identical to SEQ ID NO: 17467
  Synthetic polypeptide

SEQ ID NO: 17469 - protein, 61 aa, Artificial Sequence; identical to SEQ ID NO: 17467
  Synthetic polypeptide

SEQ ID NO: 17470 - protein, 61 aa, Artificial Sequence; identical to SEQ ID NO: 17467
  Synthetic polypeptide

SEQ ID NO: 17471 - protein, 293 aa, Artificial Sequence
  Synthetic polypeptide
REKPTVQGAGTSYRNVLQAAIQKSLKDPSNNFRLHNGRSKEQRLKEQLGAQQEPVKKSIQESEAFLPQSIPEERYKMKSKPLGICLIIDCIGNETELLRDTFTSLGYEVQKFLHLSMHGISQILGQFACMPEHRDYDSFVCVLVSRGGSQSVYGVDQTHSGLPLHHIRRMFMGDSCPYLAGKPKMFFIQNYVVSEGQLEDSSLLEVDGPAMKNVEFKAQKRGLCTVHREADFFWSLCTADMSLLEQSHSSPSLYLQCLSQKLRQERGTIPGSGITESKDMHFSSLGCILLDVL

SEQ ID NO: 17472 - protein, 293 aa, Artificial Sequence; identical to SEQ ID NO: 17471
  Synthetic polypeptide

SEQ ID NO: 17473 - protein, 293 aa, Artificial Sequence; identical to SEQ ID NO: 17471
  Synthetic polypeptide

SEQ ID NO: 17474 - protein, 131 aa, Artificial Sequence
  Synthetic polypeptide
REKPTVQGAGTSYRNVLQAAIQKSLKDPSNNFRLHNGRSKEQRLKEQLGAQQEPVKKSIQESEAFLPQSIPEERYKMKSKPLGICLIIDCIGNETENAHSWIFTLNSMATCMIGTAEFLPRRNIMSGCSTL

SEQ ID NO: 17475 - protein, 276 aa, Artificial Sequence
  Synthetic polypeptide
REKPTVQGAGTSYRNVLQAAIQKSLKDPSNNFRSIPEERYKMKSKPLGICLIIDCIGNETELLRDTFTSLGYEVQKFLHLSMHGISQILGQFACMPEHRDYDSFVCVLVSRGGSQSVYGVDQTHSGLPLHHIRRMFMGDSCPYLAGKPKMFFIQNYVVSEGQLEDSSLLEVDGPAMKNVEFKAQKRGLCTVHREADFFWSLCTADMSLLEQSHSSPSLYLQCLSQKLRQERKRPLLDLHIELNGYMYDWNSRVSAKEKYYVWLQHTLRKKLILSYT

SEQ ID NO: 17476 - protein, 69 aa, Artificial Sequence
  Synthetic polypeptide
TPVPWAPFFLSLYFASVSFFSKSLVPPNEKNPQFKEQGQVTGMFSKQQSKRVSRILQITSGAYLKRDTR

SEQ ID NO: 17477 - protein, 123 aa, Artificial Sequence
  Synthetic polypeptide
REKPTVQGAGTSYRNVLQAAIQKSLKDPSNNFRLHNGRSKEQRLKEQLGAQQEPVKKSIQESEAFLPQSIPEERYKMKSKPLGICLIIDCIGNETGWSAMAQSQLTAISTSQVQAILLPQPPE

SEQ ID NO: 17478 - protein, 74 aa, Artificial Sequence
  Synthetic polypeptide
REKPTVQGAGTSYRNVLQAAIQKSLKDPSNNFRAGVQWRDLGSPQPPPPGFKRFSHLSLPSSWDYRNVPPRPAP

SEQ ID NO: 17479 - protein, 102 aa, Artificial Sequence
  Synthetic polypeptide
TPVPWAPFFLSLYFASVSFFSKSLVPPNEKNPQFKEQGQVTGMFSKQQSKRVSRILQITSGLECNGAILAHRNLRLPGSSDSPTSASQVAGITGMCHHARLH

SEQ ID NO: 17480 - protein, 44 aa, Artificial Sequence
  Synthetic polypeptide
REKPTVQGAGTSYRNVLQAAIQKSLKDPSNNFRVSLEKTYGIPA

SEQ ID NO: 17481 - protein, 44 aa, Artificial Sequence
  Synthetic polypeptide
REKPTVQGAGTSYRNVLQAAIQKSLKDPSNNFRMITPYAHCPDL

SEQ ID NO: 17482 - protein, 95 aa, Artificial Sequence
  Synthetic polypeptide
REKPTVQGAGTSYRNVLQAAIQKSLKDPSNNFRLHNGRSKEQRLKEQLGAQQEPVKKSIQESEAFLPQSIPEERYKMKSKPLGICLIIDCIGNET

SEQ ID NO: 17483 - protein, 25 aa, Artificial Sequence
  Synthetic polypeptide
APAPPLTRDPESCVPVAWVHSAYTQ

SEQ ID NO: 17484 - protein, 25 aa, Artificial Sequence
  Synthetic polypeptide
APAPPLTRDPESCVPVAWVHSAYTQ

SEQ ID NO: 17485 - protein, 25 aa, Artificial Sequence
  Synthetic polypeptide
APAPPLTRDPESCVPVAWVHSAYTQ

SEQ ID NO: 17486 - protein, 25 aa, Artificial Sequence
  Synthetic polypeptide
APAPPLTRDPESCVPVAWVHSAYTQ

SEQ ID NO: 17487 - protein, 25 aa, Artificial Sequence
  Synthetic polypeptide
APAPPLTRDPESCVPVAWVHSAYTQ

SEQ ID NO: 17488 - protein, 216 aa, Artificial Sequence
  Synthetic polypeptide
LEILSHVFQWLGFTVHIHNNVTKVEMEMVLQKQKCNPAHADGDCFVFCILTHGRFGAVYSSDEALIPIREIMSHFTALQCPRLAEKPKLFFIQACQGEEIQPSVSIEADALNPEQAPTSLQDSIPAEADFLLGLATVPGYVSFRHVEEGSWYIQSLCNHLKKLVPRHEDILSILTAVNDDVSRRVDKQGTKKQMPQPAFTLRKKLVFPVPLDALSL

SEQ ID NO: 17489 - protein, 216 aa, Artificial Sequence; identical to SEQ ID NO: 17488
  Synthetic polypeptide

SEQ ID NO: 17490 - protein, 216 aa, Artificial Sequence; identical to SEQ ID NO: 17488
  Synthetic polypeptide

SEQ ID NO: 17491 - protein, 215 aa, Artificial Sequence
  Synthetic polypeptide
LEILSHVFQWLGFTVHIHNNVTKVEMEMVLQKQKCNPAHADGDCFVFCILTHGRFGAVYSSDEALIPIREIMSHFTALQCPRLAEKPKLFFIQACQGEEIQPSVSIEADALNPEQAPTSLQDSIPAEADFLLGLATVPGYVSFRHVEEGSWYIQSLCNHLKKLVPRMLKFLEKTMEIRGRKRTVWGAKQISATSLPTAISAQTPRPPMRRWSSVS

SEQ ID NO: 17492 - protein, 215 aa, Artificial Sequence; identical to SEQ ID NO: 17491
  Synthetic polypeptide

SEQ ID NO: 17493 - protein, 2377 aa, Artificial Sequence
  Synthetic polypeptide
KLREFVTSRLSLKEKLKRSSSGRRKMIPDGSSEIQEVMKNSGKHLFSAQHRSLTRQSRRQICTSSLMERFLQDVLQHHPYHCQESSSTQDETHVNTGSSSEVVHLDDAFSEEEEEDEDKVEDEDATEERPSEVSEPIEELHSRPHKSQEGTQEVSVRPSVIQKLEKGQQQPLEFVHKIGASVRKCNLVDIGQATNNRSNLVRPPVICNAPASCLPESSNDRPVTANTTSLPPAAHLDSVSKCDPNKVEKYLEQPDGASRNPVPSSHVETTSFSYQKHKESNRKSLRMNSDKLVLWKDVKSQGKTLSAGLKFHERMGTKGSLRVKSPSKLAVNPNKTDMPSNKGIFEDTIAKNHEEFFSNMDCTQEEKHLVFNKTAFWEQKCSVSSEMKFDCISLQSASDQPQETAQDLSLWKEEQIDQEDNYESRGSEMSFDCSSSFHSLTDQSKVSAKEVNLSKEVRTDVQYKNNKSYVSKISSDCDDILHLVTNQSQMIVKEISLQNARHISLVDQSYESSSSETNFDCDASPQSTSDYPQQSVTEVNLPKEVHIGLVDKNYGSSSSEVSADSVFPLQSVVDRPPVAVTETKLRKKAHTSLVDNYGSSCSETSFDCDVSLESVVDHPQLTVKGRNLKGRQVHLKHKKRKPSSAKAHLDCDVSLGTVADESQRAVEKINLLKEKNADLMDMNCESHGPEMGFQADAQLADQSQVAEIERQKVDVDLENKSVQSSRSSLSSDSPASLYHSAHDEPQEALDEVNLKELNIDMEVRSYDCSSSELTFDSDPPLLSVTEQSHLDAEGKERHIDLEDESCESDSSEITFDSDIPLYSVIDQPEVAVYEEETVDLESKSNESCVSEITFDSDIPLHSGNDHPEVAVKEVIQKEEYIHLERKNDEPSGSEISSDSHAPLHSVTNSPEVAVKKLNPQKEEQVHLENKENEPIDSEVSLDYNIIFHSVTGRSEDPIKEISLHTKEHMYLENKSVFETSLDSDVPLQAATHKPEVIVKETWLQREKHAEFQGRSTEFSGSKTSLDSGVPHYSVTEPQVAVNKINRKKQYVLENKNDKCSGSEIILDSNVPPQSMTDQPQLAFLKEKHVNLKDKNSKSGDSKITFDSEQLQEAVKKIDQWKEEVIGLKNKINEPSTYKLIHHPDVSVQSVADQPKVAIKHVNLGNENHMYLEVKNSQYSCSEMNLDSGFLGQSIVNRPQITILEQEHIELEGKHNQCCGSEVSFDSDDPLQSVADRLRETVKEISLWKDEEVDTEDRRNEAKGFEIMYDSDVLQPVAGQPEEVVKEVSLWKEHVDLENKIVKPTDSRINFDSHEPLQSVTNKIPGANKEINLLREEHVCLDDKGYVPSDSEIIYVSNIPLQSVIKQPHILEEEHASLEDKSSNSYSPEESSDSNDSFQAAADELQKPVKEINLWKEDHIYLEDKSYKLGDFDVSYASHIPVQFVTDQSSVPVKEINLQKKDHNDLENKNCEVCGSEIKCHSCVHLQSEVDQPQVSYKEADLQKEEHVVMEEKTDQPSDSEMMYDSDVPFQIVVNQFPGSVKETHLPKVVLVDLVPGDSDYEVISDDIPLQLVTDPPQLTVKDISCINTECIDIEDKSCDFFGSEVRCNCKASTPSMTNQCKETFKIINRKKDYIILGEPSCQSCGSEMNFNVDASDQSMTYESQGPDEKMVKYIDSEDKSCGYNGSKGKFNLEDTSHRTTHRLQKAHKEASLRKDPRNAGLKGKSCQSSASAVDFGASSKSALHRRADKKKRSKLKHRDLEVSCEPDGFEMNFQCAPPLPSDTDQPQETVKKRHPCKKVSSDLKEKNHDSQSSSVLKVDSVRNLKKAKDVIEDNPDEPVLEALPHVPPSFVGKTWSQIMREDDIKINALVKEFREGRFHCYFDDDCETKKVSSKGKKKVTWADLQGKEDTAPTQAVSESDDIVCGISDIDDLSVALDKPCHRHPPAERPPKQKGRVASQCQTAKISHSTQTSCKNYPVMKRKIIRQEEDPPKSKCSRLQDDRKTKKKVKIGTVEFPASCTKVLKPMQPKALVCVLSSLNIKLKEGEGLPFPKMRHHSWDNDIRFICKYKRNIFDYYEPLIKQIVISPPLSVIVPEFERRNWVKIHFNRSNQNSSAGDNDADGQGSASAPLMAVPARYGFNSHQGTSDSSLFLEESKVLHARELPKKRNFQLTFLNHDVVKISPKSVRNKLLESQSKKKIHGKRVTTSSNKLGFPKKVYKPIILQQKPRKASEKQSIWIRTKPSDIIRKYISKYSVFLRHRYQSRSAFLGRYLKKKKSVVSRLKKAKRTAKVLLNSSVPPAGAEELSSAMANPPPKRPVRASCRVARRRKKTDESYHGRQKGPSTPVRAYDLRSSSCLQQRERMMTRLANKLRGNEVK

SEQ ID NO: 17494 - protein, 14 aa, Artificial Sequence
  Synthetic polypeptide
RTVESICSVLSTGV

SEQ ID NO: 17495 - protein, 63 aa, Artificial Sequence
  Synthetic polypeptide
NYFQEIKIKGICHQQTLTKGKTKKEFFRQKENDSRWKLRDTGSNEEQWKAFVQCSAQEFDQTE

SEQ ID NO: 17496 - protein, 467 aa, Artificial Sequence
  Synthetic polypeptide
LGVMYLPVVPATWEAEERINECDEICLSVLSTVLEAMEPCKNVHVLRTGFRILVDQQVWKIEDVFTLQVVMKCIGKDAPIALKRKLEMKALRELDRFSVLNSQHMFEVLAAMNHRSLILLDECSKVVLDNIHGCPLRIMINILQSCKDLQYHNLDLFKGLADYVAATFDIWKFRKVLFILILFENLGFRPVGLMDLFMKRIVEDPESLNMKNILSILHTYSSLNHVYKCQNKEQFVEVMASALTGYLHTISSENLLDAVYSFCLMNYFPLAPFNQLLQKDIISELLTSDDMKNAYKLHTLDTCLKLDDTVYLRDIALSLPQLPRELPSSHTNAKVAEVLSSLLGGEGHFSKDVHLPHNYHIDFEIRMDTNRNQVLPLSDVDTTSATDIQRVAVLCVSRSAYCLGSSHPRGFLAMKMRHLNAMGFHVILVNNWEMDKLEMEDAVTFLKTKIYSVEALPVAAVNVQSTQ

SEQ ID NO: 17497 - protein, 467 aa, Artificial Sequence; identical to SEQ ID NO: 17496
  Synthetic polypeptide

SEQ ID NO: 17498 - protein, 467 aa, Artificial Sequence; identical to SEQ ID NO: 17496
  Synthetic polypeptide

SEQ ID NO: 17499 - protein, 30 aa, Artificial Sequence
  Synthetic polypeptide
CTCLWSQLLGRLRNVSMSVMRYAFQFCQLF

SEQ ID NO: 17500 - protein, 30 aa, Artificial Sequence; identical to SEQ ID NO: 17499
  Synthetic polypeptide

SEQ ID NO: 17501 - protein, 30 aa, Artificial Sequence; identical to SEQ ID NO: 17499
  Synthetic polypeptide

SEQ ID NO: 17502 - protein, 490 aa, Artificial Sequence
  Synthetic polypeptide
KLFQKQWNIINIKCVFSDNGEGKKVLMHKRMCISQLENSERINECDEICLSVLSTVLEAMEPCKNVHVLRTGFRILVDQQVWKIEDVFTLQVVMKCIGKDAPIALKRKLEMKALRELDRFSVLNSQHMFEVLAAMNHRSLILLDECSKVVLDNIHGCPLRIMINILQSCKDLQYHNLDLFKGLADYVAATFDIWKFRKVLFILILFENLGFRPVGLMDLFMKRIVEDPESLNMKNILSILHTYSSLNHVYKCQNKEQFVEVMASALTGYLHTISSENLLDAVYSFCLMNYFPLAPFNQLLQKDIISELLTSDDMKNAYKLHTLDTCLKLDDTVYLRDIALSLPQLPRELPSSHTNAKVAEVLSSLLGGEGHFSKDVHLPHNYHIDFEIRMDTNRNQVLPLSDVDTTSATDIQRVAVLCVSRSAYCLGSSHPRGFLAMKMRHLNAMGFHVILVNNWEMDKLEMEDAVTFLKTKIYSVEALPVAAVNVQSTQ

SEQ ID NO: 17503 - protein, 490 aa, Artificial Sequence; identical to SEQ ID NO: 17502
  Synthetic polypeptide

SEQ ID NO: 17504 - protein, 490 aa, Artificial Sequence; identical to SEQ ID NO: 17502
  Synthetic polypeptide

SEQ ID NO: 17505 - protein, 30 aa, Artificial Sequence
  Synthetic polypeptide
CIKGCVSVSWKIQNVSMSVMRYAFQFCQLF

SEQ ID NO: 17506 - protein, 30 aa, Artificial Sequence; identical to SEQ ID NO: 17505
  Synthetic polypeptide

SEQ ID NO: 17507 - protein, 30 aa, Artificial Sequence; identical to SEQ ID NO: 17505
  Synthetic polypeptide

SEQ ID NO: 17508 - protein, 14 aa, Artificial Sequence
  Synthetic polypeptide
KDVYQSAGKFRTYQ

SEQ ID NO: 17509 - protein, 14 aa, Artificial Sequence
  Synthetic polypeptide
KDVYQSAGKFRTYQ

SEQ ID NO: 17510 - protein, 14 aa, Artificial Sequence
  Synthetic polypeptide
KDVYQSAGKFRTYQ

SEQ ID NO: 17511 - protein, 33 aa, Artificial Sequence
  Synthetic polypeptide
YHFLLKGIGDFWRNGWSPGLGKKRLCLQKKQHF

SEQ ID NO: 17512 - protein, 33 aa, Artificial Sequence; identical to SEQ ID NO: 17511
  Synthetic polypeptide

SEQ ID NO: 17513 - protein, 33 aa, Artificial Sequence; identical to SEQ ID NO: 17511
  Synthetic polypeptide

SEQ ID NO: 17514 - protein, 33 aa, Artificial Sequence; identical to SEQ ID NO: 17511
  Synthetic polypeptide

SEQ ID NO: 17515 - protein, 33 aa, Artificial Sequence; identical to SEQ ID NO: 17511
  Synthetic polypeptide

SEQ ID NO: 17516 - protein, 43 aa, Artificial Sequence
  Synthetic polypeptide
KESGISGEMAGLQGWGRKDFAFKRNSIFKHYTNALPAISFNLE

SEQ ID NO: 17517 - protein, 43 aa, Artificial Sequence; identical to SEQ ID NO: 17516
  Synthetic polypeptide

SEQ ID NO: 17518 - protein, 43 aa, Artificial Sequence; identical to SEQ ID NO: 17516
  Synthetic polypeptide

SEQ ID NO: 17519 - protein, 43 aa, Artificial Sequence; identical to SEQ ID NO: 17516
  Synthetic polypeptide

SEQ ID NO: 17520 - protein, 43 aa, Artificial Sequence; identical to SEQ ID NO: 17516
  Synthetic polypeptide

SEQ ID NO: 17521 - protein, 437 aa, Artificial Sequence
  Synthetic polypeptide
SVCLELIFCFLIPFPTKRNRGFLEKWLVSRAGEEKTLPSKETAFLNTTQMPCLQSASTWSSYEHNSESYLLREHVSELDSSFHSVLSLPSDVPLHFHFETLLKKTEIKGNLAENKFVDEYIISPSPVHSTLNQWRNGYSPICKPQIRSESSAQLLQGRKKRHLSETALGERTKLEESDFQHTESGSHSNFTAVSNVNVLSRIQNSSRNTARRRLRSESSYDIDNIVIPMSLVAPAKLEKLQYKEILTPSWRMVVLQPLDEYNLGKEEIEDLSDEVFSLRHKKYEEREQARWSLWEQSKWHRRNSRAYSKNVEGQDLLLKEYPNNFSSSQQCAAASPPGLPSENQDLCAYGLPSLNQSQETKSLWWERRAFPLKGEDMAALLCQDEKKDQVERSSTAFHGEIFGTSVPENGHHPKKQSDGMEEYKTFGLGLTNVKKNR

SEQ ID NO: 17522 - protein, 395 aa, Artificial Sequence
  Synthetic polypeptide
SVCLELIFCFLIPFPTKRNRGFLEKWLVSRAGEEKTLPSKETAFLNTTQMPCLQSASTWSSYEHNSESYLLREHVSELDSSFHSVLSLPSDVPLHFHFETLLKKTEIKGNLAENKFVDEYIISPSPGERTKLEESDFQHTESGSHSNFTAVSNVNVLSRIQNSSRNTARRRLRSESSYDIDNIVIPMSLVAPAKLEKLQYKEILTPSWRMVVLQPLDEYNLGKEEIEDLSDEVFSLRHKKYEEREQARWSLWEQSKWHRRNSRAYSKNVEGQDLLLKEYPNNFSSSQQCAAASPPGLPSENQDLCAYGLPSLNQSQETKSLWWERRAFPLKGEDMAALLCQDEKKDQVERSSTAFHGEIFGTSVPENGHHPKKQSDGMEEYKTFGLGLTNVKKNR

SEQ ID NO: 17523 - protein, 155 aa, Artificial Sequence
  Synthetic polypeptide
SVCLELIFCFLIPFPTKRNRGFLEKWLVSRAGEEKTLPSKETAFLNTTQMPCLQSASTWSSYEHNSESYLLREHVSELDSSFHSVLSLPSDVPLHFHFETLLKKTEIKGNLAENKFVDEYIISPSPGMSHLQFLYSICLFMSLYLLFLHSKKNKI

SEQ ID NO: 17524 - protein, 155 aa, Artificial Sequence; identical to SEQ ID NO: 17523
  Synthetic polypeptide

SEQ ID NO: 17525 - protein, 98 aa, Artificial Sequence
  Synthetic polypeptide
SVCLELIFCFLIPFPTKRNRGFLEKWLVSRAGEEKTLPSKETAFLNTTQMPCLQSASTWSSYEHNSESYLLREHVSELDSSFHSVLSLPSGKPPCNNF

SEQ ID NO: 17526 - protein, 97 aa, Artificial Sequence
  Synthetic polypeptide
DIARELNAKKIEFEQFLPMMQAISNNKDQATYEDFVEGLRVFDKEGNGTVMGAELRHVLATLGEKMKEEEVEALMAGQEDSNGCINYEAFVKHIMSI

SEQ ID NO: 17527 - protein, 97 aa, Artificial Sequence; identical to SEQ ID NO: 17526
  Synthetic polypeptide

SEQ ID NO: 17528 - protein, 3 aa, Artificial Sequence
  Synthetic polypeptide
PES

SEQ ID NO: 17529 - protein, 3 aa, Artificial Sequence
  Synthetic polypeptide
PES

SEQ ID NO: 17530 - protein, 16 aa, Artificial Sequence
  Synthetic polypeptide
REEGIRHSQRAECQEN

SEQ ID NO: 17531 - protein, 16 aa, Artificial Sequence
  Synthetic polypeptide
REEGIRHSQRAECQEN

SEQ ID NO: 17532 - protein, 25 aa, Artificial Sequence
  Synthetic polypeptide
YIMLVRTFLKGHPYIALVCSHKSSK

SEQ ID NO: 17533 - protein, 25 aa, Artificial Sequence
  Synthetic polypeptide
YIMLVRTFLKGHPYIALVCSHKSSK

SEQ ID NO: 17534 - protein, 69 aa, Artificial Sequence
  Synthetic polypeptide
RDTHILHWYVATNHQNDEDFDSFQSGEDTEDWFWLYQCDCTPKMEIFKTWHQAPFCQGTDSTHCPGRWN

SEQ ID NO: 17535 - protein, 69 aa, Artificial Sequence; identical to SEQ ID NO: 17534
  Synthetic polypeptide

SEQ ID NO: 17536 - protein, 19 aa, Artificial Sequence
  Synthetic polypeptide
SLRALEIVALHFDYGNRGY

SEQ ID NO: 17537 - protein, 19 aa, Artificial Sequence
  Synthetic polypeptide
SLRALEIVALHFDYGNRGY

SEQ ID NO: 17538 - protein, 19 aa, Artificial Sequence
  Synthetic polypeptide
SLRALEIVALHFDYGNRGY

SEQ ID NO: 17539 - protein, 572 aa, Artificial Sequence
  Synthetic polypeptide
RVSEAGSEVELLATPGALSEYARHLQDPLVSIDLSERWRSWHCTLTMETEAIDGYITCDNELSPEREHSNMAIDLTSSTPNGQHASPSHMTSTNSVKLEMQSDEECDRKPLSREDEIRGHDEGSSLEEPLIESSEVADNRKVQELQGEGGIRLPNGKLKCDVCGMVCIGPNVLMVHKRSHTGERPFHCNQCGASFTQKGNLLRHIKLHSGEKPFKCPFCSYACRRRDALTGHLRTHSVGKPHKCNYCGRSYKQRSSLEEHKERCHNYLQNVSMEAAGQVMSHHVPPMEDCKEQEPIMDNNISLVPFERPAVIEKLTGNMGKRKSSTPQKFVGEKLMRFSYPDIHFDMNLTYEKEAELMQSHMMDQAINNAITYLGAEALHPLMQHPPSTIAEVAPVISSAYSQVYHPNRIERPISRETADSHENNMDGPISLIRPKSRPQEREASPSNSCLDSTDSESSHDDHQSYQGHPALNPKRKQSPAYMKEDVKALDTTKAPKGSLKDIYKVFNGEGEQIRAFKCEHCRVLFLDHVMYTIHMGCHGYRDPLECNICGYRSQDRYEFSSHIVRGEHTFH

SEQ ID NO: 17540 - protein, 26 aa, Artificial Sequence
  Synthetic polypeptide
VNMQGTCRTHWCPLISQSAGDRGIAL

SEQ ID NO: 17541 - protein, 26 aa, Artificial Sequence
  Synthetic polypeptide
VNMQGTCRTHWCPLISQSAGDRGIAL

SEQ ID NO: 17542 - protein, 26 aa, Artificial Sequence
  Synthetic polypeptide
VNMQGTCRTHWCPLISQSAGDRGIAL

SEQ ID NO: 17543 - protein, 165 aa, Artificial Sequence
  Synthetic polypeptide
RVSEAGSEVELLATPGALSEYARHLQDPLVSIDLSERWRSWHCTLTMETEAIDGYITCDNELSPEREHSNMAIDLTSSTPNGQHASPSHMTSTNSVKLEMQSDEECDRKPLSREDEIRGHDEGSSLEEPLIESSEVADNRKVQELQGEGGIRLPNGERPFHCNQC

SEQ ID NO: 17544 - protein, 132 aa, Artificial Sequence
  Synthetic polypeptide
RVSEAGSEVELLATPGALSEYARHLQDPLVSIDLSERWRSWHCTLTMETEAIDGYITCDNELSPEREHSNMAIDLTSSTPNGQHASPSHMTSSKSSFYDFFLCVCVSPATDFNLLGLWGPLTLWYSYCYRFC

SEQ ID NO: 17545 - protein, 31 aa, Artificial Sequence
  Synthetic polypeptide
RRKHPKGRKFSQFCRYIPHVCNTTGIESVQN

SEQ ID NO: 17546 - protein, 31 aa, Artificial Sequence; identical to SEQ ID NO: 17545
  Synthetic polypeptide

SEQ ID NO: 17547 - protein, 31 aa, Artificial Sequence; identical to SEQ ID NO: 17545
  Synthetic polypeptide

SEQ ID NO: 17548 - protein, 31 aa, Artificial Sequence; identical to SEQ ID NO: 17545
  Synthetic polypeptide

SEQ ID NO: 17549 - protein, 31 aa, Artificial Sequence; identical to SEQ ID NO: 17545
  Synthetic polypeptide

SEQ ID NO: 17550 - protein, 31 aa, Artificial Sequence; identical to SEQ ID NO: 17545
  Synthetic polypeptide

SEQ ID NO: 17551 - protein, 31 aa, Artificial Sequence; identical to SEQ ID NO: 17545
  Synthetic polypeptide

SEQ ID NO: 17552 - protein, 31 aa, Artificial Sequence; identical to SEQ ID NO: 17545
  Synthetic polypeptide

SEQ ID NO: 17553 - protein, 31 aa, Artificial Sequence; identical to SEQ ID NO: 17545
  Synthetic polypeptide

SEQ ID NO: 17554 - protein, 31 aa, Artificial Sequence; identical to SEQ ID NO: 17545
  Synthetic polypeptide

SEQ ID NO: 17555 - protein, 31 aa, Artificial Sequence; identical to SEQ ID NO: 17545
  Synthetic polypeptide

SEQ ID NO: 17556 - protein, 31 aa, Artificial Sequence; identical to SEQ ID NO: 17545
  Synthetic polypeptide

SEQ ID NO: 17557 - protein, 31 aa, Artificial Sequence; identical to SEQ ID NO: 17545
  Synthetic polypeptide

SEQ ID NO: 17558 - protein, 31 aa, Artificial Sequence; identical to SEQ ID NO: 17545
  Synthetic polypeptide

SEQ ID NO: 17559 - protein, 703 aa, Artificial Sequence
  Synthetic polypeptide
RVFKIDKPSQMQVTDVQDNSISVKWLPSSSPVTGYRVTTTPKNGPGPTKTKTAGPDQTEMTIEGLQPTVEYVVSVYAQNPSGESQPLVQTAVTTIPAPTDLKFTQVTPTSLSAQWTPPNVQLTGYRVRVTPKEKTGPMKEINLAPDSSSVVVSGLMVATKYEVSVYALKDTLTSRPAQGVVTTLENVSPPRRARVTDATETTITISWRTKTETITGFQVDAVPANGQTPIQRTIKPDVRSYTITGLQPGTDYKIYLYTLNDNARSSPVVIDASTAIDAPSNLRFLATTPNSLLVSWQPPRARITGYIIKYEKPGSPPREVVPRPRPGVTEATITGLEPGTEYTIYVIALKNNQKSEPLIGRKKTVQKTPFVTHPGYDTGNGIQLPGTSGQQPSVGQQMIFEEHGFRRTTPPTTATPIRHRPRPYPPNVGQEALSQTTISWAPFQDTSEYIISCHPVGTDEEPLQFRVPGTSTSATLTGLTRGATYNVIVEALKDQQRHKVREEVVTVGNSVNEGLNQPTDDSCFDPYTVSHYAVGDEWERMSESGFKLLCQCLGFGSGHFRCDSSRWCHDNGVNYKIGEKWDRQGENGQMMSCTCLGNGKGEFKCDPHEATCYDDGKTYHVGEQWQKEYLGAICSCTCFGGQRGWRCDNCRRPGGEPSPEGTTGQSYNQYSQRYHQRTNTNVNCPIECFMPLDVQADREDSRE

SEQ ID NO: 17560 - protein, 38 aa, Artificial Sequence
  Synthetic polypeptide
KEAPQGQEVQSVLSIYSACLQYDRHRECSKLTNHPRCK

SEQ ID NO: 17561 - protein, 38 aa, Artificial Sequence; identical to SEQ ID NO: 17560
  Synthetic polypeptide

SEQ ID NO: 17562 - protein, 38 aa, Artificial Sequence; identical to SEQ ID NO: 17560
  Synthetic polypeptide

SEQ ID NO: 17563 - protein, 38 aa, Artificial Sequence; identical to SEQ ID NO: 17560
  Synthetic polypeptide

SEQ ID NO: 17564 - protein, 38 aa, Artificial Sequence; identical to SEQ ID NO: 17560
  Synthetic polypeptide

SEQ ID NO: 17565 - protein, 38 aa, Artificial Sequence; identical to SEQ ID NO: 17560
  Synthetic polypeptide

SEQ ID NO: 17566 - protein, 38 aa, Artificial Sequence; identical to SEQ ID NO: 17560
  Synthetic polypeptide

SEQ ID NO: 17567 - protein, 38 aa, Artificial Sequence; identical to SEQ ID NO: 17560
  Synthetic polypeptide

SEQ ID NO: 17568 - protein, 38 aa, Artificial Sequence; identical to SEQ ID NO: 17560
  Synthetic polypeptide

SEQ ID NO: 17569 - protein, 38 aa, Artificial Sequence; identical to SEQ ID NO: 17560
  Synthetic polypeptide

SEQ ID NO: 17570 - protein, 38 aa, Artificial Sequence; identical to SEQ ID NO: 17560
  Synthetic polypeptide

SEQ ID NO: 17571 - protein, 38 aa, Artificial Sequence; identical to SEQ ID NO: 17560
  Synthetic polypeptide

SEQ ID NO: 17572 - protein, 38 aa, Artificial Sequence; identical to SEQ ID NO: 17560
  Synthetic polypeptide

SEQ ID NO: 17573 - protein, 38 aa, Artificial Sequence; identical to SEQ ID NO: 17560
  Synthetic polypeptide

SEQ ID NO: 17574 - protein, 818 aa, Artificial Sequence
  Synthetic polypeptide
RVFKIDKPSQMQVTDVQDNSISVKWLPSSSPVTGYRVTTTPKNGPGPTKTKTAGPDQTEMTIEGLQPTVEYVVSVYAQNPSGESQPLVQTAVTNIDRPKGLAFTDVDVDSIKIAWESPQGQVSRYRVTYSSPEDGIHELFPAPDGEEDTAELQGLRPGSEYTVSVVALHDDMESQPLIGTQSTAIPAPTDLKFTQVTPTSLSAQWTPPNVQLTGYRVRVTPKEKTGPMKEINLAPDSSSVVVSGLMVATKYEVSVYALKDTLTSRPAQGVVTTLENVSPPRRARVTDATETTITISWRTKTETITGFQVDAVPANGQTPIQRTIKPDVRSYTITGLQPGTDYKIYLYTLNDNARSSPVVIDASTAIDAPSNLRFLATTPNSLLVSWQPPRARITGYIIKYEKPGSPPREVVPRPRPGVTEATITGLEPGTEYTIYVIALKNNQKSEPLIGRKKTDELPQLVTLPHPNLHGPEILDVPSTVQKTPFVTHPGYDTGNGIQLPGTSGQQPSVGQQMIFEEHGFRRTTPPTTATPIRHRPRPYPPNVGQEALSQTTISWAPFQDTSEYIISCHPVGTDEEPLQFRVPGTSTSATLTGLTRGATYNVIVEALKDQQRHKVREEVVTVGNSVNEGLNQPTDDSCFDPYTVSHYAVGDEWERMSESGFKLLCQCLGFGSGHFRCDSSRWCHDNGVNYKIGEKWDRQGENGQMMSCTCLGNGKGEFKCDPHEATCYDDGKTYHVGEQWQKEYLGAICSCTCFGGQRGWRCDNCRRPGGEPSPEGTTGQSYNQYSQRYHQRTNTNVNCPIECFMPLDVQADREDSRE

SEQ ID NO: 17575 - protein, 818 aa, Artificial Sequence; identical to SEQ ID NO: 17574
  Synthetic polypeptide

SEQ ID NO: 17576 - protein, 639 aa, Artificial Sequence
  Synthetic polypeptide
RVFKIDKPSQMQVTDVQDNSISVKWLPSSSPVTGYRVTTTPKNGPGPTKTKTAGPDQTEMTIEGLQPTVEYVVSVYAQNPSGESQPLVQTAVTTIPAPTDLKFTQVTPTSLSAQWTPPNVQLTGYRVRVTPKEKTGPMKEINLAPDSSSVVVSGLMVATKYEVSVYALKDTLTSRPAQGVVTTLENVSPPRRARVTDATETTITISWRTKTETITGFQVDAVPANGQTPIQRTIKPDVRSYTITGLQPGTDYKIYLYTLNDNARSSPVVIDASTAIDAPSNLRFLATTPNSLLVSWQPPRARITGYIIKYEKPGSPPREVVPRPRPGVTEATITGLEPGTEYTIYVIALKNNQKSEPLIGRKKTGQEALSQTTISWAPFQDTSEYIISCHPVGTDEEPLQFRVPGTSTSATLTGLTRGATYNVIVEALKDQQRHKVREEVVTVGNSVNEGLNQPTDDSCFDPYTVSHYAVGDEWERMSESGFKLLCQCLGFGSGHFRCDSSRWCHDNGVNYKIGEKWDRQGENGQMMSCTCLGNGKGEFKCDPHEATCYDDGKTYHVGEQWQKEYLGAICSCTCFGGQRGWRCDNCRRPGGEPSPEGTTGQSYNQYSQRYHQRTNTNVNCPIECFMPLDVQADREDSRE

SEQ ID NO: 17577 - protein, 639 aa, Artificial Sequence; identical to SEQ ID NO: 17576
  Synthetic polypeptide

SEQ ID NO: 17578 - protein, 849 aa, Artificial Sequence
  Synthetic polypeptide
RVFKIDKPSQMQVTDVQDNSISVKWLPSSSPVTGYRVTTTPKNGPGPTKTKTAGPDQTEMTIEGLQPTVEYVVSVYAQNPSGESQPLVQTAVTNIDRPKGLAFTDVDVDSIKIAWESPQGQVSRYRVTYSSPEDGIHELFPAPDGEEDTAELQGLRPGSEYTVSVVALHDDMESQPLIGTQSTAIPAPTDLKFTQVTPTSLSAQWTPPNVQLTGYRVRVTPKEKTGPMKEINLAPDSSSVVVSGLMVATKYEVSVYALKDTLTSRPAQGVVTTLENVSPPRRARVTDATETTITISWRTKTETITGFQVDAVPANGQTPIQRTIKPDVRSYTITGLQPGTDYKIYLYTLNDNARSSPVVIDASTAIDAPSNLRFLATTPNSLLVSWQPPRARITGYIIKYEKPGSPPREVVPRPRPGVTEATITGLEPGTEYTIYVIALKNNQKSEPLIGRKKTDELPQLVTLPHPNLHGPEILDVPSTVQKTPFVTHPGYDTGNGIQLPGTSGQQPSVGQQMIFEEHGFRRTTPPTTATPIRHRPRPYPPNVGEEIQIGHIPREDVDYHLYPHGPGLNPNASTGQEALSQTTISWAPFQDTSEYIISCHPVGTDEEPLQFRVPGTSTSATLTGLTRGATYNVIVEALKDQQRHKVREEVVTVGNSVNEGLNQPTDDSCFDPYTVSHYAVGDEWERMSESGFKLLCQCLGFGSGHFRCDSSRWCHDNGVNYKIGEKWDRQGENGQMMSCTCLGNGKGEFKCDPHEATCYDDGKTYHVGEQWQKEYLGAICSCTCFGGQRGWRCDNCRRPGGEPSPEGTTGQSYNQYSQRYHQRTNTNVNCPIECFMPLDVQADREDSRE

SEQ ID NO: 17579 - protein, 849 aa, Artificial Sequence; identical to SEQ ID NO: 17578
  Synthetic polypeptide

SEQ ID NO: 17580 - protein, 647 aa, Artificial Sequence
  Synthetic polypeptide
RVFKIDKPSQMQVTDVQDNSISVKWLPSSSPVTGYRVTTTPKNGPGPTKTKTAGPDQTEMTIEGLQPTVEYVVSVYAQNPSGESQPLVQTAVTNIDRPKGLAFTDVDVDSIKIAWESPQGQVSRYRVTYSSPEDGIHELFPAPDGEEDTAELQGLRPGSEYTVSVVALHDDMESQPLIGTQSTAIPAPTDLKFTQVTPTSLSAQWTPPNVQLTGYRVRVTPKEKTGPMKEINLAPDSSSVVVSGLMVATKYEVSVYALKDTLTSRPAQGVVTTLENVSPPRRARVTDATETTITISWRTKTETITGFQVDAVPANGQTPIQRTIKPDVRSYTITGLQPGTDYKIYLYTLNDNARSSPVVIDASTAIDAPSNLRFLATTPNSLLVSWQPPRARITGYIIKYEKPGSPPREVVPRPRPGVTEATITGLEPGTEYTIYVIALKNNQKSEPLIGRKKTVNEGLNQPTDDSCFDPYTVSHYAVGDEWERMSESGFKLLCQCLGFGSGHFRCDSSRWCHDNGVNYKIGEKWDRQGENGQMMSCTCLGNGKGEFKCDPHEATCYDDGKTYHVGEQWQKEYLGAICSCTCFGGQRGWRCDNCRRPGGEPSPEGTTGQSYNQYSQRYHQRTNTNVNCPIECFMPLDVQADREDSRE

SEQ ID NO: 17581 - protein, 674 aa, Artificial Sequence
  Synthetic polypeptide
RVFKIDKPSQMQVTDVQDNSISVKWLPSSSPVTGYRVTTTPKNGPGPTKTKTAGPDQTEMTIEGLQPTVEYVVSVYAQNPSGESQPLVQTAVTNIDRPKGLAFTDVDVDSIKIAWESPQGQVSRYRVTYSSPEDGIHELFPAPDGEEDTAELQGLRPGSEYTVSVVALHDDMESQPLIGTQSTAIPAPTDLKFTQVTPTSLSAQWTPPNVQLTGYRVRVTPKEKTGPMKEINLAPDSSSVVVSGLMVATKYEVSVYALKDTLTSRPAQGVVTTLENVSPPRRARVTDATETTITISWRTKTETITGFQVDAVPANGQTPIQRTIKPDVRSYTITGLQPGTDYKIYLYTLNDNARSSPVVIDASTAIDAPSNLRFLATTPNSLLVSWQPPRARITGYIIKYEKPGSPPREVVPRPRPGVTEATITGLEPGTEYTIYVIALKNNQKSEPLIGRKKTGQEALSQTTISWAPFQDTSEYIISCHPVGTDEEPLQFRVPGTSTSATLTGLTRGATYNVIVEALKDQQRHKVREEVVTVGNSGWCHDNGVNYKIGEKWDRQGENGQMMSCTCLGNGKGEFKCDPHEATCYDDGKTYHVGEQWQKEYLGAICSCTCFGGQRGWRCDNCRRPGGEPSPEGTTGQSYNQYSQRYHQRTNTNVNCPIECFMPLDVQADREDSRE

SEQ ID NO: 17582 - protein, 494 aa, Artificial Sequence
  Synthetic polypeptide
RVFKIDKPSQMQVTDVQDNSISVKWLPSSSPVTGYRVTTTPKNGPGPTKTKTAGPDQTEMTIEGLQPTVEYVVSVYAQNPSGESQPLVQTAVTNIDRPKGLAFTDVDVDSIKIAWESPQGQVSRYRVTYSSPEDGIHELFPAPDGEEDTAELQGLRPGSEYTVSVVALHDDMESQPLIGTQSTAIPAPTDLKFTQVTPTSLSAQWTPPNVQLTGYRVRVTPKEKTGPMKEINLAPDSSSVVVSGLMVATKYEVSVYALKDTLTSRPAQGVVTTLENVSPPRRARVTDATETTITISWRTKTETITGFQVDAVPANGQTPIQRTIKPDVRSYTITGLQPGTDYKIYLYTLNDNARSSPVVIDASTAIDAPSNLRFLATTPNSLLVSWQPPRARITGYIIKYEKPGSPPREVVPRPRPGVTEATITGLEPGTEYTIYVIALKNNQKSEPLIGRKKTGQEALSQTTISWAPFQDTSEYIISCHPVGTDEEPLQSTKA

SEQ ID NO: 17583 - protein, 793 aa, Artificial Sequence
  Synthetic polypeptide
RVFKIDKPSQMQVTDVQDNSISVKWLPSSSPVTGYRVTTTPKNGPGPTKTKTAGPDQTEMTIEGLQPTVEYVVSVYAQNPSGESQPLVQTAVTNIDRPKGLAFTDVDVDSIKIAWESPQGQVSRYRVTYSSPEDGIHELFPAPDGEEDTAELQGLRPGSEYTVSVVALHDDMESQPLIGTQSTAIPAPTDLKFTQVTPTSLSAQWTPPNVQLTGYRVRVTPKEKTGPMKEINLAPDSSSVVVSGLMVATKYEVSVYALKDTLTSRPAQGVVTTLENVSPPRRARVTDATETTITISWRTKTETITGFQVDAVPANGQTPIQRTIKPDVRSYTITGLQPGTDYKIYLYTLNDNARSSPVVIDASTAIDAPSNLRFLATTPNSLLVSWQPPRARITGYIIKYEKPGSPPREVVPRPRPGVTEATITGLEPGTEYTIYVIALKNNQKSEPLIGRKKTVQKTPFVTHPGYDTGNGIQLPGTSGQQPSVGQQMIFEEHGFRRTTPPTTATPIRHRPRPYPPNVGQEALSQTTISWAPFQDTSEYIISCHPVGTDEEPLQFRVPGTSTSATLTGLTRGATYNVIVEALKDQQRHKVREEVVTVGNSVNEGLNQPTDDSCFDPYTVSHYAVGDEWERMSESGFKLLCQCLGFGSGHFRCDSSRWCHDNGVNYKIGEKWDRQGENGQMMSCTCLGNGKGEFKCDPHEATCYDDGKTYHVGEQWQKEYLGAICSCTCFGGQRGWRCDNCRRPGGEPSPEGTTGQSYNQYSQRYHQRTNTNVNCPIECFMPLDVQADREDSRE

SEQ ID NO: 17584 - protein, 728 aa, Artificial Sequence
  Synthetic polypeptide
RVFKIDKPSQMQVTDVQDNSISVKWLPSSSPVTGYRVTTTPKNGPGPTKTKTAGPDQTEMTIEGLQPTVEYVVSVYAQNPSGESQPLVQTAVTTIPAPTDLKFTQVTPTSLSAQWTPPNVQLTGYRVRVTPKEKTGPMKEINLAPDSSSVVVSGLMVATKYEVSVYALKDTLTSRPAQGVVTTLENVSPPRRARVTDATETTITISWRTKTETITGFQVDAVPANGQTPIQRTIKPDVRSYTITGLQPGTDYKIYLYTLNDNARSSPVVIDASTAIDAPSNLRFLATTPNSLLVSWQPPRARITGYIIKYEKPGSPPREVVPRPRPGVTEATITGLEPGTEYTIYVIALKNNQKSEPLIGRKKTDELPQLVTLPHPNLHGPEILDVPSTVQKTPFVTHPGYDTGNGIQLPGTSGQQPSVGQQMIFEEHGFRRTTPPTTATPIRHRPRPYPPNVGQEALSQTTISWAPFQDTSEYIISCHPVGTDEEPLQFRVPGTSTSATLTGLTRGATYNVIVEALKDQQRHKVREEVVTVGNSVNEGLNQPTDDSCFDPYTVSHYAVGDEWERMSESGFKLLCQCLGFGSGHFRCDSSRWCHDNGVNYKIGEKWDRQGENGQMMSCTCLGNGKGEFKCDPHEATCYDDGKTYHVGEQWQKEYLGAICSCTCFGGQRGWRCDNCRRPGGEPSPEGTTGQSYNQYSQRYHQRTNTNVNCPIECFMPLDVQADREDSRE

SEQ ID NO: 17585 - protein, 759 aa, Artificial Sequence
  Synthetic polypeptide
RVFKIDKPSQMQVTDVQDNSISVKWLPSSSPVTGYRVTTTPKNGPGPTKTKTAGPDQTEMTIEGLQPTVEYVVSVYAQNPSGESQPLVQTAVTTIPAPTDLKFTQVTPTSLSAQWTPPNVQLTGYRVRVTPKEKTGPMKEINLAPDSSSVVVSGLMVATKYEVSVYALKDTLTSRPAQGVVTTLENVSPPRRARVTDATETTITISWRTKTETITGFQVDAVPANGQTPIQRTIKPDVRSYTITGLQPGTDYKIYLYTLNDNARSSPVVIDASTAIDAPSNLRFLATTPNSLLVSWQPPRARITGYIIKYEKPGSPPREVVPRPRPGVTEATITGLEPGTEYTIYVIALKNNQKSEPLIGRKKTDELPQLVTLPHPNLHGPEILDVPSTVQKTPFVTHPGYDTGNGIQLPGTSGQQPSVGQQMIFEEHGFRRTTPPTTATPIRHRPRPYPPNVGEEIQIGHIPREDVDYHLYPHGPGLNPNASTGQEALSQTTISWAPFQDTSEYIISCHPVGTDEEPLQFRVPGTSTSATLTGLTRGATYNVIVEALKDQQRHKVREEVVTVGNSVNEGLNQPTDDSCFDPYTVSHYAVGDEWERMSESGFKLLCQCLGFGSGHFRCDSSRWCHDNGVNYKIGEKWDRQGENGQMMSCTCLGNGKGEFKCDPHEATCYDDGKTYHVGEQWQKEYLGAICSCTCFGGQRGWRCDNCRRPGGEPSPEGTTGQSYNQYSQRYHQRTNTNVNCPIECFMPLDVQADREDSRE

SEQ ID NO: 17586 - protein, 759 aa, Artificial Sequence; identical to SEQ ID NO: 17585
  Synthetic polypeptide

SEQ ID NO: 17587 - protein, 30 aa, Artificial Sequence
  Synthetic polypeptide
LQDHDNWPKGAGDLSVVKKMKETFKEKAKL

SEQ ID NO: 17588 - protein, 19 aa, Artificial Sequence
  Synthetic polypeptide
SKIMTTGPREQGTFLLSKR

SEQ ID NO: 17589 - protein, 3 aa, Artificial Sequence
  Synthetic polypeptide
PRS

SEQ ID NO: 17590 - protein, 746 aa, Artificial Sequence
  Synthetic polypeptide
VDAPPVSLSAQCILLSWNIVLAAVVLCMDVGFTMSNSIPGIESPFEQAKKVITMFVQRQVFAENKDEIALVLFGTDGTDNPLSGGDQYQNITVHRHLMLPDFDLLEDIESKIQPGSQQADFLDALIVSMDVIQHETIGKKFEKRHIEIFTDLSSRFSKSQLDIIIHSLKKCDISLQFFLPFSLGKEDGSGDRGDGPFRLGGHGPSFPLKGITEQQKEGLEIVKMVMISLEGEDGLDEIYSFSESLRKLCVFKKIERHSIHWPCRLTIGSNLSIRIAAYKSILQERVKKTWTVVDAKTLKKEDIQKETVYCLNDDDETEVLKEDIIQGFRYGSDIVPFSKVDEEQMKYKSEGKCFSVLGFCKSSQVQRRFFMGNQVLKVFAARDDEAAAVALSSLIHALDDLDMVAIVRYAYDKRANPQVGVAFPHIKHNYECLVYVQLPFMEDLRQYMFSSLKNSKKYAPTEAQLNAVDALIDSMSLAKKDEKTDTLEDLFPTTKIPNPRFQRLFQCLLHRALHPREPLPPIQQHIWNMLNPPAEVTTKSQIPLSKIKTLFPLIEAKKKDQVTAQEIFQDNHEDGPTAKKLKTEQGGAHFSVSSLAEGSVTSVGSVNPAENFRVLVKQKKASFEEASNQLINHIEQFLDTNETPYFMKSIDCIRAFREEAIKFSEEQRFNNFLKALQEKVEIKQLNHFWEIVVQDGITLITKEEASGSSVTAEEAKKFLAPKDKPSGDTAAVFEEGGDVDDLLDMI

SEQ ID NO: 17591 - protein, 746 aa, Artificial Sequence; identical to SEQ ID NO: 17590
  Synthetic polypeptide

SEQ ID NO: 17592 - protein, 64 aa, Artificial Sequence
  Synthetic polypeptide
LLLIKTHPRKSTFRKPFLPLHRSGIPSTSLEWMLLLCLSVPSAYFYHGTLFWQLLCCVWTWALP

SEQ ID NO: 17593 - protein, 64 aa, Artificial Sequence; identical to SEQ ID NO: 17592
  Synthetic polypeptide

SEQ ID NO: 17594 - protein, 69 aa, Artificial Sequence
  Synthetic polypeptide
HMIDSYSLRLTQGNPHSGSLFCPFTALVSPPPVLSGCSSCVSQCPVHTSIMEHCSGSCCAVYGRGLYHE

SEQ ID NO: 17595 - protein, 69 aa, Artificial Sequence; identical to SEQ ID NO: 17594
  Synthetic polypeptide

SEQ ID NO: 17596 - protein, 22 aa, Artificial Sequence
  Synthetic polypeptide
SPKTMAMTTQKEAWWRTTWTAP

SEQ ID NO: 17597 - protein, 22 aa, Artificial Sequence
  Synthetic polypeptide
SPKTMAMTTQKEAWWRTTWTAP

SEQ ID NO: 17598 - protein, 17 aa, Artificial Sequence
  Synthetic polypeptide
VQIPGGLPCTNHPRQWR

SEQ ID NO: 17599 - protein, 17 aa, Artificial Sequence
  Synthetic polypeptide
VQIPGGLPCTNHPRQWR

SEQ ID NO: 17600 - protein, 191 aa, Artificial Sequence
  Synthetic polypeptide
FKSQVVYHVLITQDNGDDHSEGGLVENHVDSTMNMLGGGGSAGRKPLKSGMKELAVFREKVTEQHRQMGKGGKHHLGLEEPKKLRPPPARTPCQQELDQVLERISTMRLPDERGPLEHLYSLHIPNCDKHGLYNLKQCKMSLNGQRGECWCVNPNTGKLIQGAPTIRGDPECHLFYNEQQEARGVHTQRMQ

SEQ ID NO: 17601 - protein, 191 aa, Artificial Sequence; identical to SEQ ID NO: 17600
  Synthetic polypeptide

SEQ ID NO: 17602 - protein, 20 aa, Artificial Sequence
  Synthetic polypeptide
TTMAMTTQKEAWWRTTWTAP

SEQ ID NO: 17603 - protein, 20 aa, Artificial Sequence
  Synthetic polypeptide
TTMAMTTQKEAWWRTTWTAP

SEQ ID NO: 17604 - protein, 45 aa, Artificial Sequence
  Synthetic polypeptide
GALPRFTWHFFLPPCEEGALLPGPLASTTIVSFLRPPRHAELQWR

SEQ ID NO: 17605 - protein, 45 aa, Artificial Sequence; identical to SEQ ID NO: 17604
  Synthetic polypeptide

SEQ ID NO: 17606 - protein, 185 aa, Artificial Sequence
  Synthetic polypeptide
GLPAMLNYNGDDHSEGGLVENHVDSTMNMLGGGGSAGRKPLKSGMKELAVFREKVTEQHRQMGKGGKHHLGLEEPKKLRPPPARTPCQQELDQVLERISTMRLPDERGPLEHLYSLHIPNCDKHGLYNLKQCKMSLNGQRGECWCVNPNTGKLIQGAPTIRGDPECHLFYNEQQEARGVHTQRMQ

SEQ ID NO: 17607 - protein, 185 aa, Artificial Sequence; identical to SEQ ID NO: 17606
  Synthetic polypeptide

SEQ ID NO: 17608 - protein, 4 aa, Artificial Sequence
  Synthetic polypeptide
LAET

SEQ ID NO: 17609 - protein, 4 aa, Artificial Sequence
  Synthetic polypeptide
LAET

SEQ ID NO: 17610 - protein, 4 aa, Artificial Sequence
  Synthetic polypeptide
LAET

SEQ ID NO: 17611 - protein, 4 aa, Artificial Sequence
  Synthetic polypeptide
LAET

SEQ ID NO: 17612 - protein, 14 aa, Artificial Sequence
  Synthetic polypeptide
MQKHECEPDHGGQL

SEQ ID NO: 17613 - protein, 14 aa, Artificial Sequence
  Synthetic polypeptide
MQKHECEPDHGGQL

SEQ ID NO: 17614 - protein, 14 aa, Artificial Sequence
  Synthetic polypeptide
MQKHECEPDHGGQL

SEQ ID NO: 17615 - protein, 14 aa, Artificial Sequence
  Synthetic polypeptide
MQKHECEPDHGGQL

SEQ ID NO: 17616 - protein, 658 aa, Artificial Sequence
  Synthetic polypeptide
CRNMSVSRTMEDSCELDLVYVTERIIAVSFPSTANEENFRSNLREVAQMLKSKHGGNYLLFNLSERRPDITKLHAKVLEFGWPDLHTPALEKICSICKAMDTWLNADPHNVVVLHNKGNRGRIGVVIAAYMHYSNISASADQALDRFAMKRFYEDKIVPIGQPSQRRYVHYFSGLLSGSIKMNNKPLFLHHVIMHGIPNFESKGGCRPFLRIYQAMQPVYTSGIYNIPGDSQTSVCITIEPGLLLKGDILLKCYHKKFRSPARDVIFRVQFHTCAIHDLGVVFGKEDLDDAFKDDRFPEYGKVEFVFSYGPEKIQGMEHLENGPSVSVDYNTSDPLIRWDSYDNFSGHRDDGMEEVVGHTQGPLDGSLYAKVKKKDSLHGSTGAVNATRPTLSATPNHVEHTLSVSSDSGNSTASTKTDKTDEPVPGASSATAALSPQEKRELDRLLSGFGLEREKQGAMYHTQHLRSRPAGGSAVPSSGRHVVPAQVHVNGGALASERETDILDDELPNQDGHSAGSMGTLSSLDGVTNTSEGGYPEALSPLTNGLDKSYPMEPMVNGGGYPYESASRAGPAHAGHTAPMRPSYSAQEGLAGYQREGPHPAWPQPVTTSHYAHDPSGMFRSQSFSEAEPQLPPAPVRGGSSREAVQRGLNSWQQQQQ

SEQ ID NO: 17617 - protein, 422 aa, Artificial Sequence
  Synthetic polypeptide
CRNMSVSRTMEDSCELDLVYVTERIIAVSFPSTANEENFRSNLREVAQMLKSKHGGNYLLFNLSERRPDITKLHAKVLEFGWPDLHTPALEKICSICKAMDTWLNADPHNVVVLHNKGNRGRIGVVIAAYMHYSNISASADQALDRFAMKRFYEDKIVPIGQPSQRRYVHYFSGLLSGSIKMNNKPLFLHHVIMHGIPNFESKGGCRPFLRIYQAMQPVYTSGIYNIPGDSQTSVCITIEPGLLLKGDILLKCYHKKFRSPARDVIFRVQFHTCAIHDLGVVFGKEDLDDAFKDDRFPEYGKVEFVFSYGPEKIQGMEHLENGPSVSVDYNTSDPLIRWDSYDNFSGHRDDGMEEVVGHTQGPLDGSLYAKVKKKDSLHGSTGAVNATRPTLSATPNHVEHTLSVSSDSGNSTASTKTDKTD

SEQ ID NO: 17618 - protein, 388 aa, Artificial Sequence
  Synthetic polypeptide
CRNMSVSRTMEDSCELDLVYVTERIIAVSFPSTANEENFRSNLREVAQMLKSKHGGNYLLFNLSERRPDITKLHAKVLEFGWPDLHTPALEKICSICKAMDTWLNADPHNVVVLHNKGNRGRIGVVIAAYMHYSNISASADQALDRFAMKRFYEDKIVPIGQPSQRRYVHYFSGLLSGSIKMNNKPLFLHHVIMHGIPNFESKGGCRPFLRIYQAMQPVYTSGIYNIPGDSQTSVCITIEPGLLLKGDILLKCYHKKFRSPARDVIFRVQFHTCAIHDLGVVFGKEDLDDAFKDDRFPEYGKVEFVFSYGPEKIQGMEHLENGPSVSVDYNTSDPLIRWDSYDNFSGHRDDGMEDGNKQNTNSQSIGSISGGLEDQYTWPDTHWPSQS

SEQ ID NO: 17619 - protein, 60 aa, Artificial Sequence
  Synthetic polypeptide
CRNMSVSRTMEDSCELDLVYVTERIIAVSFPSTANEENFRSNLREVAQMLKSKHGGNYLV

SEQ ID NO: 17620 - protein, 159 aa, Artificial Sequence
  Synthetic polypeptide
SQHFERLREAPPELTTWRPGPPHGCSRSRELAPTTPRPLRSQRGPISSIPMMSLSSRPSLAAIYGVGRVVAGTSGRWPRWLLTPSPGRRSKWWWKGRSQPTSGWPWVGRPPMPTPRDYRKKTWSSPPGSLSVPTRLGASWPQRSLTSIRMTWKRMMCSY

SEQ ID NO: 17621 - protein, 159 aa, Artificial Sequence; identical to SEQ ID NO: 17620
  Synthetic polypeptide

SEQ ID NO: 17622 - protein, 330 aa, Artificial Sequence
  Synthetic polypeptide
EAEGGTSRTNNLETGPSTRLFQVQGTGANNTKAFEVPARANFLNSNDVFVLKTQSCCYLWCGKGCSGDEREMAKMVADTISRTEKQVVVEGQEPANFWMALGGKAPYANTKRLQEENLVITPRLFECSNKTGRFLATEIPDFNQDDLEEDDVFLLDVWDQVFFWIGKHANEEEKKAAATTAQEYLKTHPSGRDPETPIIVVKQGHEPPTFTGWFLAWDPFKWSNTKSYEDLKAELGNSRDWSQITAEVTSPKVDVFNANSNLSSGPLPIFPLEQLVNKPVEELPEGVDPSRKEEHLSIEDFTQAFGMTPAAFSALPRWKQQNLKKEKGLF

SEQ ID NO: 17623 - protein, 330 aa, Artificial Sequence; identical to SEQ ID NO: 17622
  Synthetic polypeptide

SEQ ID NO: 17624 - protein, 151 aa, Artificial Sequence
  Synthetic polypeptide
SQHFERLREAPPELTTWRPGPPHGCSRSRELAPTTPRPLRSQRGPISSIPMMSLSSRPSLAAIYGVGRVVAGTSGRWPRWLLTPSPGRRSKWWWKGRSQPTSGWPWVGRPPMPTPRDYRKKTWSSPPGSLSVPTRLGASWPQRSLTSIRMT

SEQ ID NO: 17625 - protein, 147 aa, Artificial Sequence
  Synthetic polypeptide
EAEGGTSRTNNLETGPSTRLFQVQGTGANNTKAFEVPARANFLNSNDVFVLKTQSCCYLWCGKGCSGDEREMAKMVADTISRTEKQVVVEGQEPANFWMALGGKAPYANTKRLQEENLVITPRLFECSNKTGRFLATEIPDFNQDDL

SEQ ID NO: 17626 - protein, 189 aa, Artificial Sequence
  Synthetic polypeptide
NPVSTKNTKIIQASMPVIPATPEAEAGESLEPARQVLSVNASQSTWGRQVSRWAMPAGSSIAWNMGFSLMGRCPVTRPLVEGTTPSPPSSVKLVLENTYPGQFLWIWSLRSLMRSEMAHTDSSSTQSSSSLGKRMLPTTMPVVTIPLARRSLTQCWIGSASCLTSAQDFRASWCSTALVGALALASPHS

SEQ ID NO: 17627 - protein, 189 aa, Artificial Sequence; identical to SEQ ID NO: 17626
  Synthetic polypeptide

SEQ ID NO: 17628 - protein, 460 aa, Artificial Sequence
  Synthetic polypeptide
GRRIARTREAGVERECISVHVGQAGVQMGNACWELYCLEHGIQPDGQMPSDKTIGGGDDSFTTFFCETGAGKHVPRAVFVDLEPTVIDEIRNGPYRQLFHPEQLITGKEDAANNYARGHYTIGKEIIDPVLDRIRKLSDQCTGLQGFLVFHSFGGGTGSGFTSLLMERLSVDYGKKSKLEFSIYPAPQVSTAVVEPYNSILTTHTTLEHSDCAFMVDNEAIYDICRRNLDIERPTYTNLNRLISQIVSSITASLRFDGALNVDLTEFQTNLVPYPRIHFPLATYAPVISAEKAYHEQLSVAEITNACFEPANQMVKCDPRHGKYMACCLLYRGDVVPKDVNAAIAAIKTKRSIQFVDWCPTGFKVGINYQPPTVVPGGDLAKVQRAVCMLSNTTAIAEAWARLDHKFDLMYAKRAFVHWYVGEGMEEGEFSEAREDMAALEKDYEEVGIDSYEDEDEGEE

SEQ ID NO: 17629 - protein, 187 aa, Artificial Sequence
  Synthetic polypeptide
GRRIARTREAGVERECISVHVGQAGVQMGNACWELYCLEHGIQPDGQMPSDKTIGGGDDSFTTFFCETGAGKHVPRAVFVDLEPTVIDEIRNGPYRQLFHPEQLITGKEDAANNYARGHYTIGKEIIDPVLDRIRKLSDQCTGLQGFLVFHSFGGGTGSGFTSLLMERLSVDYGKKSKLEFSIYPAP

SEQ ID NO: 17630 - protein, 154 aa, Artificial Sequence
  Synthetic polypeptide
NPVSTKNTKIIQASMPVIPATPEAEAGESLEPARQVLSVNASQSTWGRQVSRWAMPAGSSIAWNMGFSLMGRCPVTRPLVEGTTPSPPSSVKLVLENTYPGQFLWIWSLRSLMRSEMAHTDSSSTQSSSSLGKRMLPTTMPVVTIPLARRSLTQ

SEQ ID NO: 17631 - protein, 129 aa, Artificial Sequence
  Synthetic polypeptide
GRRIARTREAGVERECISVHVGQAGVQMGNACWELYCLEHGIQPDGQMPSDKTIGGGDDSFTTFFCETGAGKHVPRAVFVDLEPTVIDEIRNGPYRQLFHPEQLITGKEDAANNYARGHYTIGKEIIDP

SEQ ID NO: 17632 - protein, 339 aa, Artificial Sequence
  Synthetic polypeptide
DLSERKGEEELEGVYTRYGKCYTFNADPRSSLPSRAGGMGSGLEIMLDIQQEEYLPIWRETNETSFEAGIRVQIHSQEEPPYIHQLGFGVSPGFQTFVSCQEQRLTYLPQPWGNCRAESELREPELQGYSAYSVSACRLRCEKEAVLQRCHCRMVHMPDSLGGGPEGPCFCPTPCNLTRYGKEISMVRIPNRGSARYLARKYNRNETYIRENFLVLDVFFEALTSEAMEQRAAYGLSALLGDLGGQMGLFIGASILTLLEILDYIYEVSWDRLKRVWRRPKTPLRTSTGGISTLGLQELKEQSPCPSRGRVEGGGVSSLLPNHHHPHGPPGGLFEDFAC

SEQ ID NO: 17633 - protein, 114 aa, Artificial Sequence
  Synthetic polypeptide
GWAGKGKGDETSVRGKERKSWRGSILAMGSVTPSTRTRGARCPAGQGAWAVAWRSCWTSSRRSTCPSGGRQMRRRLRQVFGCRSTARRSRPTSTSWGSGCPQASRPLCPARNSG

SEQ ID NO: 17634 - protein, 114 aa, Artificial Sequence; identical to SEQ ID NO: 17633
  Synthetic polypeptide

SEQ ID NO: 17635 - protein, 58 aa, Artificial Sequence
  Synthetic polypeptide
EERRGRAGGGLYSLWEVLHLQRGPAELAAQPGRGHGQWPGDHAGHPAGGVPAHLEGDK

SEQ ID NO: 17636 - protein, 58 aa, Artificial Sequence; identical to SEQ ID NO: 17635
  Synthetic polypeptide

SEQ ID NO: 17637 - protein, 358 aa, Artificial Sequence
  Synthetic polypeptide
DLSERKGEEELEGVYTRYGKCYTFNADPRSSLPSRAGGMGSGLEIMLDIQQEEYLPIWRETNETSFEAGIRVQIHSQEEPPYIHQLGFGVSPGFQTFVSCQEQRLTYLPQPWGNCRAESELREPELQGYSAYSVSACRLRCEKEAVLQRCHCRMVHMPGNETICPPNIYIECADHTLDSLGGGPEGPCFCPTPCNLTRYGKEISMVRIPNRGSARYLARKYNRNETYIRENFLVLDVFFEALTSEAMEQRAAYGLSALLGDLGGQMGLFIGASILTLLEILDYIYEVSWDRLKRVWRRPKTPLRTSTGGISTLGLQELKEQSPCPSRGRVEGGGVSSLLPNHHHPHGPPGGLFEDFAC

SEQ ID NO: 17638 - protein, 63 aa, Artificial Sequence
  Synthetic polypeptide
AVWPWGSQKASVSIGLYSLWEVLHLQRGPAELAAQPGRGHGQWPGDHAGHPAGGVPAHLEGDK

SEQ ID NO: 17639 - protein, 63 aa, Artificial Sequence; identical to SEQ ID NO: 17638
  Synthetic polypeptide

SEQ ID NO: 17640 - protein, 328 aa, Artificial Sequence
  Synthetic polypeptide
ASVYTRYGKCYTFNADPRSSLPSRAGGMGSGLEIMLDIQQEEYLPIWRETNETSFEAGIRVQIHSQEEPPYIHQLGFGVSPGFQTFVSCQEQRLTYLPQPWGNCRAESELREPELQGYSAYSVSACRLRCEKEAVLQRCHCRMVHMPDSLGGGPEGPCFCPTPCNLTRYGKEISMVRIPNRGSARYLARKYNRNETYIRENFLVLDVFFEALTSEAMEQRAAYGLSALLGDLGGQMGLFIGASILTLLEILDYIYEVSWDRLKRVWRRPKTPLRTSTGGISTLGLQELKEQSPCPSRGRVEGGGVSSLLPNHHHPHGPPGGLFEDFAC

SEQ ID NO: 17641 - protein, 117 aa, Artificial Sequence
  Synthetic polypeptide
PPGFEPRLYALSCVAVGKPKSFCEHRSILAMGSVTPSTRTRGARCPAGQGAWAVAWRSCWTSSRRSTCPSGGRQMRRRLRQVFGCRSTARRSRPTSTSWGSGCPQASRPLCPARNSG

SEQ ID NO: 17642 - protein, 117 aa, Artificial Sequence; identical to SEQ ID NO: 17641
  Synthetic polypeptide

SEQ ID NO: 17643 - protein, 347 aa, Artificial Sequence
  Synthetic polypeptide
ASVYTRYGKCYTFNADPRSSLPSRAGGMGSGLEIMLDIQQEEYLPIWRETNETSFEAGIRVQIHSQEEPPYIHQLGFGVSPGFQTFVSCQEQRLTYLPQPWGNCRAESELREPELQGYSAYSVSACRLRCEKEAVLQRCHCRMVHMPGNETICPPNIYIECADHTLDSLGGGPEGPCFCPTPCNLTRYGKEISMVRIPNRGSARYLARKYNRNETYIRENFLVLDVFFEALTSEAMEQRAAYGLSALLGDLGGQMGLFIGASILTLLEILDYIYEVSWDRLKRVWRRPKTPLRTSTGGISTLGLQELKEQSPCPSRGRVEGGGVSSLLPNHHHPHGPPGGLFEDFAC

SEQ ID NO: 17644 - protein, 686 aa, Artificial Sequence
  Synthetic polypeptide
WVQMLVLQFTFCLTKRTRYISTELGIRQRLLVAVLTSQTTLPTLGVAVNRTLGHRLERVVFLTGARGRRAPPGMAVVTLGEERPIGHLHLALRHLLEQHGDDFDWFFLVPDTTYTEAHGLARLTGHLSLASAAHLYLGRPQDFIGGEPTPGRYCHGGFGVLLSRMLLQQLRPHLEGCRNDIVSARPDEWLGRCILDATGVGCTGDHEGVHYSHLELSPGEPVQEGDPHFRSALTAHPVRDPVHMYQLHKAFARAELERTYQEIQELQWEIQNTSHLAVDGDQAAAWPVGIPAPSRPASRFEVLRWDYFTEQHAFSCADGSPRCPLRGADRADVADVLGTALEELNRRYHPALRLQKQQLVNGYRRFDPARGMEYTLDLQLEALTPQGGRRPLTRRVQLLRPLSRVEILPVPYVTEASRLTVLLPLAAAERDLAPGFLEAFATAALEPGDAAAALTLLLLYEPRQAQRVAHADVFAPVKAHVAELERRFPGARVPWLSVQTAAPSPLRLMDLLSKKHPLDTLFLLAGPDTVLTPDFLNRCRMHAISGWQAFFPMHFQAFHPAVAPPQGPGPPELGRDTGRFDRQAASEACFYNSDYVAARGRLAAASEQEEELLESLDVYELFLHFSSLHVLRAVEPALLQRYRAQTCSARLSEDLYHRCLQSVLEGLGSRTQLAMLLFEQEQGNST

SEQ ID NO: 17645 - protein, 34 aa, Artificial Sequence
  Synthetic polypeptide
GFKCWFCNLPSALPKGPATSARSWASGRGCWWRC

SEQ ID NO: 17646 - protein, 34 aa, Artificial Sequence; identical to SEQ ID NO: 17645
  Synthetic polypeptide

SEQ ID NO: 17647 - protein, 102 aa, Artificial Sequence
  Synthetic polypeptide
GSNAGSAIYLLPYQKDPLHQHGAGHQAEAAGGGADLSDHAAHAGRGREPHAGAPAGACGVPDGRTGPPGPTWHGSGDARRGATHWTPAPGAAPPAGAARRRL

SEQ ID NO: 17648 - protein, 102 aa, Artificial Sequence; identical to SEQ ID NO: 17647
  Synthetic polypeptide

SEQ ID NO: 17649 - protein, 209 aa, Artificial Sequence
  Synthetic polypeptide
WVQMLVLQFTFCLTKRTRYISTELGIRQRLLVAVLTSQTTLPTLGVAVNRTLGHRLERVVFLTGARGRRAPPGMAVVTLGEERPIGHLHLALRHLLEQHGDDFDWFFLVPDTTYTEAHGLARLTGHLSLASAAHLYLGRPQDFIGGEPTPGRYCHGGFGVLLSRMLLQQLRPHLEGCRNDIVSARPDEWLGRCILDATGVGCTGDHEVG

SEQ ID NO: 17650 - protein, 25 aa, Artificial Sequence
  Synthetic polypeptide
FLLIHSFLPPQFWLPAANCGLKIDI

SEQ ID NO: 17651 - protein, 30 aa, Artificial Sequence
  Synthetic polypeptide
VVPPYPQFFASTVLVTCSKLWFENRHLRRK

SEQ ID NO: 17652 - protein, 51 aa, Artificial Sequence
  Synthetic polypeptide
FITRFDGFIMVLLSSHSSLSCQHVKKDMFAYSSSMIVILESFASPRLITAS

SEQ ID NO: 17653 - protein, 385 aa, Artificial Sequence
  Synthetic polypeptide
WFYNGFAQFSFFSFLPACKEGHVCLLFLHDCYTGELCQSKIDYCILDPCRNGATCISSLSGFTCQCPEGYFGSACEEKVDPCASSPCQNNGTCYVDGVHFTCNCSPGFTGPTCAQLIDFCALSPCAHGTCRSVGTSYKCLCDPGYHGLYCEEEYNECLSAPCLNAATCRDLVNGYECVCLAEYKGTHCELYKDPCANVSCLNGATCDSDGLNGTCICAPGFTGEECDIDINECDSNPCHHGGSCLDQPNGYNCHCPHGWVGANCEIHLQWKSGHMAESLTNMPRHSLYIIIGALCVAFILMLIILIVGICRISRIEYQGSSRPAYEEFYNCRSIDSEFSNAIASIRHARFGKKSRPAMYDVSPIAYEDYSPDDKPLVTLIKTKDL

SEQ ID NO: 17654 - protein, 429 aa, Artificial Sequence
  Synthetic polypeptide
GQVQWLTPVIPALWEAEAGGSPEATFSCTCEEQYVGTFCEEYDACQRKPCQNNASCIDANEKQDGSNFTCVCLPGYTGELCQSKIDYCILDPCRNGATCISSLSGFTCQCPEGYFGSACEEKVDPCASSPCQNNGTCYVDGVHFTCNCSPGFTGPTCAQLIDFCALSPCAHGTCRSVGTSYKCLCDPGYHGLYCEEEYNECLSAPCLNAATCRDLVNGYECVCLAEYKGTHCELYKDPCANVSCLNGATCDSDGLNGTCICAPGFTGEECDIDINECDSNPCHHGGSCLDQPNGYNCHCPHGWVGANCEIHLQWKSGHMAESLTNMPRHSLYIIIGALCVAFILMLIILIVGICRISRIEYQGSSRPAYEEFYNCRSIDSEFSNAIASIRHARFGKKSRPAMYDVSPIAYEDYSPDDKPLVTLIKTKDL

SEQ ID NO: 17655 - protein, 80 aa, Artificial Sequence
  Synthetic polypeptide
SQHFGRLKLADHLRQLFPVPVRSSTWVLSVKNTMLARGNLAKTTRAVLMQMKSKMGAISPVFAFLVILESFASPRLITAS

SEQ ID NO: 17656 - protein, 17 aa, Artificial Sequence
  Synthetic polypeptide
GCTEPRSCHCTQPRQQS

SEQ ID NO: 17657 - protein, 17 aa, Artificial Sequence
  Synthetic polypeptide
GCTEPRSCHCTQPRQQS

SEQ ID NO: 17658 - protein, 17 aa, Artificial Sequence
  Synthetic polypeptide
GCTEPRSCHCTQPRQQS

SEQ ID NO: 17659 - protein, 17 aa, Artificial Sequence
  Synthetic polypeptide
GCTEPRSCHCTQPRQQS

SEQ ID NO: 17660 - protein, 17 aa, Artificial Sequence
  Synthetic polypeptide
GCTEPRSCHCTQPRQQS

SEQ ID NO: 17661 - protein, 17 aa, Artificial Sequence
  Synthetic polypeptide
GCTEPRSCHCTQPRQQS

SEQ ID NO: 17662 - protein, 17 aa, Artificial Sequence
  Synthetic polypeptide
GCTEPRSCHCTQPRQQS

SEQ ID NO: 17663 - protein, 17 aa, Artificial Sequence
  Synthetic polypeptide
GCTEPRSCHCTQPRQQS

SEQ ID NO: 17664 - protein, 108 aa, Artificial Sequence
  Synthetic polypeptide
AHEVALSQDHAIALSLGNRAKELPPKPLSRPQQSSAPVQLNSGSQSNLNQPIEVTALYSFEGQQPGDLNFQAGDRITVISKTDSHFDWWEGKLRGQTGIFPANYVTMN

SEQ ID NO: 17665 - protein, 108 aa, Artificial Sequence; identical to SEQ ID NO: 17664
  Synthetic polypeptide

SEQ ID NO: 17666 - protein, 108 aa, Artificial Sequence; identical to SEQ ID NO: 17664
  Synthetic polypeptide

SEQ ID NO: 17667 - protein, 108 aa, Artificial Sequence; identical to SEQ ID NO: 17664
  Synthetic polypeptide

SEQ ID NO: 17668 - protein, 23 aa, Artificial Sequence
  Synthetic polypeptide
ATELKNYLQSHCQDHSSHLHQSS

SEQ ID NO: 17669 - protein, 23 aa, Artificial Sequence
  Synthetic polypeptide
ATELKNYLQSHCQDHSSHLHQSS

SEQ ID NO: 17670 - protein, 23 aa, Artificial Sequence
  Synthetic polypeptide
ATELKNYLQSHCQDHSSHLHQSS

SEQ ID NO: 17671 - protein, 23 aa, Artificial Sequence
  Synthetic polypeptide
ATELKNYLQSHCQDHSSHLHQSS

SEQ ID NO: 17672 - protein, 23 aa, Artificial Sequence
  Synthetic polypeptide
ATELKNYLQSHCQDHSSHLHQSS

SEQ ID NO: 17673 - protein, 23 aa, Artificial Sequence
  Synthetic polypeptide
ATELKNYLQSHCQDHSSHLHQSS

SEQ ID NO: 17674 - protein, 23 aa, Artificial Sequence
  Synthetic polypeptide
ATELKNYLQSHCQDHSSHLHQSS

SEQ ID NO: 17675 - protein, 23 aa, Artificial Sequence
  Synthetic polypeptide
ATELKNYLQSHCQDHSSHLHQSS

SEQ ID NO: 17676 - protein, 127 aa, Artificial Sequence
  Synthetic polypeptide
AHEVALSQDHAIALSLGNRAKELPPKPLSRPQQSSAPVQLNSGSQSNRNEYKLYPGLSSYHERVGNLNQPIEVTALYSFEGQQPGDLNFQAGDRITVISKTDSHFDWWEGKLRGQTGIFPANYVTMN

SEQ ID NO: 17677 - protein, 127 aa, Artificial Sequence; identical to SEQ ID NO: 17676
  Synthetic polypeptide

SEQ ID NO: 17678 - protein, 127 aa, Artificial Sequence; identical to SEQ ID NO: 17676
  Synthetic polypeptide

SEQ ID NO: 17679 - protein, 59 aa, Artificial Sequence
  Synthetic polypeptide
AHEVALSQDHAIALSLGNRAKELPPKPLSRPQQSSAPVQLNSGSQSKYFCCNSNTVVIK

SEQ ID NO: 17680 - protein, 51 aa, Artificial Sequence
  Synthetic polypeptide
HPFMFNKKQNTEQNSRRVLPQSDKGHLQKHLTQCERLKALRSGTMQRDAPA

SEQ ID NO: 17681 - protein, 11 aa, Artificial Sequence
  Synthetic polypeptide
DQEQCKETPLL

SEQ ID NO: 17682 - protein, 16 aa, Artificial Sequence
  Synthetic polypeptide
KTESFKIRNNAKRRPC

SEQ ID NO: 17683 - protein, 16 aa, Artificial Sequence
  Synthetic polypeptide
KTESFKIRNNAKRRPC

SEQ ID NO: 17684 - protein, 16 aa, Artificial Sequence
  Synthetic polypeptide
KTESFKIRNNAKRRPC

SEQ ID NO: 17685 - protein, 16 aa, Artificial Sequence
  Synthetic polypeptide
KTESFKIRNNAKRRPC

SEQ ID NO: 17686 - protein, 16 aa, Artificial Sequence
  Synthetic polypeptide
KTESFKIRNNAKRRPC

SEQ ID NO: 17687 - protein, 16 aa, Artificial Sequence
  Synthetic polypeptide
KTESFKIRNNAKRRPC

SEQ ID NO: 17688 - protein, 16 aa, Artificial Sequence
  Synthetic polypeptide
KTESFKIRNNAKRRPC

SEQ ID NO: 17689 - protein, 126 aa, Artificial Sequence
  Synthetic polypeptide
HPFMFNKKQNTEQNSRRVLPQSDKGHLQKHLTQCERLKALRSGTMQRDAPANGNANEENGEQEADNEVDEEEEEGGEEEEEEEEGDGEEEDGDEDEEAESATGKRAAEDDEDDDVDTKKQKTDEDD

SEQ ID NO: 17690 - protein, 126 aa, Artificial Sequence; identical to SEQ ID NO: 17689
  Synthetic polypeptide

SEQ ID NO: 17691 - protein, 126 aa, Artificial Sequence; identical to SEQ ID NO: 17689
  Synthetic polypeptide

SEQ ID NO: 17692 - protein, 126 aa, Artificial Sequence; identical to SEQ ID NO: 17689
  Synthetic polypeptide

SEQ ID NO: 17693 - protein, 27 aa, Artificial Sequence
  Synthetic polypeptide
DQEQCKETPLLTGMLMRKMGSRRLTMR

SEQ ID NO: 17694 - protein, 27 aa, Artificial Sequence
  Synthetic polypeptide
DQEQCKETPLLTGMLMRKMGSRRLTMR

SEQ ID NO: 17695 - protein, 27 aa, Artificial Sequence
  Synthetic polypeptide
DQEQCKETPLLTGMLMRKMGSRRLTMR

SEQ ID NO: 17696 - protein, 27 aa, Artificial Sequence
  Synthetic polypeptide
DQEQCKETPLLTGMLMRKMGSRRLTMR

SEQ ID NO: 17697 - protein, 27 aa, Artificial Sequence
  Synthetic polypeptide
DQEQCKETPLLTGMLMRKMGSRRLTMR

SEQ ID NO: 17698 - protein, 127 aa, Artificial Sequence
  Synthetic polypeptide
HPFMFNKKQNTEQNSRRVLPQSDKGHLQKHLTQCERLKALRSGTMQRDAPANGNAENEENGEQEADNEVDEEEEEGGEEEEEEEEGDGEEEDGDEDEEAESATGKRAAEDDEDDDVDTKKQKTDEDD

SEQ ID NO: 17699 - protein, 28 aa, Artificial Sequence
  Synthetic polypeptide
DQEQCKETPLLTGMLRMRKMGSRRLTMR

SEQ ID NO: 17700 - protein, 123 aa, Artificial Sequence
  Synthetic polypeptide
HPFMFNKKQNTEQNSRRVLPQSDKGHLQKHLTQCERLKALRSGTMQRDAPANGNANEENGEQEADNEVDEEEEEGGEEEEEEEEGDEDGDEDEEAESATGKRAAEDDEDDDVDTKKQKTDEDD

SEQ ID NO: 17701 - protein, 52 aa, Artificial Sequence
  Synthetic polypeptide
HPFMFNKKQNTEQNSRRVLPQSDKGHLQKHLTQCERLKALRSGTMQRRLTMR

SEQ ID NO: 17702 - protein, 52 aa, Artificial Sequence; identical to SEQ ID NO: 17701
  Synthetic polypeptide

SEQ ID NO: 17703 - protein, 52 aa, Artificial Sequence; identical to SEQ ID NO: 17701
  Synthetic polypeptide

SEQ ID NO: 17704 - protein, 52 aa, Artificial Sequence; identical to SEQ ID NO: 17701
  Synthetic polypeptide

SEQ ID NO: 17705 - protein, 52 aa, Artificial Sequence; identical to SEQ ID NO: 17701
  Synthetic polypeptide

SEQ ID NO: 17706 - protein, 52 aa, Artificial Sequence; identical to SEQ ID NO: 17701
  Synthetic polypeptide

SEQ ID NO: 17707 - protein, 8 aa, Artificial Sequence
  Synthetic polypeptide
DQEQCKGG

SEQ ID NO: 17708 - protein, 8 aa, Artificial Sequence
  Synthetic polypeptide
DQEQCKGG

SEQ ID NO: 17709 - protein, 8 aa, Artificial Sequence
  Synthetic polypeptide
DQEQCKGG

SEQ ID NO: 17710 - protein, 8 aa, Artificial Sequence
  Synthetic polypeptide
DQEQCKGG

SEQ ID NO: 17711 - protein, 8 aa, Artificial Sequence
  Synthetic polypeptide
DQEQCKGG

SEQ ID NO: 17712 - protein, 8 aa, Artificial Sequence
  Synthetic polypeptide
DQEQCKGG

SEQ ID NO: 17713 - protein, 76 aa, Artificial Sequence
  Synthetic polypeptide
KTESFKIRNNAKEADNEVDEEEEEGGEEEEEEEEGDGEEEDGDEDEEAESATGKRAAEDDEDDDVDTKKQKTDEDD

SEQ ID NO: 17714 - protein, 76 aa, Artificial Sequence; identical to SEQ ID NO: 17713
  Synthetic polypeptide

SEQ ID NO: 17715 - protein, 76 aa, Artificial Sequence; identical to SEQ ID NO: 17713
  Synthetic polypeptide

SEQ ID NO: 17716 - protein, 76 aa, Artificial Sequence; identical to SEQ ID NO: 17713
  Synthetic polypeptide

SEQ ID NO: 17717 - protein, 76 aa, Artificial Sequence; identical to SEQ ID NO: 17713
  Synthetic polypeptide

SEQ ID NO: 17718 - protein, 73 aa, Artificial Sequence
  Synthetic polypeptide
KTESFKIRNNAKEADNEVDEEEEEGGEEEEEEEEGDEDGDEDEEAESATGKRAAEDDEDDDVDTKKQKTDEDD

SEQ ID NO: 17719 - protein, 61 aa, Artificial Sequence
  Synthetic polypeptide
HPFMFNKKQNTEQNSRRVLPQSDKGHLQKHLTQCERLKALRSGTMQRRGRRWGGRGGGRRR

SEQ ID NO: 17720 - protein, 61 aa, Artificial Sequence; identical to SEQ ID NO: 17719
  Synthetic polypeptide

SEQ ID NO: 17721 - protein, 61 aa, Artificial Sequence; identical to SEQ ID NO: 17719
  Synthetic polypeptide

SEQ ID NO: 17722 - protein, 61 aa, Artificial Sequence; identical to SEQ ID NO: 17719
  Synthetic polypeptide

SEQ ID NO: 17723 - protein, 61 aa, Artificial Sequence; identical to SEQ ID NO: 17719
  Synthetic polypeptide

SEQ ID NO: 17724 - protein, 61 aa, Artificial Sequence; identical to SEQ ID NO: 17719
  Synthetic polypeptide

SEQ ID NO: 17725 - protein, 62 aa, Artificial Sequence
  Synthetic polypeptide
DQEQCKEEEEGGEEEEEEEEGDGEEEDGDEDEEAESATGKRAAEDDEDDDVDTKKQKTDEDD

SEQ ID NO: 17726 - protein, 62 aa, Artificial Sequence; identical to SEQ ID NO: 17725
  Synthetic polypeptide

SEQ ID NO: 17727 - protein, 62 aa, Artificial Sequence; identical to SEQ ID NO: 17725
  Synthetic polypeptide

SEQ ID NO: 17728 - protein, 62 aa, Artificial Sequence; identical to SEQ ID NO: 17725
  Synthetic polypeptide

SEQ ID NO: 17729 - protein, 62 aa, Artificial Sequence; identical to SEQ ID NO: 17725
  Synthetic polypeptide

SEQ ID NO: 17730 - protein, 68 aa, Artificial Sequence
  Synthetic polypeptide
KTESFKIRNNAKKRKKVGRKRRRKKKVMVRKRMEMKMRKLSQLRASGQLKMMRMTMSIPRSRRPTRMT

SEQ ID NO: 17731 - protein, 68 aa, Artificial Sequence; identical to SEQ ID NO: 17730
  Synthetic polypeptide

SEQ ID NO: 17732 - protein, 68 aa, Artificial Sequence; identical to SEQ ID NO: 17730
  Synthetic polypeptide

SEQ ID NO: 17733 - protein, 68 aa, Artificial Sequence; identical to SEQ ID NO: 17730
  Synthetic polypeptide

SEQ ID NO: 17734 - protein, 68 aa, Artificial Sequence; identical to SEQ ID NO: 17730
  Synthetic polypeptide

SEQ ID NO: 17735 - protein, 59 aa, Artificial Sequence
  Synthetic polypeptide
DQEQCKEEEEGGEEEEEEEEGDEDGDEDEEAESATGKRAAEDDEDDDVDTKKQKTDEDD

SEQ ID NO: 17736 - protein, 65 aa, Artificial Sequence
  Synthetic polypeptide
KTESFKIRNNAKKRKKVGRKRRRKKKVMRMEMKMRKLSQLRASGQLKMMRMTMSIPRSRRPTRMT

SEQ ID NO: 17737 - protein, 60 aa, Artificial Sequence
  Synthetic polypeptide
HPFMFNKKQNTEQNSRRVLPQSDKGHLQKHLTQCERLKALRSGTMQRGRRWGGRGGGRRR

SEQ ID NO: 17738 - protein, 60 aa, Artificial Sequence; identical to SEQ ID NO: 17737
  Synthetic polypeptide

SEQ ID NO: 17739 - protein, 60 aa, Artificial Sequence; identical to SEQ ID NO: 17737
  Synthetic polypeptide

SEQ ID NO: 17740 - protein, 60 aa, Artificial Sequence; identical to SEQ ID NO: 17737
  Synthetic polypeptide

SEQ ID NO: 17741 - protein, 60 aa, Artificial Sequence; identical to SEQ ID NO: 17737
  Synthetic polypeptide

SEQ ID NO: 17742 - protein, 60 aa, Artificial Sequence; identical to SEQ ID NO: 17737
  Synthetic polypeptide

SEQ ID NO: 17743 - protein, 61 aa, Artificial Sequence
  Synthetic polypeptide
DQEQCKEEEGGEEEEEEEEGDGEEEDGDEDEEAESATGKRAAEDDEDDDVDTKKQKTDEDD

SEQ ID NO: 17744 - protein, 61 aa, Artificial Sequence; identical to SEQ ID NO: 17743
  Synthetic polypeptide

SEQ ID NO: 17745 - protein, 61 aa, Artificial Sequence; identical to SEQ ID NO: 17743
  Synthetic polypeptide

SEQ ID NO: 17746 - protein, 61 aa, Artificial Sequence; identical to SEQ ID NO: 17743
  Synthetic polypeptide

SEQ ID NO: 17747 - protein, 61 aa, Artificial Sequence; identical to SEQ ID NO: 17743
  Synthetic polypeptide

SEQ ID NO: 17748 - protein, 67 aa, Artificial Sequence
  Synthetic polypeptide
KTESFKIRNNAKRKKVGRKRRRKKKVMVRKRMEMKMRKLSQLRASGQLKMMRMTMSIPRSRRPTRMT

SEQ ID NO: 17749 - protein, 67 aa, Artificial Sequence; identical to SEQ ID NO: 17748
  Synthetic polypeptide

SEQ ID NO: 17750 - protein, 67 aa, Artificial Sequence; identical to SEQ ID NO: 17748
  Synthetic polypeptide

SEQ ID NO: 17751 - protein, 67 aa, Artificial Sequence; identical to SEQ ID NO: 17748
  Synthetic polypeptide

SEQ ID NO: 17752 - protein, 67 aa, Artificial Sequence; identical to SEQ ID NO: 17748
  Synthetic polypeptide

SEQ ID NO: 17753 - protein, 58 aa, Artificial Sequence
  Synthetic polypeptide
DQEQCKEEEGGEEEEEEEEGDEDGDEDEEAESATGKRAAEDDEDDDVDTKKQKTDEDD

SEQ ID NO: 17754 - protein, 64 aa, Artificial Sequence
  Synthetic polypeptide
KTESFKIRNNAKRKKVGRKRRRKKKVMRMEMKMRKLSQLRASGQLKMMRMTMSIPRSRRPTRMT

SEQ ID NO: 17755 - protein, 101 aa, Artificial Sequence
  Synthetic polypeptide
HPFMFNKKQNTEQNSRRVLPQSDKGHLQKHLTQCERLKALRSGTMQRKKVGRKRRRKKKVMVRKRMEMKMRKLSQLRASGQLKMMRMTMSIPRSRRPTRMT

SEQ ID NO: 17756 - protein, 101 aa, Artificial Sequence; identical to SEQ ID NO: 17755
  Synthetic polypeptide

SEQ ID NO: 17757 - protein, 101 aa, Artificial Sequence; identical to SEQ ID NO: 17755
  Synthetic polypeptide

SEQ ID NO: 17758 - protein, 101 aa, Artificial Sequence; identical to SEQ ID NO: 17755
  Synthetic polypeptide

SEQ ID NO: 17759 - protein, 101 aa, Artificial Sequence; identical to SEQ ID NO: 17755
  Synthetic polypeptide

SEQ ID NO: 17760 - protein, 19 aa, Artificial Sequence
  Synthetic polypeptide
DQEQCKGRRWGGRGGGRRR

SEQ ID NO: 17761 - protein, 19 aa, Artificial Sequence
  Synthetic polypeptide
DQEQCKGRRWGGRGGGRRR

SEQ ID NO: 17762 - protein, 19 aa, Artificial Sequence
  Synthetic polypeptide
DQEQCKGRRWGGRGGGRRR

SEQ ID NO: 17763 - protein, 19 aa, Artificial Sequence
  Synthetic polypeptide
DQEQCKGRRWGGRGGGRRR

SEQ ID NO: 17764 - protein, 19 aa, Artificial Sequence
  Synthetic polypeptide
DQEQCKGRRWGGRGGGRRR

SEQ ID NO: 17765 - protein, 19 aa, Artificial Sequence
  Synthetic polypeptide
DQEQCKGRRWGGRGGGRRR

SEQ ID NO: 17766 - protein, 66 aa, Artificial Sequence
  Synthetic polypeptide
KTESFKIRNNAKEEGGEEEEEEEEGDGEEEDGDEDEEAESATGKRAAEDDEDDDVDTKKQKTDEDD

SEQ ID NO: 17767 - protein, 66 aa, Artificial Sequence; identical to SEQ ID NO: 17766
  Synthetic polypeptide

SEQ ID NO: 17768 - protein, 66 aa, Artificial Sequence; identical to SEQ ID NO: 17766
  Synthetic polypeptide

SEQ ID NO: 17769 - protein, 66 aa, Artificial Sequence; identical to SEQ ID NO: 17766
  Synthetic polypeptide

SEQ ID NO: 17770 - protein, 66 aa, Artificial Sequence; identical to SEQ ID NO: 17766
  Synthetic polypeptide

SEQ ID NO: 17771 - protein, 98 aa, Artificial Sequence
  Synthetic polypeptide
HPFMFNKKQNTEQNSRRVLPQSDKGHLQKHLTQCERLKALRSGTMQRKKVGRKRRRKKKVMRMEMKMRKLSQLRASGQLKMMRMTMSIPRSRRPTRMT

SEQ ID NO: 17772 - protein, 63 aa, Artificial Sequence
  Synthetic polypeptide
KTESFKIRNNAKEEGGEEEEEEEEGDEDGDEDEEAESATGKRAAEDDEDDDVDTKKQKTDEDD

SEQ ID NO: 17773 - protein, 57 aa, Artificial Sequence
  Synthetic polypeptide
HPFMFNKKQNTEQNSRRVLPQSDKGHLQKHLTQCERLKALRSGTMQRWGGRGGGRRR

SEQ ID NO: 17774 - protein, 57 aa, Artificial Sequence; identical to SEQ ID NO: 17773
  Synthetic polypeptide

SEQ ID NO: 17775 - protein, 57 aa, Artificial Sequence; identical to SEQ ID NO: 17773
  Synthetic polypeptide

SEQ ID NO: 17776 - protein, 57 aa, Artificial Sequence; identical to SEQ ID NO: 17773
  Synthetic polypeptide

SEQ ID NO: 17777 - protein, 57 aa, Artificial Sequence; identical to SEQ ID NO: 17773
  Synthetic polypeptide

SEQ ID NO: 17778 - protein, 57 aa, Artificial Sequence; identical to SEQ ID NO: 17773
  Synthetic polypeptide

SEQ ID NO: 17779 - protein, 58 aa, Artificial Sequence
  Synthetic polypeptide
DQEQCKGGEEEEEEEEGDGEEEDGDEDEEAESATGKRAAEDDEDDDVDTKKQKTDEDD

SEQ ID NO: 17780 - protein, 58 aa, Artificial Sequence; identical to SEQ ID NO: 17779
  Synthetic polypeptide

SEQ ID NO: 17781 - protein, 58 aa, Artificial Sequence; identical to SEQ ID NO: 17779
  Synthetic polypeptide

SEQ ID NO: 17782 - protein, 58 aa, Artificial Sequence; identical to SEQ ID NO: 17779
  Synthetic polypeptide

SEQ ID NO: 17783 - protein, 58 aa, Artificial Sequence; identical to SEQ ID NO: 17779
  Synthetic polypeptide

SEQ ID NO: 17784 - protein, 64 aa, Artificial Sequence
  Synthetic polypeptide
KTESFKIRNNAKVGRKRRRKKKVMVRKRMEMKMRKLSQLRASGQLKMMRMTMSIPRSRRPTRMT

SEQ ID NO: 17785 - protein, 64 aa, Artificial Sequence; identical to SEQ ID NO: 17784
  Synthetic polypeptide

SEQ ID NO: 17786 - protein, 64 aa, Artificial Sequence; identical to SEQ ID NO: 17784
  Synthetic polypeptide

SEQ ID NO: 17787 - protein, 64 aa, Artificial Sequence; identical to SEQ ID NO: 17784
  Synthetic polypeptide

SEQ ID NO: 17788 - protein, 64 aa, Artificial Sequence; identical to SEQ ID NO: 17784
  Synthetic polypeptide

SEQ ID NO: 17789 - protein, 55 aa, Artificial Sequence
  Synthetic polypeptide
DQEQCKGGEEEEEEEEGDEDGDEDEEAESATGKRAAEDDEDDDVDTKKQKTDEDD

SEQ ID NO: 17790 - protein, 61 aa, Artificial Sequence
  Synthetic polypeptide
KTESFKIRNNAKVGRKRRRKKKVMRMEMKMRKLSQLRASGQLKMMRMTMSIPRSRRPTRMT

SEQ ID NO: 17791 - protein, 47 aa, Artificial Sequence
  Synthetic polypeptide
HPFMFNKKQNTEQNSRRVLPQSDKGHLQKHLTQCERLKALRSGTMQR

SEQ ID NO: 17792 - protein, 47 aa, Artificial Sequence; identical to SEQ ID NO: 17791
  Synthetic polypeptide

SEQ ID NO: 17793 - protein, 47 aa, Artificial Sequence; identical to SEQ ID NO: 17791
  Synthetic polypeptide

SEQ ID NO: 17794 - protein, 47 aa, Artificial Sequence; identical to SEQ ID NO: 17791
  Synthetic polypeptide

SEQ ID NO: 17795 - protein, 47 aa, Artificial Sequence; identical to SEQ ID NO: 17791
  Synthetic polypeptide

SEQ ID NO: 17796 - protein, 47 aa, Artificial Sequence; identical to SEQ ID NO: 17791
  Synthetic polypeptide

SEQ ID NO: 17797 - protein, 38 aa, Artificial Sequence
  Synthetic polypeptide
DQEQCKDEEAESATGKRAAEDDEDDDVDTKKQKTDEDD

SEQ ID NO: 17798 - protein, 38 aa, Artificial Sequence; identical to SEQ ID NO: 17797
  Synthetic polypeptide

SEQ ID NO: 17799 - protein, 38 aa, Artificial Sequence; identical to SEQ ID NO: 17797
  Synthetic polypeptide

SEQ ID NO: 17800 - protein, 38 aa, Artificial Sequence; identical to SEQ ID NO: 17797
  Synthetic polypeptide

SEQ ID NO: 17801 - protein, 38 aa, Artificial Sequence; identical to SEQ ID NO: 17797
  Synthetic polypeptide

SEQ ID NO: 17802 - protein, 38 aa, Artificial Sequence; identical to SEQ ID NO: 17797
  Synthetic polypeptide

SEQ ID NO: 17803 - protein, 44 aa, Artificial Sequence
  Synthetic polypeptide
KTESFKIRNNAKMRKLSQLRASGQLKMMRMTMSIPRSRRPTRMT

SEQ ID NO: 17804 - protein, 44 aa, Artificial Sequence; identical to SEQ ID NO: 17803
  Synthetic polypeptide

SEQ ID NO: 17805 - protein, 44 aa, Artificial Sequence; identical to SEQ ID NO: 17803
  Synthetic polypeptide

SEQ ID NO: 17806 - protein, 44 aa, Artificial Sequence; identical to SEQ ID NO: 17803
  Synthetic polypeptide

SEQ ID NO: 17807 - protein, 44 aa, Artificial Sequence; identical to SEQ ID NO: 17803
  Synthetic polypeptide

SEQ ID NO: 17808 - protein, 44 aa, Artificial Sequence; identical to SEQ ID NO: 17803
  Synthetic polypeptide

SEQ ID NO: 17809 - protein, 84 aa, Artificial Sequence
  Synthetic polypeptide
WYMPVVPASQEADNEENGEQEADNEVDEEEEEGGEEEEEEEEGDGEEEDGDEDEEAESATGKRAAEDDEDDDVDTKKQKTDEDD

SEQ ID NO: 17810 - protein, 84 aa, Artificial Sequence; identical to SEQ ID NO: 17809
  Synthetic polypeptide

SEQ ID NO: 17811 - protein, 84 aa, Artificial Sequence; identical to SEQ ID NO: 17809
  Synthetic polypeptide

SEQ ID NO: 17812 - protein, 84 aa, Artificial Sequence; identical to SEQ ID NO: 17809
  Synthetic polypeptide

SEQ ID NO: 17813 - protein, 84 aa, Artificial Sequence; identical to SEQ ID NO: 17809
  Synthetic polypeptide

SEQ ID NO: 17814 - protein, 49 aa, Artificial Sequence
  Synthetic polypeptide
DQPGQHVFPVSTENTHTQKLARHSGTCLWSQLVRRLTMRKMGSRRLTMR

SEQ ID NO: 17815 - protein, 49 aa, Artificial Sequence; identical to SEQ ID NO: 17814
  Synthetic polypeptide

SEQ ID NO: 17816 - protein, 49 aa, Artificial Sequence; identical to SEQ ID NO: 17814
  Synthetic polypeptide

SEQ ID NO: 17817 - protein, 49 aa, Artificial Sequence; identical to SEQ ID NO: 17814
  Synthetic polypeptide

SEQ ID NO: 17818 - protein, 49 aa, Artificial Sequence; identical to SEQ ID NO: 17814
  Synthetic polypeptide

SEQ ID NO: 17819 - protein, 49 aa, Artificial Sequence; identical to SEQ ID NO: 17814
  Synthetic polypeptide

SEQ ID NO: 17820 - protein, 81 aa, Artificial Sequence
  Synthetic polypeptide
WYMPVVPASQEADNEENGEQEADNEVDEEEEEGGEEEEEEEEGDEDGDEDEEAESATGKRAAEDDEDDDVDTKKQKTDEDD

SEQ ID NO: 17821 - protein, 376 aa, Artificial Sequence
  Synthetic polypeptide
ARRRQARLQKELAEAAKEPLPVEQDDDIEVIVDETSDHTEETSPVRAISRAATRRSVSSFPVPQDNVDTHPGSGKEVRVPATALCVFDAHDGEVNAVQFSPGSRLLATGGMDRRVKLWEVFGEKCEFKGSLSGSNAGITSIEFDSAGSYLLAASNDFASRIWTVDDYRLRHTLTGHSGKVLSAKFLLDNARIVSGSHDRTLKLWDLRSKVCIKTVFAGSSCNDIVCTEQCVMSGHFDKKIRFWDIRSESIVREMELLGKITALDLNPERTELLSCSRDDLLKVIDLRTNAIKQTFSAPGFKCGSDWTRVVFSPDGSYVAAGSAEGSLYIWSVLTGKVEKVLSKQHSSSINAVAWSPSGSHVVSVDKGCKAVLWAQY

SEQ ID NO: 17822 - protein, 376 aa, Artificial Sequence; identical to SEQ ID NO: 17821
  Synthetic polypeptide

SEQ ID NO: 17823 - protein, 76 aa, Artificial Sequence
  Synthetic polypeptide
PGGGKPGCRKSLQKQQRNLYQSNRMMTLRSLWMKLLITQKRPLLCEPSAEQPRDALSLPSQSPRTMWILILVLVKK

SEQ ID NO: 17824 - protein, 76 aa, Artificial Sequence; identical to SEQ ID NO: 17823
  Synthetic polypeptide

SEQ ID NO: 17825 - protein, 76 aa, Artificial Sequence; identical to SEQ ID NO: 17823
  Synthetic polypeptide

SEQ ID NO: 17826 - protein, 24 aa, Artificial Sequence
  Synthetic polypeptide
QEAASPAAERACRSSKGTSTSRTG

SEQ ID NO: 17827 - protein, 24 aa, Artificial Sequence
  Synthetic polypeptide
QEAASPAAERACRSSKGTSTSRTG

SEQ ID NO: 17828 - protein, 24 aa, Artificial Sequence
  Synthetic polypeptide
QEAASPAAERACRSSKGTSTSRTG

SEQ ID NO: 17829 - protein, 24 aa, Artificial Sequence
  Synthetic polypeptide
QEAASPAAERACRSSKGTSTSRTG

SEQ ID NO: 17830 - protein, 24 aa, Artificial Sequence
  Synthetic polypeptide
QEAASPAAERACRSSKGTSTSRTG

SEQ ID NO: 17831 - protein, 24 aa, Artificial Sequence
  Synthetic polypeptide
QEAASPAAERACRSSKGTSTSRTG

SEQ ID NO: 17832 - protein, 24 aa, Artificial Sequence
  Synthetic polypeptide
QEAASPAAERACRSSKGTSTSRTG

SEQ ID NO: 17833 - protein, 24 aa, Artificial Sequence
  Synthetic polypeptide
QEAASPAAERACRSSKGTSTSRTG

SEQ ID NO: 17834 - protein, 395 aa, Artificial Sequence
  Synthetic polypeptide
ARRRQARLQKELAEAAKEPLPVEQDDDIEVIVDETSDHTEETSPVRAISRAATKRLSQPAGGLLDSITNIFGRRSVSSFPVPQDNVDTHPGSGKEVRVPATALCVFDAHDGEVNAVQFSPGSRLLATGGMDRRVKLWEVFGEKCEFKGSLSGSNAGITSIEFDSAGSYLLAASNDFASRIWTVDDYRLRHTLTGHSGKVLSAKFLLDNARIVSGSHDRTLKLWDLRSKVCIKTVFAGSSCNDIVCTEQCVMSGHFDKKIRFWDIRSESIVREMELLGKITALDLNPERTELLSCSRDDLLKVIDLRTNAIKQTFSAPGFKCGSDWTRVVFSPDGSYVAAGSAEGSLYIWSVLTGKVEKVLSKQHSSSINAVAWSPSGSHVVSVDKGCKAVLWAQY

SEQ ID NO: 17835 - protein, 95 aa, Artificial Sequence
  Synthetic polypeptide
PGGGKPGCRKSLQKQQRNLYQSNRMMTLRSLWMKLLITQKRPLLCEPSAEQPLSDSRSLLEAFWILSLISLGDALSLPSQSPRTMWILILVLVKK

SEQ ID NO: 17836 - protein, 95 aa, Artificial Sequence; identical to SEQ ID NO: 17835
  Synthetic polypeptide

SEQ ID NO: 17837 - protein, 109 aa, Artificial Sequence
  Synthetic polypeptide
ARRRQARLQKELAEAAKEPLPVEQDDDIEVIVDETSDHTEETSPVRAISRAATKRLSQPAGGLLDSITNIFGLSESPLLGHHSSSDAARRRSVSSFPVPQDNVDTHPGS

SEQ ID NO: 17838 - protein, 109 aa, Artificial Sequence
  Synthetic polypeptide
PGGGKPGCRKSLQKQQRNLYQSNRMMTLRSLWMKLLITQKRPLLCEPSAEQPLSDSRSLLEAFWILSLISLVCPSLPFWDIILLLMLPGDALSLPSQSPRTMWILILVL

SEQ ID NO: 17839 - protein, 360 aa, Artificial Sequence
  Synthetic polypeptide
ARRRQARLQKELAEAAKEPLPVEQDDDIEVIVDETSDHTEETSPVRAISRAATKRLSQPAGGLLDSITNIFGRRSVSSFPVPQDNVDTHPGSGKEVRVPATALCVFDAHDGEVNAVQFSPGITSIEFDSAGSYLLAASNDFASRIWTVDDYRLRHTLTGHSGKVLSAKFLLDNARIVSGSHDRTLKLWDLRSKVCIKTVFAGSSCNDIVCTEQCVMSGHFDKKIRFWDIRSESIVREMELLGKITALDLNPERTELLSCSRDDLLKVIDLRTNAIKQTFSAPGFKCGSDWTRVVFSPDGSYVAAGSAEGSLYIWSVLTGKVEKVLSKQHSSSINAVAWSPSGSHVVSVDKGCKAVLWAQY

SEQ ID NO: 17840 - protein, 96 aa, Artificial Sequence
  Synthetic polypeptide
ARRRQARLQKELAEAAKEPLPVEQDDDIEVIVDETSDHTEETSPVRAISRAATRRSVSSFPVPQDNVDTHPGSGKEVRVPATALCVFDAHDGEVNA

SEQ ID NO: 17841 - protein, 59 aa, Artificial Sequence
  Synthetic polypeptide
ARRRQARLQKELAEAAKEPLPVEQDDDIEVIVDETSDHTEETSPVRAISRAATKRLSQP

SEQ ID NO: 17842 - protein, 58 aa, Artificial Sequence
  Synthetic polypeptide
PGGGKPGCRKSLQKQQRNLYQSNRMMTLRSLWMKLLITQKRPLLCEPSAEQPLSDSRS

SEQ ID NO: 17843 - protein, 412 aa, Artificial Sequence
  Synthetic polypeptide
ARRRQARLQKELAEAAKEPLPVEQDDDIEVIVDETSDHTEETSPVRAISRAATKRLSQPAGGLLDSITNIFGLSESPLLGHHSSSDAARRRSVSSFPVPQDNVDTHPGSGKEVRVPATALCVFDAHDGEVNAVQFSPGSRLLATGGMDRRVKLWEVFGEKCEFKGSLSGSNAGITSIEFDSAGSYLLAASNDFASRIWTVDDYRLRHTLTGHSGKVLSAKFLLDNARIVSGSHDRTLKLWDLRSKVCIKTVFAGSSCNDIVCTEQCVMSGHFDKKIRFWDIRSESIVREMELLGKITALDLNPERTELLSCSRDDLLKVIDLRTNAIKQTFSAPGFKCGSDWTRVVFSPDGSYVAAGSAEGSLYIWSVLTGKVEKVLSKQHSSSINAVAWSPSGSHVVSVDKGCKAVLWAQY

SEQ ID NO: 17844 - protein, 112 aa, Artificial Sequence
  Synthetic polypeptide
PGGGKPGCRKSLQKQQRNLYQSNRMMTLRSLWMKLLITQKRPLLCEPSAEQPLSDSRSLLEAFWILSLISLVCPSLPFWDIILLLMLPGDALSLPSQSPRTMWILILVLVKK

SEQ ID NO: 17845 - protein, 12 aa, Artificial Sequence
  Synthetic polypeptide
DRPCMHCLLGSS

SEQ ID NO: 17846 - protein, 101 aa, Artificial Sequence
  Synthetic polypeptide
ELNEIDRVCIACLGVHERPSSVPGEAAEAGSFAAGEGCRPGGRRGPAGAVPARPRQHGPGRPQEGEAVPEGLAGEVPGPPEGAREQQRDCRGHGGPDQDPG

SEQ ID NO: 17847 - protein, 312 aa, Artificial Sequence
  Synthetic polypeptide
TVYALLAWEFMSGPVLYQEKLLKPAALLLEKGADQEEDEALRVLSLRALGNMALGAPKKVKQYRKVLLEKCLGPLREPVSNSVTAEGMEALTKILAELREGDVGSSFDAMSEQCRIFFDNESELLRLKAFILFGKLARVVGMSKKHFFKGEVKKAWIPLMLHSQDPCSNAAQACMATMFQCVHFWGWKSLEHPSGPSDTATDDKMTVFQTTMCSILTRKKPAVLYRFLLETMAYVKNNLSRIRIAACNLAGIIMKQMSTHYLKKLDFPALRNSLQELQLDPDPGVRRAALETLTVLDSCSQHGFLASPQGMS

SEQ ID NO: 17848 - protein, 47 aa, Artificial Sequence
  Synthetic polypeptide
HCKVLEAILALELEHLHSGSIFVTKLLYDFVKSLFLSGLQKKGTELG

SEQ ID NO: 17849 - protein, 47 aa, Artificial Sequence; identical to SEQ ID NO: 17848
  Synthetic polypeptide

SEQ ID NO: 17850 - protein, 18 aa, Artificial Sequence
  Synthetic polypeptide
VTFPLWSAEERHGTRLRS

SEQ ID NO: 17851 - protein, 18 aa, Artificial Sequence
  Synthetic polypeptide
VTFPLWSAEERHGTRLRS

SEQ ID NO: 17852 - protein, 25 aa, Artificial Sequence
  Synthetic polypeptide
GSDISPSSGWETWQETRGPKCRPFK

SEQ ID NO: 17853 - protein, 25 aa, Artificial Sequence
  Synthetic polypeptide
GSDISPSSGWETWQETRGPKCRPFK

SEQ ID NO: 17854 - protein, 25 aa, Artificial Sequence
  Synthetic polypeptide
GSDISPSSGWETWQETRGPKCRPFK

SEQ ID NO: 17855 - protein, 25 aa, Artificial Sequence
  Synthetic polypeptide
GSDISPSSGWETWQETRGPKCRPFK

SEQ ID NO: 17856 - protein, 25 aa, Artificial Sequence
  Synthetic polypeptide
GSDISPSSGWETWQETRGPKCRPFK

SEQ ID NO: 17857 - protein, 25 aa, Artificial Sequence
  Synthetic polypeptide
GSDISPSSGWETWQETRGPKCRPFK

SEQ ID NO: 17858 - protein, 25 aa, Artificial Sequence
  Synthetic polypeptide
GSDISPSSGWETWQETRGPKCRPFK

SEQ ID NO: 17859 - protein, 25 aa, Artificial Sequence
  Synthetic polypeptide
GSDISPSSGWETWQETRGPKCRPFK

SEQ ID NO: 17860 - protein, 89 aa, Artificial Sequence
  Synthetic polypeptide
AVIFLPRVAGKLGKRPEDPNADPSSEAKAMAVPYLLRRKFSNSLKSQGKDDDSFDRKSVYRGSLTQRNPNARKGMASHTFAKPVVAHQS

SEQ ID NO: 17861 - protein, 89 aa, Artificial Sequence; identical to SEQ ID NO: 17860
  Synthetic polypeptide

SEQ ID NO: 17862 - protein, 89 aa, Artificial Sequence; identical to SEQ ID NO: 17860
  Synthetic polypeptide

SEQ ID NO: 17863 - protein, 89 aa, Artificial Sequence; identical to SEQ ID NO: 17860
  Synthetic polypeptide

SEQ ID NO: 17864 - protein, 89 aa, Artificial Sequence; identical to SEQ ID NO: 17860
  Synthetic polypeptide

SEQ ID NO: 17865 - protein, 89 aa, Artificial Sequence; identical to SEQ ID NO: 17860
  Synthetic polypeptide

SEQ ID NO: 17866 - protein, 89 aa, Artificial Sequence
  Synthetic polypeptide
AVIFLPRVAGKLGKRPEDPNADPSSEAKAMAVPYLLRRKFSNSLKSQGKDDDSFDRKSVYRGSLTQRNPNARKGMASHTFAMKEWPQPM

SEQ ID NO: 17867 - protein, 85 aa, Artificial Sequence
  Synthetic polypeptide
AVIFLPRVAGKLGKRPEDPNADPSSEAKAMAVPYLLRRKFSNSLKSQGKDDDSFDRKSVYRGSLTQRNPNARKGMASHTFASPSQ

SEQ ID NO: 17868 - protein, 46 aa, Artificial Sequence
  Synthetic polypeptide
SLFILSAVPAETTGLWKTVSATLVDPEETHRLLMKTSACQWVVVEA

SEQ ID NO: 17869 - protein, 46 aa, Artificial Sequence; identical to SEQ ID NO: 17868
  Synthetic polypeptide

SEQ ID NO: 17870 - protein, 46 aa, Artificial Sequence; identical to SEQ ID NO: 17868
  Synthetic polypeptide

SEQ ID NO: 17871 - protein, 46 aa, Artificial Sequence; identical to SEQ ID NO: 17868
  Synthetic polypeptide

SEQ ID NO: 17872 - protein, 18 aa, Artificial Sequence
  Synthetic polypeptide
LSSSCPLCLPKPLVFGRQ

SEQ ID NO: 17873 - protein, 18 aa, Artificial Sequence
  Synthetic polypeptide
LSSSCPLCLPKPLVFGRQ

SEQ ID NO: 17874 - protein, 18 aa, Artificial Sequence
  Synthetic polypeptide
LSSSCPLCLPKPLVFGRQ

SEQ ID NO: 17875 - protein, 18 aa, Artificial Sequence
  Synthetic polypeptide
LSSSCPLCLPKPLVFGRQ

SEQ ID NO: 17876 - protein, 572 aa, Artificial Sequence
  Synthetic polypeptide
SLHLVRCACRNHWSLEDSERYSRRSRRNTSASDEDERMSVGSRGSLRSQPDLEYGGPYAWTNGYDGELYGSQSLNRRSGRPSCLYSAARPSGSYRASVLDEGSFGGTRRGSTSGSRAPSEYSGHLNSSSRASSRASSARASPVVEERPEKDFTEKGSRNMPGLSAATLASLGGTSSRRGSGDTSISIDTEASIREIKELNELKDQIQDVEGKYMQGLKEMKDSLAEVEEKYKKAMVSNAQLDNEKTNFMYQVDTLKDMLLELEEQLAESRRQYEEKNKEFEREKHAHSILQFQFAEVKEALKQREEMLEEIRQLQQKQASSIREISDLQETIEWKDKKIGALERQKEFFDSVRSERDDLREEVVMLKEELKKHGIILNSEIATNGETSDTLNNVGYQGPTKMTKEELNALKSTGDGTLDIRLKKLVDERECLLEQIKKLKGQLEERQKIGKLDNLRSEDDVLENGTDMHVMDLQRDANRQISDLKFKLAKSEQEITALEQNVIRLESQVSRYKSAAENAEKIEDELKAEKRKLQRELRSALDKTEELEVSNGHLVKRLEKMKANRSALLSQQ

SEQ ID NO: 17877 - protein, 748 aa, Artificial Sequence
  Synthetic polypeptide
SLHLVRCACRNHWSLEDSERYSRRSRRNTSASDEDERMSVGSRGSLRVEERPEKDFTEKGSRNMPGLSAATLASLGGTSSRRGSGDTSISIDTEASIREIKDSLAEVEEKYKKAMVSNAQLDNEKTNFMYQVDTLKDMLLELEEQLAESRRQYEEKNKEFEREKHAHSILQFQFAEVKEALKQREEMLEKHGIILNSEIATNGETSDTLNNVGYQGPTKMTKEELNALKSTGDGTLGRASEVEVKNEIVANVGKREILHNTEKEQHTEDTVKDCVDIEVFPAGENTEDQKSSEDTAPFLGTLAGATYEEQVQSQILESSSLPENTVQVESNEVMGAPDDRTRTPLEPSNCWSDLDGGNHTENVGEAAVTQVEEQAGTVASCPLGHSDDTVYHDDKCMVEVPQELETSTGHSLEKEFTNQEAAEPKEVPAHSTEVGRDHNEEEGEETGLRDEKPIKTEVPGSPAGTEGNCQEATGPSTVDTQNEPLDMKEPDEEKSDQQGEALDSSQKKTKNKKKKNKKKKSPVPVETLKDVKKELTYQNTDLSEIKEEEQVKSTDRKSAVEAQNEVTENPKQKIAAESSENVDCPENPKIKLDGKLDQEGDDVQTAAEEVLADGDTLDFEDDTVQSSGPRAGGEELDEGVAKDNAKIDGATQSSPAEPKSEDADRCTLPEHESPSQDISDACEAESTERCEMSEHPSQTVRKALDSNSLENDDLSAPGREPGHFNPESREDTRGGNEKGKSKEDCTMS

SEQ ID NO: 17878 - protein, 113 aa, Artificial Sequence
  Synthetic polypeptide
SLHLVRCACRNHWSLEDSERYSRRSRRNTSASDEDERMSVGSRGSLRTNGYDGELYGSQSLNRRSGRVEERPEKDFTEKGSRNMPGLSAATLASLGGTSSRRGSGDTSISIDT

SEQ ID NO: 17879 - protein, 772 aa, Artificial Sequence
  Synthetic polypeptide
SLHLVRCACRNHWSLEDSERYSRRSRRNTSASDEDERMSVGSRGSLRVEERPEKDFTEKGSRNMPGLSAATLASLGGTSSRRGSGDTSISIDTEASIREIKELNELKDQIQDVEGKYMQGLKEMKDSLAEVEEKYKKAMVSNAQLDNEKTNFMYQVDTLKDMLLELEEQLAESRRQYEEKNKEFEREKHAHSILQFQFAEVKEALKQREEMLEKHGIILNSEIATNGETSDTLNNVGYQGPTKMTKEELNALKSTGDGTLGRASEVEVKNEIVANVGKREILHNTEKEQHTEDTVKDCVDIEVFPAGENTEDQKSSEDTAPFLGTLAGATYEEQVQSQILESSSLPENTVQVESNEVMGAPDDRTRTPLEPSNCWSDLDGGNHTENVGEAAVTQVEEQAGTVASCPLGHSDDTVYHDDKCMVEVPQELETSTGHSLEKEFTNQEAAEPKEVPAHSTEVGRDHNEEEGEETGLRDEKPIKTEVPGSPAGTEGNCQEATGPSTVDTQNEPLDMKEPDEEKSDQQGEALDSSQKKTKNKKKKNKKKKSPVPVETLKDVKKELTYQNTDLSEIKEEEQVKSTDRKSAVEAQNEVTENPKQKIAAESSENVDCPENPKIKLDGKLDQEGDDVQTAAEEVLADGDTLDFEDDTVQSSGPRAGGEELDEGVAKDNAKIDGATQSSPAEPKSEDADRCTLPEHESPSQDISDACEAESTERCEMSEHPSQTVRKALDSNSLENDDLSAPGREPGHFNPESREDTRGGNEKGKSKEDCTMS

SEQ ID NO: 17880 - protein, 60 aa, Artificial Sequence
  Synthetic polypeptide
GQVWWLMPVIPALWGGQDGQIACGQEFETSVGSMMRVTTRVENFSLKLKFPMRTTWCLPK

SEQ ID NO: 17881 - protein, 60 aa, Artificial Sequence; identical to SEQ ID NO: 17880
  Synthetic polypeptide

SEQ ID NO: 17882 - protein, 60 aa, Artificial Sequence; identical to SEQ ID NO: 17880
  Synthetic polypeptide

SEQ ID NO: 17883 - protein, 60 aa, Artificial Sequence; identical to SEQ ID NO: 17880
  Synthetic polypeptide

SEQ ID NO: 17884 - protein, 60 aa, Artificial Sequence; identical to SEQ ID NO: 17880
  Synthetic polypeptide

SEQ ID NO: 17885 - protein, 60 aa, Artificial Sequence; identical to SEQ ID NO: 17880
  Synthetic polypeptide

SEQ ID NO: 17886 - protein, 60 aa, Artificial Sequence; identical to SEQ ID NO: 17880
  Synthetic polypeptide

SEQ ID NO: 17887 - protein, 60 aa, Artificial Sequence; identical to SEQ ID NO: 17880
  Synthetic polypeptide

SEQ ID NO: 17888 - protein, 60 aa, Artificial Sequence; identical to SEQ ID NO: 17880
  Synthetic polypeptide

SEQ ID NO: 17889 - protein, 60 aa, Artificial Sequence; identical to SEQ ID NO: 17880
  Synthetic polypeptide

SEQ ID NO: 17890 - protein, 60 aa, Artificial Sequence; identical to SEQ ID NO: 17880
  Synthetic polypeptide

SEQ ID NO: 17891 - protein, 120 aa, Artificial Sequence
  Synthetic polypeptide
DQRGQHDEGYYQGGKFQFETEVPDAYNMVPPKVKCLTKIWHPNITETGEICLSLLREHSIDGTGWAPTRTLKDVVWGLNSLFTDLLNFDDPLNIEAAEHHLRDKEDFRNKVDDYIKRYAR

SEQ ID NO: 17892 - protein, 120 aa, Artificial Sequence; identical to SEQ ID NO: 17891
  Synthetic polypeptide

SEQ ID NO: 17893 - protein, 120 aa, Artificial Sequence; identical to SEQ ID NO: 17891
  Synthetic polypeptide

SEQ ID NO: 17894 - protein, 120 aa, Artificial Sequence; identical to SEQ ID NO: 17891
  Synthetic polypeptide

SEQ ID NO: 17895 - protein, 66 aa, Artificial Sequence
  Synthetic polypeptide
DQRGQHDEGYYQGGKFQFETEVPDAYNMVPPKVKCLTKIWHPNITETGEICLSLLREHSIDGTGWA

SEQ ID NO: 17896 - protein, 106 aa, Artificial Sequence
  Synthetic polypeptide
DQRGQHDEGYYQGGKFQFETEVPDAYNMVPPKVKCLTKIWHPNITETGEICLSLLREHSIDGTGWAPTRTLKDVVWGLNSLFTDLLNFDDPLNIEAAEHHLRDKED

SEQ ID NO: 17897 - protein, 106 aa, Artificial Sequence; identical to SEQ ID NO: 17896
  Synthetic polypeptide

SEQ ID NO: 17898 - protein, 99 aa, Artificial Sequence
  Synthetic polypeptide
DQRGQHDEGYYQGGKFQFETEVPDAYNMVPPKVKCLTKIWHPNITETGEICLSLLREHSIDGTGWAPTRTLKDVVWGLNSLFTEDFRNKVDDYIKRYAR

SEQ ID NO: 17899 - protein, 64 aa, Artificial Sequence
  Synthetic polypeptide
GQVWWLMPVIPALWGGQDGQIACGQEFETSVGSMMRVTTRVENFSLKLKFPMRTTWCLLREHSI

SEQ ID NO: 17900 - protein, 36 aa, Artificial Sequence
  Synthetic polypeptide
DQRGQHDEGYYQGGKFQFETEVPDAYNMVFIERTFN

SEQ ID NO: 17901 - protein, 58 aa, Artificial Sequence
  Synthetic polypeptide
DQRGQHDEGYYQGGKFQFETEVPDAYNMVPPKVKCLTKIWHPNITETGEICLRMSFGD

SEQ ID NO: 17902 - protein, 59 aa, Artificial Sequence
  Synthetic polypeptide
GQVWWLMPVIPALWGGQDGQIACGQEFETSVGSMMRVTTRVENFSLKLKFPMRTTWWIF

SEQ ID NO: 17903 - protein, 66 aa, Artificial Sequence
  Synthetic polypeptide
DQRGQHDEGYYQGGKFQFETEVPDAYNMVDLLNFDDPLNIEAAEHHLRDKEDFRNKVDDYIKRYAR

SEQ ID NO: 17904 - protein, 55 aa, Artificial Sequence
  Synthetic polypeptide
DQRGQHDEGYYQGGKFQFETEVPDAYNMVPPKVKCLTKIWHPNITETGEICLRIF

SEQ ID NO: 17905 - protein, 98 aa, Artificial Sequence
  Synthetic polypeptide
DQRGQHDEGYYQGGKFQFETEVPDAYNMVPPKVKCLTKIWHPNITETGEICLSLLREHSIDGTGWAPTRTLKDVVWGLNSLFTDLLNFDDPLNIEAAE

SEQ ID NO: 17906 - protein, 11 aa, Artificial Sequence
  Synthetic polypeptide
LTSLFIERTFN

SEQ ID NO: 17907 - protein, 11 aa, Artificial Sequence
  Synthetic polypeptide
LTSLFIERTFN

SEQ ID NO: 17908 - protein, 11 aa, Artificial Sequence
  Synthetic polypeptide
LTSLFIERTFN

SEQ ID NO: 17909 - protein, 11 aa, Artificial Sequence
  Synthetic polypeptide
LTSLFIERTFN

SEQ ID NO: 17910 - protein, 11 aa, Artificial Sequence
  Synthetic polypeptide
LTSLFIERTFN

SEQ ID NO: 17911 - protein, 11 aa, Artificial Sequence
  Synthetic polypeptide
LTSLFIERTFN

SEQ ID NO: 17912 - protein, 11 aa, Artificial Sequence
  Synthetic polypeptide
LTSLFIERTFN

SEQ ID NO: 17913 - protein, 11 aa, Artificial Sequence
  Synthetic polypeptide
LTSLFIERTFN

SEQ ID NO: 17914 - protein, 11 aa, Artificial Sequence
  Synthetic polypeptide
LTSLFIERTFN

SEQ ID NO: 17915 - protein, 11 aa, Artificial Sequence
  Synthetic polypeptide
LTSLFIERTFN

SEQ ID NO: 17916 - protein, 11 aa, Artificial Sequence
  Synthetic polypeptide
LTSLFIERTFN

SEQ ID NO: 17917 - protein, 11 aa, Artificial Sequence
  Synthetic polypeptide
LTSLFIERTFN

SEQ ID NO: 17918 - protein, 10 aa, Artificial Sequence
  Synthetic polypeptide
HPCLLREHSI

SEQ ID NO: 17919 - protein, 10 aa, Artificial Sequence
  Synthetic polypeptide
HPCLLREHSI

SEQ ID NO: 17920 - protein, 10 aa, Artificial Sequence
  Synthetic polypeptide
HPCLLREHSI

SEQ ID NO: 17921 - protein, 5 aa, Artificial Sequence
  Synthetic polypeptide
NILVY

SEQ ID NO: 17922 - protein, 5 aa, Artificial Sequence
  Synthetic polypeptide
NILVY

SEQ ID NO: 17923 - protein, 5 aa, Artificial Sequence
  Synthetic polypeptide
NILVY

SEQ ID NO: 17924 - protein, 5 aa, Artificial Sequence
  Synthetic polypeptide
NILVY

SEQ ID NO: 17925 - protein, 5 aa, Artificial Sequence
  Synthetic polypeptide
NILVY

SEQ ID NO: 17926 - protein, 5 aa, Artificial Sequence
  Synthetic polypeptide
NILVY

SEQ ID NO: 17927 - protein, 5 aa, Artificial Sequence
  Synthetic polypeptide
NILVY

SEQ ID NO: 17928 - protein, 5 aa, Artificial Sequence
  Synthetic polypeptide
NILVY

SEQ ID NO: 17929 - protein, 5 aa, Artificial Sequence
  Synthetic polypeptide
NILVY

SEQ ID NO: 17930 - protein, 5 aa, Artificial Sequence
  Synthetic polypeptide
NILVY

SEQ ID NO: 17931 - protein, 5 aa, Artificial Sequence
  Synthetic polypeptide
NILVY

SEQ ID NO: 17932 - protein, 5 aa, Artificial Sequence
  Synthetic polypeptide
NILVY

SEQ ID NO: 17933 - protein, 5 aa, Artificial Sequence
  Synthetic polypeptide
NILVY

SEQ ID NO: 17934 - protein, 70 aa, Artificial Sequence
  Synthetic polypeptide
HPCLLREHSIDGTGWAPTRTLKDVVWGLNSLFTDLLNFDDPLNIEAAEHHLRDKEDFRNKVDDYIKRYAR

SEQ ID NO: 17935 - protein, 70 aa, Artificial Sequence; identical to SEQ ID NO: 17934
  Synthetic polypeptide

SEQ ID NO: 17936 - protein, 70 aa, Artificial Sequence; identical to SEQ ID NO: 17934
  Synthetic polypeptide

SEQ ID NO: 17937 - protein, 70 aa, Artificial Sequence; identical to SEQ ID NO: 17934
  Synthetic polypeptide

SEQ ID NO: 17938 - protein, 16 aa, Artificial Sequence
  Synthetic polypeptide
HPCLLREHSIDGTGWA

SEQ ID NO: 17939 - protein, 56 aa, Artificial Sequence
  Synthetic polypeptide
HPCLLREHSIDGTGWAPTRTLKDVVWGLNSLFTDLLNFDDPLNIEAAEHHLRDKED

SEQ ID NO: 17940 - protein, 56 aa, Artificial Sequence; identical to SEQ ID NO: 17939
  Synthetic polypeptide

SEQ ID NO: 17941 - protein, 49 aa, Artificial Sequence
  Synthetic polypeptide
HPCLLREHSIDGTGWAPTRTLKDVVWGLNSLFTEDFRNKVDDYIKRYAR

SEQ ID NO: 17942 - protein, 6 aa, Artificial Sequence
  Synthetic polypeptide
LTSLFI

SEQ ID NO: 17943 - protein, 5 aa, Artificial Sequence
  Synthetic polypeptide
HPCLL

SEQ ID NO: 17944 - protein, 48 aa, Artificial Sequence
  Synthetic polypeptide
HPCLLREHSIDGTGWAPTRTLKDVVWGLNSLFTDLLNFDDPLNIEAAE

SEQ ID NO: 17945 - protein, 31 aa, Artificial Sequence
  Synthetic polypeptide
WCSALGTCQNLGKFFRIPASQRHLAGGFKEF

SEQ ID NO: 17946 - protein, 31 aa, Artificial Sequence; identical to SEQ ID NO: 17945
  Synthetic polypeptide

SEQ ID NO: 17947 - protein, 31 aa, Artificial Sequence; identical to SEQ ID NO: 17945
  Synthetic polypeptide

SEQ ID NO: 17948 - protein, 31 aa, Artificial Sequence; identical to SEQ ID NO: 17945
  Synthetic polypeptide

SEQ ID NO: 17949 - protein, 31 aa, Artificial Sequence; identical to SEQ ID NO: 17945
  Synthetic polypeptide

SEQ ID NO: 17950 - protein, 235 aa, Artificial Sequence
  Synthetic polypeptide
GSSSGSQHPSDIWLEALRSFKLSVTVDPKYHPKIIGRKGAVITQIRLEHDVNIQFPDKDDGNQPQDQITITGYEKNTEAARDAILRIVGELEQMVSEDVPLDHRVHARIIGARGKAIRKIMDEFKVDIRFPQSGAPDPNCVTVTGLPENVEEAIDHILNLEEEYLADVVDSEALQVYMKPPAHEEAKAPSRGFVVRDAPWTASSSEKAPDMSSSEEFPSFGAQVAPKTLPWGPKR

SEQ ID NO: 17951 - protein, 235 aa, Artificial Sequence; identical to SEQ ID NO: 17950
  Synthetic polypeptide

SEQ ID NO: 17952 - protein, 235 aa, Artificial Sequence; identical to SEQ ID NO: 17950
  Synthetic polypeptide

SEQ ID NO: 17953 - protein, 235 aa, Artificial Sequence; identical to SEQ ID NO: 17950
  Synthetic polypeptide

SEQ ID NO: 17954 - protein, 27 aa, Artificial Sequence
  Synthetic polypeptide
VLSFGHMSESREVLQDPSIPATSGWRL

SEQ ID NO: 17955 - protein, 27 aa, Artificial Sequence
  Synthetic polypeptide
VLSFGHMSESREVLQDPSIPATSGWRL

SEQ ID NO: 17956 - protein, 27 aa, Artificial Sequence
  Synthetic polypeptide
VLSFGHMSESREVLQDPSIPATSGWRL

SEQ ID NO: 17957 - protein, 27 aa, Artificial Sequence
  Synthetic polypeptide
VLSFGHMSESREVLQDPSIPATSGWRL

SEQ ID NO: 17958 - protein, 27 aa, Artificial Sequence
  Synthetic polypeptide
VLSFGHMSESREVLQDPSIPATSGWRL

SEQ ID NO: 17959 - protein, 131 aa, Artificial Sequence
  Synthetic polypeptide
GSSSGSQHPSDIWLEALRSFKLSVTVDPKYHPKIIGRKGAVITQIRLEHDVNILNLEEEYLADVVDSEALQVYMKPPAHEEAKAPSRGFVVRDAPWTASSSEKAPDMSSSEEFPSFGAQVAPKTLPWGPKR

SEQ ID NO: 17960 - protein, 3 aa, Artificial Sequence
  Synthetic polypeptide
GWF

SEQ ID NO: 17961 - protein, 3 aa, Artificial Sequence
  Synthetic polypeptide
GWF

SEQ ID NO: 17962 - protein, 3 aa, Artificial Sequence
  Synthetic polypeptide
GWF

SEQ ID NO: 17963 - protein, 3 aa, Artificial Sequence
  Synthetic polypeptide
GWF

SEQ ID NO: 17964 - protein, 3 aa, Artificial Sequence
  Synthetic polypeptide
GWF

SEQ ID NO: 17965 - protein, 3 aa, Artificial Sequence
  Synthetic polypeptide
GWF

SEQ ID NO: 17966 - protein, 3 aa, Artificial Sequence
  Synthetic polypeptide
GWF

SEQ ID NO: 17967 - protein, 3 aa, Artificial Sequence
  Synthetic polypeptide
GWF

SEQ ID NO: 17968 - protein, 3 aa, Artificial Sequence
  Synthetic polypeptide
GWF

SEQ ID NO: 17969 - protein, 3 aa, Artificial Sequence
  Synthetic polypeptide
GWF

SEQ ID NO: 17970 - protein, 3 aa, Artificial Sequence
  Synthetic polypeptide
GWF

SEQ ID NO: 17971 - protein, 3 aa, Artificial Sequence
  Synthetic polypeptide
GWF

SEQ ID NO: 17972 - protein, 3 aa, Artificial Sequence
  Synthetic polypeptide
GWF

SEQ ID NO: 17973 - protein, 249 aa, Artificial Sequence
  Synthetic polypeptide
AGFKTIISYIDEQFERYLHDESGLNRRHIIDNRVHCCFYFISPFGHGLKPLDVAFMKAIHNKVNIVPVIAKADTLTLKERERLKKRILDEIEEHNIKIYHLPDAESDEDEDFKEQTRLLKASIPFSVVGSNQLIEAKGKKVRGRLYPWGVVEVENPEHNDFLKLRTMLITHMQDLQEVTQDLHYENFRSERLKRGGRKVENEDMNKDQILLEKEAELRRMQEMIARMQAQMQMQMQGGDGDGGALGHHV

SEQ ID NO: 17974 - protein, 249 aa, Artificial Sequence; identical to SEQ ID NO: 17973
  Synthetic polypeptide

SEQ ID NO: 17975 - protein, 249 aa, Artificial Sequence; identical to SEQ ID NO: 17973
  Synthetic polypeptide

SEQ ID NO: 17976 - protein, 249 aa, Artificial Sequence; identical to SEQ ID NO: 17973
  Synthetic polypeptide

SEQ ID NO: 17977 - protein, 249 aa, Artificial Sequence; identical to SEQ ID NO: 17973
  Synthetic polypeptide

SEQ ID NO: 17978 - protein, 249 aa, Artificial Sequence; identical to SEQ ID NO: 17973
  Synthetic polypeptide

SEQ ID NO: 17979 - protein, 23 aa, Artificial Sequence
  Synthetic polypeptide
MVLRQLSPILMSNLRGTCMTRAA

SEQ ID NO: 17980 - protein, 23 aa, Artificial Sequence
  Synthetic polypeptide
MVLRQLSPILMSNLRGTCMTRAA

SEQ ID NO: 17981 - protein, 23 aa, Artificial Sequence
  Synthetic polypeptide
MVLRQLSPILMSNLRGTCMTRAA

SEQ ID NO: 17982 - protein, 23 aa, Artificial Sequence
  Synthetic polypeptide
MVLRQLSPILMSNLRGTCMTRAA

SEQ ID NO: 17983 - protein, 23 aa, Artificial Sequence
  Synthetic polypeptide
MVLRQLSPILMSNLRGTCMTRAA

SEQ ID NO: 17984 - protein, 23 aa, Artificial Sequence
  Synthetic polypeptide
MVLRQLSPILMSNLRGTCMTRAA

SEQ ID NO: 17985 - protein, 23 aa, Artificial Sequence
  Synthetic polypeptide
MVLRQLSPILMSNLRGTCMTRAA

SEQ ID NO: 17986 - protein, 23 aa, Artificial Sequence
  Synthetic polypeptide
MVLRQLSPILMSNLRGTCMTRAA

SEQ ID NO: 17987 - protein, 23 aa, Artificial Sequence
  Synthetic polypeptide
MVLRQLSPILMSNLRGTCMTRAA

SEQ ID NO: 17988 - protein, 23 aa, Artificial Sequence
  Synthetic polypeptide
MVLRQLSPILMSNLRGTCMTRAA

SEQ ID NO: 17989 - protein, 23 aa, Artificial Sequence
  Synthetic polypeptide
MVLRQLSPILMSNLRGTCMTRAA

SEQ ID NO: 17990 - protein, 23 aa, Artificial Sequence
  Synthetic polypeptide
MVLRQLSPILMSNLRGTCMTRAA

SEQ ID NO: 17991 - protein, 112 aa, Artificial Sequence
  Synthetic polypeptide
AGFKTIISYIDEQFERYLHDESGLNRRHIIDNRVHCCFYFISPFGHGLKPLDVAFMKAIHNKVNIVPVIAKADTLTLKERERLKKRILDEIEEHNIKIYHLPDAESDEDEDF

SEQ ID NO: 17992 - protein, 36 aa, Artificial Sequence
  Synthetic polypeptide
AGFKTIISYIDEQFERYLHDESGLNRRHIIDNRVHC

SEQ ID NO: 17993 - protein, 24 aa, Artificial Sequence
  Synthetic polypeptide
AGFKTIISYIDEQFERYLHDESGL

SEQ ID NO: 17994 - protein, 49 aa, Artificial Sequence
  Synthetic polypeptide
AGFKTIISYIDEQFERYLHDESGLNRRHIIDNRVHCCFYFISPFGHGLK

SEQ ID NO: 17995 - protein, 19 aa, Artificial Sequence
  Synthetic polypeptide
AGFKTIISYIDEQFERYLH

SEQ ID NO: 17996 - protein, 18 aa, Artificial Sequence
  Synthetic polypeptide
MVLRQLSPILMSNLRGTC

SEQ ID NO: 17997 - protein, 61 aa, Artificial Sequence
  Synthetic polypeptide
AGFKTIISYIDEQFERYLHDESGLNRRHIIDNRVHCCFYFISPFGHGLKPLDVAFMKAIHN

SEQ ID NO: 17998 - protein, 77 aa, Artificial Sequence
  Synthetic polypeptide
AGFKTIISYIDEQFERYLHDESGLNRRHIIDNRVHCCFYFISPFGHGLKPLDVAFMKAIHNKVNIVPVIAKADTLTL

SEQ ID NO: 17999 - protein, 18 aa, Artificial Sequence
  Synthetic polypeptide
GWVRWLMPVIPALWEAEF

SEQ ID NO: 18000 - protein, 18 aa, Artificial Sequence
  Synthetic polypeptide
GWVRWLMPVIPALWEAEF

SEQ ID NO: 18001 - protein, 18 aa, Artificial Sequence
  Synthetic polypeptide
GWVRWLMPVIPALWEAEF

SEQ ID NO: 18002 - protein, 18 aa, Artificial Sequence
  Synthetic polypeptide
GWVRWLMPVIPALWEAEF

SEQ ID NO: 18003 - protein, 18 aa, Artificial Sequence
  Synthetic polypeptide
GWVRWLMPVIPALWEAEF

SEQ ID NO: 18004 - protein, 18 aa, Artificial Sequence
  Synthetic polypeptide
GWVRWLMPVIPALWEAEF

SEQ ID NO: 18005 - protein, 18 aa, Artificial Sequence
  Synthetic polypeptide
GWVRWLMPVIPALWEAEF

SEQ ID NO: 18006 - protein, 18 aa, Artificial Sequence
  Synthetic polypeptide
GWVRWLMPVIPALWEAEF

SEQ ID NO: 18007 - protein, 18 aa, Artificial Sequence
  Synthetic polypeptide
GWVRWLMPVIPALWEAEF

SEQ ID NO: 18008 - protein, 18 aa, Artificial Sequence
  Synthetic polypeptide
GWVRWLMPVIPALWEAEF

SEQ ID NO: 18009 - protein, 18 aa, Artificial Sequence
  Synthetic polypeptide
GWVRWLMPVIPALWEAEF

SEQ ID NO: 18010 - protein, 18 aa, Artificial Sequence
  Synthetic polypeptide
GWVRWLMPVIPALWEAEF

SEQ ID NO: 18011 - protein, 18 aa, Artificial Sequence
  Synthetic polypeptide
GWVRWLMPVIPALWEAEF

SEQ ID NO: 18012 - protein, 255 aa, Artificial Sequence
  Synthetic polypeptide
SQHFGRLSFKTIISYIDEQFERYLHDESGLNRRHIIDNRVHCCFYFISPFGHGLKPLDVAFMKAIHNKVNIVPVIAKADTLTLKERERLKKRILDEIEEHNIKIYHLPDAESDEDEDFKEQTRLLKASIPFSVVGSNQLIEAKGKKVRGRLYPWGVVEVENPEHNDFLKLRTMLITHMQDLQEVTQDLHYENFRSERLKRGGRKVENEDMNKDQILLEKEAELRRMQEMIARMQAQMQMQMQGGDGDGGALGHHV

SEQ ID NO: 18013 - protein, 255 aa, Artificial Sequence; identical to SEQ ID NO: 18012
  Synthetic polypeptide

SEQ ID NO: 18014 - protein, 255 aa, Artificial Sequence; identical to SEQ ID NO: 18012
  Synthetic polypeptide

SEQ ID NO: 18015 - protein, 255 aa, Artificial Sequence; identical to SEQ ID NO: 18012
  Synthetic polypeptide

SEQ ID NO: 18016 - protein, 255 aa, Artificial Sequence; identical to SEQ ID NO: 18012
  Synthetic polypeptide

SEQ ID NO: 18017 - protein, 255 aa, Artificial Sequence; identical to SEQ ID NO: 18012
  Synthetic polypeptide

SEQ ID NO: 18018 - protein, 118 aa, Artificial Sequence
  Synthetic polypeptide
SQHFGRLSFKTIISYIDEQFERYLHDESGLNRRHIIDNRVHCCFYFISPFGHGLKPLDVAFMKAIHNKVNIVPVIAKADTLTLKERERLKKRILDEIEEHNIKIYHLPDAESDEDEDF

SEQ ID NO: 18019 - protein, 42 aa, Artificial Sequence
  Synthetic polypeptide
SQHFGRLSFKTIISYIDEQFERYLHDESGLNRRHIIDNRVHC

SEQ ID NO: 18020 - protein, 30 aa, Artificial Sequence
  Synthetic polypeptide
SQHFGRLSFKTIISYIDEQFERYLHDESGL

SEQ ID NO: 18021 - protein, 55 aa, Artificial Sequence
  Synthetic polypeptide
SQHFGRLSFKTIISYIDEQFERYLHDESGLNRRHIIDNRVHCCFYFISPFGHGLK

SEQ ID NO: 18022 - protein, 25 aa, Artificial Sequence
  Synthetic polypeptide
SQHFGRLSFKTIISYIDEQFERYLH

SEQ ID NO: 18023 - protein, 67 aa, Artificial Sequence
  Synthetic polypeptide
SQHFGRLSFKTIISYIDEQFERYLHDESGLNRRHIIDNRVHCCFYFISPFGHGLKPLDVAFMKAIHN

SEQ ID NO: 18024 - protein, 83 aa, Artificial Sequence
  Synthetic polypeptide
SQHFGRLSFKTIISYIDEQFERYLHDESGLNRRHIIDNRVHCCFYFISPFGHGLKPLDVAFMKAIHNKVNIVPVIAKADTLTL

SEQ ID NO: 18025 - protein, 185 aa, Artificial Sequence
  Synthetic polypeptide
SLTNLLTNSPRATAHAAHSSAEPPKMNPVVEPLSWMLGTWLSDPPGAGTYPTLQPFQYLEEVHISHVGQPMLNFSFNSFHPDTRKPMHRECGFIRLKPDTNKVAFVSAQNTGVVEVEEGEVNGQELCIASHSIARISFAKEPHVEQITRKFRLNSEGKLEQTVSMATTTQPMTQHLHVTYKKVTP

SEQ ID NO: 18026 - protein, 185 aa, Artificial Sequence; identical to SEQ ID NO: 18025
  Synthetic polypeptide

SEQ ID NO: 18027 - protein, 25 aa, Artificial Sequence
  Synthetic polypeptide
HLPTYSPTHPEQLPMLHTPVLSPPR

SEQ ID NO: 18028 - protein, 25 aa, Artificial Sequence
  Synthetic polypeptide
HLPTYSPTHPEQLPMLHTPVLSPPR

SEQ ID NO: 18029 - protein, 25 aa, Artificial Sequence
  Synthetic polypeptide
HLPTYSPTHPEQLPMLHTPVLSPPR

SEQ ID NO: 18030 - protein, 212 aa, Artificial Sequence
  Synthetic polypeptide
SLTNLLTNSPRATAHAAHSSAEPPKMNPVVEPLSWMLGTWLSDPPGAGTYPTLQPFQYLEEVHISHVGQPMLNFSFNSFHPDTRKPMHRECGFIRLKPDTNKVAFVSAQNTGVVEVEEGEVNGQELCIASHSIARISFAKEPHVEQVSPALLPARSCLLFAAVCGVSLFLFREITRKFRLNSEGKLEQTVSMATTTQPMTQHLHVTYKKVTP

SEQ ID NO: 18031 - protein, 1665 aa, Artificial Sequence
  Synthetic polypeptide
SGFNKGGPNMWAITSEERTKHDRQFDNLKPSGGYITGDQARNFFLQSGLPAPVLAEIWALSDLNKDGKMDQQEFSIAMKLIKLKLQGQQLPVVLPPIMKQPPMFSPLISARFGMGSMPNLSIPQPLPPAAPITSLSSATSGTNLPPLMMPTPLVPSVSTSSLPNGTASLIQPLPIPYSSSTLPHGSSYSLMMGGFGGASIQKAQSLIDLGSSSSTSSTASLSGNSPKTGTSEWAVPQPTRLKYRQKFNTLDKSMSGYLSGFQARNALLQSNLSQTQLATIWTLADVDGDGQLKAEEFILAMHLTDMAKAGQPLPLTLPPELVPPSFRGGKQIDSINGTLPSYQKMQEEEPQKKLPVTFEDKRKANYERGNMELEKRRQALMEQQQREAERKAQKEKEEWERKQRELQEQEWKKQLELEKRLEKQRELERQREEERRKDIERREAAKQELERQRRLEWERIRRQELLNQKNREQEEIVRLNSKKKNLHLELEALNGKHQQISGRLQDVRLKKQTQKTELEVLDKQCDLEIMEIKQLQQELQEYQNKLIYLVPEKQLLNERIKNMQFSNTPDSGVSLLHKKSLEKEELCQRLKEQLDALEKETASKLSEMDSFNNQLKELRETYNTQQLALEQLYKIKRDKLKEIERKRLELMQKKKLEDEAARKAKQGKENLWKENLRKEEEEKQKRLQEEKTQEKIQEEERKAEEKQRKDKDTLKAEEKKRETASVLVNYRALYPFEARNHDEMSFNSGDIIQVDEKTVGEPGWLYGSFQGNFGWFPCNYVEKMPSSENEKAVSPKKALLPPTVSLSATSTSSEPLSSNQPASVTDYQNVSFSNLTVNTSWQKKSAFTRTVSPGSVSPIHGQGQVVENLKAQALCSWTAKKDNHLNFSKHDIITVLEQQENWWFGEVHGGRGWFPKSYVKIIPGSEVKREEPEALYAAVNKKPTSAAYSVGEEYIALYPYSSVEPGDLTFTEGEEILVTQKDGEWWTGSIGDRSGIFPSNYVKPKDQESFGSASKSGASNKKPEIAQVTSAYVASGSEQLSLAPGQLILILKKNTSGWWQGELQARGKKRQKGWFPASHVKLLGPSSERATPAFHPVCQVIAMYDYAANNEDELSFSKGQLINVMNKDDPDWWQGEINGVTGLFPSNYVKMTTDSDPSQQWCADLQTLDTMQPIERKRQGYIHELIQTEERYMADLQLVVEVFQKRMAESGFLTEGEMALIFVNWKELIMSNTKLLKALRVRKKTGGEKMPVQMIGDILAAELSHMQAYIRFCSCQLNGAALLQQKTDEDTDFKEFLKKLASDPRCKGMPLSSFLLKPMQRITRYPLLIRSILENTPESHADHSSLKLALERAEELCSQVNEGVREKENSDRLEWIQAHVQCEGLAEQLIFNSLTNCLGPRKLLHSGKLYKTKSNKELHGFLFNDFLLLTYMVKQFAVSSGSEKLFSSKSNAQFKMYKTPIFLNEVLVKLPTDPSSDEPVFHISHIDRVYTLRTDNINERTAWVQKIKAASEQYIDTEKKKREKAYQARSQKTSGIGRLMVHVIEATELKACKPNGKSNPYCEISMGSQSYTTRTIQDTLNPKWNFNCQFFIKDLYQDVLCLTLFDRDQFSPDDFLGRTEIPVAKIRTEQESKGPMTRRLLLHEVPTGEVWVRFDLQLFEQKTLL

SEQ ID NO: 18032 - protein, 44 aa, Artificial Sequence
  Synthetic polypeptide
VAAYKVPDNSQGSIKEGQTCGLLPLKNVLSMTGSLITSNLQEVT

SEQ ID NO: 18033 - protein, 44 aa, Artificial Sequence; identical to SEQ ID NO: 18032
  Synthetic polypeptide

SEQ ID NO: 18034 - protein, 44 aa, Artificial Sequence; identical to SEQ ID NO: 18032
  Synthetic polypeptide

SEQ ID NO: 18035 - protein, 44 aa, Artificial Sequence; identical to SEQ ID NO: 18032
  Synthetic polypeptide

SEQ ID NO: 18036 - protein, 1692 aa, Artificial Sequence
  Synthetic polypeptide
SGFNKGGPNMWAITSEERTKHDRQFDNLKPSGGYITGDQARNFFLQSGLPAPVLAEIWALSDLNKDGKMDQQEFSIAMKLIKLKLQGQQLPVVLPPIMKQPPMFSPLISARFGMGSMPNLSIPQPLPPAAPITSLSSATSGTNLPPLMMPTPLVPSVSTSSLPNGTASLIQPLPIPYSSSTLPHGSSYSLMMGGFGGASIQKAQSLIDLGSSSSTSSTASLSGNSPKTGTSEWAVPQPTRLKYRQKFNTLDKSMSGYLSGFQARNALLQSNLSQTQLATIWTLADVDGDGQLKAEEFILAMHLTDMAKAGQPLPLTLPPELVPPSFRGGKQIDSINGTLPSYQKMQEEEPQKKLPVTFEDKRKANYERGNMELEKRRQALMEQQQREAERKAQKEKEEWERKQRELQEQEWKKQLELEKRLEKQRELERQREEERRKDIERREAAKQELERQRRLEWERIRRQELLNQKNREQEEIVRLNSKKKNLHLELEALNGKHQQISGRLQDVRLKKQTQKTELEVLDKQCDLEIMEIKQLQQELQEYQNKLIYLVPEKQLLNERIKNMQFSNTPDSGVSLLHKKSLEKEELCQRLKEQLDALEKETASKLSEMDSFNNQLKCGNMDDSVLQCLLSLLSCLNNLFLLLKELRETYNTQQLALEQLYKIKRDKLKEIERKRLELMQKKKLEDEAARKAKQGKENLWKENLRKEEEEKQKRLQEEKTQEKIQEEERKAEEKQRKDKDTLKAEEKKRETASVLVNYRALYPFEARNHDEMSFNSGDIIQVDEKTVGEPGWLYGSFQGNFGWFPCNYVEKMPSSENEKAVSPKKALLPPTVSLSATSTSSEPLSSNQPASVTDYQNVSFSNLTVNTSWQKKSAFTRTVSPGSVSPIHGQGQVVENLKAQALCSWTAKKDNHLNFSKHDIITVLEQQENWWFGEVHGGRGWFPKSYVKIIPGSEVKREEPEALYAAVNKKPTSAAYSVGEEYIALYPYSSVEPGDLTFTEGEEILVTQKDGEWWTGSIGDRSGIFPSNYVKPKDQESFGSASKSGASNKKPEIAQVTSAYVASGSEQLSLAPGQLILILKKNTSGWWQGELQARGKKRQKGWFPASHVKLLGPSSERATPAFHPVCQVIAMYDYAANNEDELSFSKGQLINVMNKDDPDWWQGEINGVTGLFPSNYVKMTTDSDPSQQWCADLQTLDTMQPIERKRQGYIHELIQTEERYMADLQLVVEVFQKRMAESGFLTEGEMALIFVNWKELIMSNTKLLKALRVRKKTGGEKMPVQMIGDILAAELSHMQAYIRFCSCQLNGAALLQQKTDEDTDFKEFLKKLASDPRCKGMPLSSFLLKPMQRITRYPLLIRSILENTPESHADHSSLKLALERAEELCSQVNEGVREKENSDRLEWIQAHVQCEGLAEQLIFNSLTNCLGPRKLLHSGKLYKTKSNKELHGFLFNDFLLLTYMVKQFAVSSGSEKLFSSKSNAQFKMYKTPIFLNEVLVKLPTDPSSDEPVFHISHIDRVYTLRTDNINERTAWVQKIKAASEQYIDTEKKKREKAYQARSQKTSGIGRLMVHVIEATELKACKPNGKSNPYCEISMGSQSYTTRTIQDTLNPKWNFNCQFFIKDLYQDVLCLTLFDRDQFSPDDFLGRTEIPVAKIRTEQESKGPMTRRLLLHEVPTGEVWVRFDLQLFEQKTLL

SEQ ID NO: 18037 - protein, 1244 aa, Artificial Sequence
  Synthetic polypeptide
SGFNKGGPNMWAITSEERTKHDRQFDNLKPSGGYITGDQARNFFLQSGLPAPVLAEIWALSDLNKDGKMDQQEFSIAMKLIKLKLQGQQLPVVLPPIMKQPPMFSPLISARFGMGSMPNLSIPQPLPPAAPITSLSSATSGTNLPPLMMPTPLVPSVSTSSLPNGTASLIQPLPIPYSSSTLPHGSSYSLMMGGFGGASIQKAQSLIDLGSSSSTSSTASLSGNSPKTGTSEWAVPQPTRLKYRQKFNTLDKSMSGYLSGFQARNALLQSNLSQTQLATIWTLADVDGDGQLKAEEFILAMHLTDMAKAGQPLPLTLPPELVPPSFRGGKQIDSINGTLPSYQKMQEEEPQKKLPVTFEDKRKANYERGNMELEKRRQALMEQQQREAERKAQKEKEEWERKQRELQEQEWKKQLELEKRLEKQRELERQREEERRKDIERREAAKQELERQRRLEWERIRRQELLNQKNREQEEIVRLNSKKKNLHLELEALNGKHQQISGRLQDVRLKKQTQKTELEVLDKQCDLEIMEIKQLQQELQEYQNKLIYLVPEKQLLNERIKNMQFSNTPDSGVSLLHKKSLEKEELCQRLKEQLDALEKETASKLSEMDSFNNQLKCGNMDDSVLQCLLSLLSCLNNLFLLLKELRETYNTQQLALEQLYKIKRDKLKEIERKRLELMQKKKLEDEAARKAKQGKENLWKENLRKEEEEKQKRLQEEKTQEKIQEEERKAEEKQRKDKDTLKAEEKKRETASVLVNYRALYPFEARNHDEMSFNSGDIIQVDEKTVGEPGWLYGSFQGNFGWFPCNYVEKMPSSENEKAVSPKKALLPPTVSLSATSTSSEPLSSNQPASVTDYQNVSFSNLTVNTSWQKKSAFTRTVSPGSVSPIHGQGQVVENLKAQALCSWTAKKDNHLNFSKHDIITVLEQQENWWFGEVHGGRGWFPKSYVKIIPGSEVKREEPEALYAAVNKKPTSAAYSVGEEYIALYPYSSVEPGDLTFTEGEEILVTQKDGEWWTGSIGDRSGIFPSNYVKPKDQESFGSASKSGASNKKPEIAQVTSAYVASGSEQLSLAPGQLILILKKNTSGWWQGELQARGKKRQKGWFPASHVKLLGPSSERATPAFHPVCQVIAMYDYAANNEDELSFSKGQLINVMNKDDPDWWQGEINGVTGLFPSNYVKMTTDSDPSQQWCADLQTLDTMQPIERKRQGYIHELIQTEERYMADLQLVVEVRRLLLASSRGICCLS

SEQ ID NO: 18038 - protein, 604 aa, Artificial Sequence
  Synthetic polypeptide
SGFNKGGPNMWAITSEERTKHDRQFDNLKPSGGYITGDQARNFFLQSGLPAPVLAEIWALSDLNKDGKMDQQEFSIAMKLIKLKLQGQQLPVVLPPIMKQPPMFSPLISARFGMGSMPNLSIPQPLPPAAPITSLSSATSGTNLPPLMMPTPLVPSVSTSSLPNGTASLIQPLPIPYSSSTLPHGSSYSLMMGGFGGASIQKAQSLIDLGSSRSWSSGSSAHSPATHRAPLSSPVPNSSTSSTASLSGNSPKTGTSEWAVPQPTRLKYRQKFNTLDKSMSGYLSGFQARNALLQSNLSQTQLATIWTLADVDGDGQLKAEEFILAMHLTDMAKAGQPLPLTLPPELVPPSFRGGKQIDSINGTLPSYQKMQEEEPQKKLPVTFEDKRKANYERGNMELEKRRQALMEQQQREAERKAQKEKEEWERKQRELQEQEWKKQLELEKRLEKQRELERQREEERRKDIERREAAKQELERQRRLEWERIRRQELLNQKNREQEEIVRLNSKKKNLHLELEALNGKHQQISGRLQDVRLKKQTQKTELEVLDKQCDLEIMEIKQLQQELQEYQNKLIYLVPEKQLLNERIKNMQFSNTPDSGVSLLHKK

SEQ ID NO: 18039 - protein, 21 aa, Artificial Sequence
  Synthetic polypeptide
KEKLKKYIYILSSAWPQMRPP

SEQ ID NO: 18040 - protein, 6 aa, Artificial Sequence
  Synthetic polypeptide
VVHGPR

SEQ ID NO: 18041 - protein, 58 aa, Artificial Sequence
  Synthetic polypeptide
CMAPDETTLKELAETLQQKNIDHMLWLEQPENIATCIALRPYPKEEVGQYLKKFRLFK

SEQ ID NO: 18042 - protein, 46 aa, Artificial Sequence
  Synthetic polypeptide
GLPSHAELSWPTSSSTCAPSLWASCPTTWLTASTARPSWRPASRWR

SEQ ID NO: 18043 - protein, 46 aa, Artificial Sequence; identical to SEQ ID NO: 18042
  Synthetic polypeptide

SEQ ID NO: 18044 - protein, 920 aa, Artificial Sequence
  Synthetic polypeptide
TILANVFLYLCAIAVGIMSYYMADRKHRKAFLEARQSLEVKMNLEEQSQQQENLMLSILPKHVADEMLKDMKKDESQKDQQQFNTMYMYRHENVSILFADIVGFTQLSSACSAQELVKLLNELFARFDKLAAKYHQLRIKILGDCYYCICGLPDYREDHAVCSILMGLAMVEAISYVREKTKTGVDMRVGVHTGTVLGGVLGQKRWQYDVWSTDVTVANKMEAGGIPGRVHISQSTMDCLKGEFDVEPGDGGSRCDYLEEKGIETYLIIASKPEVKKTATQNGLNGSALPNGAPASSKSSSPALIETKEPNGSAHSSGSTSEKPEEQDAQADNPSFPNPRRRLRLQDLADRVVDASEDEHELNQLLNEALLERESAQVVKKRNTFLLSMRFMDPEMETRYSVEKEKQSGAAFSCSCVVLLCTALVEILIDPWLMTNYVTFMVGEILLLILTICSLAAIFPRAFPKKLVAFSTWIDRTRWARNTWAMLAIFILVMANVVDMLSCLQYYTGPSNATAGMETEGSCLENPKYYNYVAVLSLIATIMLVQVSHMVKLTLMLLVAGAVATINLYAWRPVFDEYDHKRFREHDLPMVALEQMQGFNPGLNGTDRLPLVPSKYSMTVMVFLMMLSFYYFSRHVEKLARTLFLWKIEVHDQKERVYEMRRWNEALVTNMLPEHVARHFLGSKKRDEELYSQTYDEIGVMFASLPNFADFYTEESINNGGIECLRFLNEIISDFDSLLDNPKFRVITKIKTIGSTYMAASGVTPDVNTNGFASSNKEDKSERERWQHLADLADFALAMKDTLTNINNQSFNNFMLRIGMNKGGVLAGVIGARKPHYDIWGNTVNVASRMESTGVMGNIQVVEETQVILREYGFRFVRRGPIFVKGKGELLTFFLKGRDKLATFPNGPSVTLPHQVVDNS

SEQ ID NO: 18045 - protein, 152 aa, Artificial Sequence
  Synthetic polypeptide
TILANVFLYLCAIAVGIMSYYMADRKHRKAFLEARQSLEVKMNLEEQSQQQENLMLSILPKHVADEMLKDMKKDESQKDQQQFNTMYMYRHENVSILFADIVGFTQLSSACSAQELVKLLNELFARFDKLAAKYHQLRIKILGDCYYCICGL

SEQ ID NO: 18046 - protein, 39 aa, Artificial Sequence
  Synthetic polypeptide
PFRHDCKFPEAFPAMLNYPGQRLPLPVRHRCGHHVLLHG

SEQ ID NO: 18047 - protein, 39 aa, Artificial Sequence; identical to SEQ ID NO: 18046
  Synthetic polypeptide

SEQ ID NO: 18048 - protein, 46 aa, Artificial Sequence; identical to SEQ ID NO: 18042
  Synthetic polypeptide

SEQ ID NO: 18049 - protein, 46 aa, Artificial Sequence; identical to SEQ ID NO: 18042
  Synthetic polypeptide

SEQ ID NO: 18050 - protein, 61 aa, Artificial Sequence
  Synthetic polypeptide
GAFPCFTLHFSSPPPYEGRVCFPFCRNCKFPEASPAMLNYPGQRLPLPVRHRCGHHVLLHG

SEQ ID NO: 18051 - protein, 61 aa, Artificial Sequence; identical to SEQ ID NO: 18050
  Synthetic polypeptide

SEQ ID NO: 18052 - protein, 920 aa, Artificial Sequence; identical to SEQ ID NO: 18044
  Synthetic polypeptide

SEQ ID NO: 18053 - protein, 152 aa, Artificial Sequence; identical to SEQ ID NO: 18045
  Synthetic polypeptide

SEQ ID NO: 18054 - protein, 37 aa, Artificial Sequence
  Synthetic polypeptide
GQRTCGVQRRTSDQQTHGKFSTSLVIKEMHIKNHNEE

SEQ ID NO: 18055 - protein, 13 aa, Artificial Sequence
  Synthetic polypeptide
KTTMRNRLQDQNS

SEQ ID NO: 18056 - protein, 13 aa, Artificial Sequence
  Synthetic polypeptide
SIQNRNRLQDQNS

SEQ ID NO: 18057 - protein, 188 aa, Artificial Sequence
  Synthetic polypeptide
YGRTLNILSERSQTQKLTCCLLLFHEVSKIGIDFKIKTVELQGKKIKLQIWDTAGQERFHTITTSYYRGAMGIMLVYDITNGKSFENISKWLRNIDEHANEDVERMLLGNKCDMDDKRVVPKGKGEQIAREHGIRFFETSAKANINIEKAFLTLAEDILRKTPVKEPNSENVDISSGGGVTGWKSKCC

SEQ ID NO: 18058 - protein, 49 aa, Artificial Sequence
  Synthetic polypeptide
GEARWLTPVIPALWKAKAGRSREIWRACNDQRIKGLDGTLPWSGPVQEE

SEQ ID NO: 18059 - protein, 451 aa, Artificial Sequence
  Synthetic polypeptide
SQHFGRPRRADHEKFGELVMTKESKALMGLYHGQVLCKKNKFGAPQKDVKHLAILGAGLMGAGIAQVSVDKGLKTILKDATLTALDRGQQQVFKGLNDKVKKKALTSFERDSIFSNLTGQLDYQGFEKADMVIEAVFEDLSLKHRVLKEVEAVIPDHCIFASNTSALPISEIAAVSKRPEKVIGMHYFSPVDKMQLLEIITTEKTSKDTSASAVAVGLKQGKVIIVVKDGPGFYTTRCLAPMMSEVIRILQEGVDPKKLDSLTTSFGFPVGAATLVDEVGVDVAKHVAEDLGKVFGERFGGGNPELLTQMVSKGFLGRKSGKGFYIYQEGVKRKDLNSDMDSILASLKLPPKSEVSSDEDIQFRLVTRFVNEAVMCLQEGILATPAEGDIGAVFGLGFPPCLGGPFRFVDLYGAQKIVDRLKKYEAAYGKQFTPCQLLADHANSPNKKFYQ

SEQ ID NO: 18060 - protein, 27 aa, Artificial Sequence
  Synthetic polypeptide
RGTVAHACNPSTLEGQGGQITRNLESL

SEQ ID NO: 18061 - protein, 8 aa, Artificial Sequence
  Synthetic polypeptide
PPLQAWPA

SEQ ID NO: 18062 - protein, 8 aa, Artificial Sequence
  Synthetic polypeptide
PPLQAWPA

SEQ ID NO: 18063 - protein, 403 aa, Artificial Sequence
  Synthetic polypeptide
LPCKPGLHDILNNLRSKYAKQIKQFQEENQSLTSDYKRLVMQFKELQKAMRHFALIDDEKFWEIWLMNEEEAKDLIARAFDVDRIIHTHHLGLPWAAPDFWFLNNVGPISQQPQKSATQIVEEMLMRSEEEEAEEAAAEPESYLDLPKQISEKTTKRILMLLCDESGFLIESKLLSLLLPLEQNECYLLRLDAIFSALGIESEDDLYKLVNFFLKYRAHRLSSSLQIKPCSQASMEKASMEETSTRSELELAEQTEMEGEKEESLVEGEKEEEEETPPSPWVIHPNDVLKILEAFVMGLKKPRDSRAPLRVQKNVRDNSKDSEYWQALTTVIPSSKQNLWDALYTALEKYHLVLTQRAKLLLENSSLEQQNTELQALLQQYLNSKINSELQVPPTQVLRVPTK

SEQ ID NO: 18064 - protein, 13 aa, Artificial Sequence
  Synthetic polypeptide
SPASLACMIYLTI

SEQ ID NO: 18065 - protein, 13 aa, Artificial Sequence
  Synthetic polypeptide
SPASLACMIYLTI

SEQ ID NO: 18066 - protein, 18 aa, Artificial Sequence
  Synthetic polypeptide
LPCKPGLHDILNNLRSKY

SEQ ID NO: 18067 - protein, 307 aa, Artificial Sequence
  Synthetic polypeptide
VKNTSEGLRARGTQHGWRQGVLHVLRAAGHPAHARHVPEPGRAHQHLGEVPAAPRQEGAGHAARRRVHGQHGAHRLLLVHQHAVHRRRRLLPLRALDLLPGLLLLLHHPHHHRLRRLRGAAEGPGPADAAAVRGLQLRLHPYGPHGHRRLPQPRGAALHDHERRGREARRRAPRAAHAQRAGGRRRRGWQRAHYGHRLIHGGSGRRRLPQRLRGGAALPVHVLVPVVQEPREAAVLHPHDHPAGPLHVRHVRGAEPLVAGRGRPLQRHALATLPVQRGATLRHQLGVHGSAQPVHLPRPHEAQELRV

SEQ ID NO: 18068 - protein, 315 aa, Artificial Sequence
  Synthetic polypeptide
PCKKFLRIKLKIHLKGYGHAAPSTDGGKVFCMFYALLGIPLTLVMFQSLGERINTLVRYLLHRAKKGLGMRRADVSMANMVLIGFFSCISTLCIGAAAFSHYEHWTFFQAYYYCFITLTTIGFGDYVALQKDQALQTQPQYVAFSFVYILTGLTVIGAFLNLVVLRFMTMNAEDEKRDAEHRALLTRNGQAGGGGGGGSAHTTDTASSTAAAGGGGFRNVYAEVLHFQSMCSCLWYKSREKLQYSIPMIIPRDLSTSDTCVEQSHSSPGGGGRYSDTPSRRCLCSGAPRSAISSVSTGLHSLSTFRGLMKRRSSV

SEQ ID NO: 18069 - protein, 42 aa, Artificial Sequence
  Synthetic polypeptide
RATGTRHPARMAARCSACSTRCWASRSRSSCSRAWASASTPW

SEQ ID NO: 18070 - protein, 58 aa, Artificial Sequence
  Synthetic polypeptide
GRVRRLTPVIPALWEAEAGGSLELEEMTELESPKCKRQENEQLLDQNQEIRASQRSWV

SEQ ID NO: 18071 - protein, 58 aa, Artificial Sequence; identical to SEQ ID NO: 18070
  Synthetic polypeptide

SEQ ID NO: 18072 - protein, 58 aa, Artificial Sequence; identical to SEQ ID NO: 18070
  Synthetic polypeptide

SEQ ID NO: 18073 - protein, 58 aa, Artificial Sequence; identical to SEQ ID NO: 18070
  Synthetic polypeptide

SEQ ID NO: 18074 - protein, 14 aa, Artificial Sequence
  Synthetic polypeptide
SQHFGRLRQADHLS

SEQ ID NO: 18075 - protein, 14 aa, Artificial Sequence
  Synthetic polypeptide
SQHFGRLRQADHLS

SEQ ID NO: 18076 - protein, 14 aa, Artificial Sequence
  Synthetic polypeptide
SQHFGRLRQADHLS

SEQ ID NO: 18077 - protein, 14 aa, Artificial Sequence
  Synthetic polypeptide
SQHFGRLRQADHLS

SEQ ID NO: 18078 - protein, 46 aa, Artificial Sequence
  Synthetic polypeptide
MGAVAHTFNPSTLGGQDLPQPSVPGRAEIHQSVVWRAPQHQLFLSV

SEQ ID NO: 18079 - protein, 45 aa, Artificial Sequence
  Synthetic polypeptide
WVQWLIPLIPALWEAKTSHSPVCQDVLKFISQWCGGLPSTSFSFQ

SEQ ID NO: 18080 - protein, 18 aa, Artificial Sequence
  Synthetic polypeptide
SQHFGRPRPPTAQCARTC

SEQ ID NO: 18081 - protein, 104 aa, Artificial Sequence
  Synthetic polypeptide
LAPPCLLPRLCEASPATCHWDIIFNAQYPELPPDFIFGEDAEFLPDPSALQNLASWNPSNPECLLLVVKELVQQYHQFQCSRLRESSRLMFEYQTLLEEPQYGE

SEQ ID NO: 18082 - protein, 87 aa, Artificial Sequence
  Synthetic polypeptide
GGISLHKLSLFLLLSIVRCDLLRLAFCHDCVRLPQPHVTGISFSMPNTQNCLPILSLEKMLNSCQTPQLCRILPPGILQILNVSYLW

SEQ ID NO: 18083 - protein, 87 aa, Artificial Sequence; identical to SEQ ID NO: 18082
  Synthetic polypeptide

SEQ ID NO: 18084 - protein, 87 aa, Artificial Sequence; identical to SEQ ID NO: 18082
  Synthetic polypeptide

SEQ ID NO: 18085 - protein, 87 aa, Artificial Sequence; identical to SEQ ID NO: 18082
  Synthetic polypeptide

SEQ ID NO: 18086 - protein, 87 aa, Artificial Sequence; identical to SEQ ID NO: 18082
  Synthetic polypeptide

SEQ ID NO: 18087 - protein, 87 aa, Artificial Sequence; identical to SEQ ID NO: 18082
  Synthetic polypeptide

SEQ ID NO: 18088 - protein, 87 aa, Artificial Sequence; identical to SEQ ID NO: 18082
  Synthetic polypeptide

SEQ ID NO: 18089 - protein, 87 aa, Artificial Sequence; identical to SEQ ID NO: 18082
  Synthetic polypeptide

SEQ ID NO: 18090 - protein, 29 aa, Artificial Sequence
  Synthetic polypeptide
GFPSHMSLGYHFQCPIPRTASRFYLWRRC

SEQ ID NO: 18091 - protein, 29 aa, Artificial Sequence
  Synthetic polypeptide
GFPSHMSLGYHFQCPIPRTASRFYLWRRC

SEQ ID NO: 18092 - protein, 29 aa, Artificial Sequence
  Synthetic polypeptide
GFPSHMSLGYHFQCPIPRTASRFYLWRRC

SEQ ID NO: 18093 - protein, 29 aa, Artificial Sequence
  Synthetic polypeptide
GFPSHMSLGYHFQCPIPRTASRFYLWRRC

SEQ ID NO: 18094 - protein, 29 aa, Artificial Sequence
  Synthetic polypeptide
GFPSHMSLGYHFQCPIPRTASRFYLWRRC

SEQ ID NO: 18095 - protein, 29 aa, Artificial Sequence
  Synthetic polypeptide
GFPSHMSLGYHFQCPIPRTASRFYLWRRC

SEQ ID NO: 18096 - protein, 29 aa, Artificial Sequence
  Synthetic polypeptide
GFPSHMSLGYHFQCPIPRTASRFYLWRRC

SEQ ID NO: 18097 - protein, 29 aa, Artificial Sequence
  Synthetic polypeptide
GFPSHMSLGYHFQCPIPRTASRFYLWRRC

SEQ ID NO: 18098 - protein, 366 aa, Artificial Sequence
  Synthetic polypeptide
LAPPCLLPRLCEASPATCHWDIIFNAQYPELPPDFIFGEDAEFLPDPSALQNLASWNPSNPECLLLVVKELVQQYHQFQCSRLRESSRLMFEYQTLLEEPQYGENMEIYAGKKNNWTGEFSARFLLKLPVDFSNIPTYLLKDVNEDPGEDVALLSVSFEDTEATQVYPKLYLSPRIEHALGGSSALHIPAFPGGGCLIDYVPQVCHLLTNKVQYVIQGYHKRREYIAAFLSHFGTGVVEYDAEGFTKLTLLLMWKDFCFLVHIDLPLFFPRDQPTLTFQSVYHFTNSGQLYSQAQKNYPYSPRWDGNEMAKRAKGCQGSRDACSPWEQVLAFAVAKTGCKLLQPQRNWPSSRGPPWRASEGERTAQ

SEQ ID NO: 18099 - protein, 334 aa, Artificial Sequence
  Synthetic polypeptide
LAPPCLLPRLCEASPATCHWDIIFNAQYPELPPDFIFGEDAEFLPDPSALQNLASWNPSNPECLLLVVKELVQQYHQFQCSRLRESSRLMFEYQTLLEEPQYGENMEIYAGKKNNWTGEFSARFLLKLPVDFSNIPTYLLKDVNEDPGEDVALLSVSFEDTEATQVYPKLYLSPRIEHALGGSSALHIPAFPGGGCLIDYVPQVCHLLTNKVQYVIQGYHKRREYIAAFLSHFGTGVVEYDAEGFTKLTLLLMWKDFCFLVHIDLPLFFPRDQPTLTFQSVYHFTNSGQLYSQAQKNYPYSPRWDGNEMAKRAKAYFKTFVPQFQEAAFANGKL

SEQ ID NO: 18100 - protein, 334 aa, Artificial Sequence; identical to SEQ ID NO: 18099
  Synthetic polypeptide

SEQ ID NO: 18101 - protein, 327 aa, Artificial Sequence
  Synthetic polypeptide
LAPPCLLPRLCEASPATCHWDIIFNAQYPELPPDFIFGEDAEFLPDPSALQNLASWNPSNPECLLLVVKELVQQYHQFQCSRLRESSRLMFEYQTLLEEPQYGENMEIYAGKKNNWTGEFSARFLLKLPVDFSNIPTYLLKDVNEDPGEDVALLSVSFEDTEATQVYPKLYLSPRIEHALGGSSALHIPAFPGGGCLIDYVPQVCHLLTNKVQYVIQGYHKRREYIAAFLSHFGTGVVEYDAEGFTKLTLLLMWKDFCFLVHIDLPLFFPRDQPTLTFQSVYHFTNSGQLYSQAQKNYPYSPRWDGNEMAKRAKRESNRDGEESSSA

SEQ ID NO: 18102 - protein, 327 aa, Artificial Sequence; identical to SEQ ID NO: 18101
  Synthetic polypeptide

SEQ ID NO: 18103 - protein, 235 aa, Artificial Sequence
  Synthetic polypeptide
LAPPCLLPRLCEASPATCHWDIIFNAQYPELPPDFIFGEDAEFLPDPSALQNLASWNPSNPECLLLVVKELVQQYHQFQCSRLRESSRLMFEYQTLLEEPQYGENMEIYAGKKNNWTGEFSARFLLKLPVDFSNIPTYLLKDVNEDPGEDVALLSVSFEDTEATQVYPKLYLSPRIEQLSLSPCHTDFLLTRFLPAPLWGSEVSVPSGPFHLLIILPQPLSGLVRPCLLFSQPCS

SEQ ID NO: 18104 - protein, 138 aa, Artificial Sequence
  Synthetic polypeptide
LAPPCLLPRLCEASPATCHWDIIFNAQYPELPPDFIFGEDAEFLPDPSALQNLASWNPSNPECLLLVVKELVQQYHQFQCSRLRESSRLMFEYQTLLEEPQYGENMEIYAGKKNNWVRIFENGKKDDFIHNKIINSYV

SEQ ID NO: 18105 - protein, 86 aa, Artificial Sequence
  Synthetic polypeptide
NWDIIFNAQYPELPPDFIFGEDAEFLPDPSALQNLASWNPSNPECLLLVVKELVQQYHQFQCSRLRESSRLMFEYQTLLEEPQYGE

SEQ ID NO: 18106 - protein, 69 aa, Artificial Sequence
  Synthetic polypeptide
DVTCFSLPSAMIVRLPQPHETGISFSMPNTQNCLPILSLEKMLNSCQTPQLCRILPPGILQILNVSYLW

SEQ ID NO: 18107 - protein, 69 aa, Artificial Sequence; identical to SEQ ID NO: 18106
  Synthetic polypeptide

SEQ ID NO: 18108 - protein, 69 aa, Artificial Sequence; identical to SEQ ID NO: 18106
  Synthetic polypeptide

SEQ ID NO: 18109 - protein, 69 aa, Artificial Sequence; identical to SEQ ID NO: 18106
  Synthetic polypeptide

SEQ ID NO: 18110 - protein, 69 aa, Artificial Sequence; identical to SEQ ID NO: 18106
  Synthetic polypeptide

SEQ ID NO: 18111 - protein, 69 aa, Artificial Sequence; identical to SEQ ID NO: 18106
  Synthetic polypeptide

SEQ ID NO: 18112 - protein, 69 aa, Artificial Sequence; identical to SEQ ID NO: 18106
  Synthetic polypeptide

SEQ ID NO: 18113 - protein, 69 aa, Artificial Sequence; identical to SEQ ID NO: 18106
  Synthetic polypeptide

SEQ ID NO: 18114 - protein, 29 aa, Artificial Sequence
  Synthetic polypeptide
GFPSHMKLGYHFQCPIPRTASRFYLWRRC

SEQ ID NO: 18115 - protein, 29 aa, Artificial Sequence
  Synthetic polypeptide
GFPSHMKLGYHFQCPIPRTASRFYLWRRC

SEQ ID NO: 18116 - protein, 29 aa, Artificial Sequence
  Synthetic polypeptide
GFPSHMKLGYHFQCPIPRTASRFYLWRRC

SEQ ID NO: 18117 - protein, 29 aa, Artificial Sequence
  Synthetic polypeptide
GFPSHMKLGYHFQCPIPRTASRFYLWRRC

SEQ ID NO: 18118 - protein, 29 aa, Artificial Sequence
  Synthetic polypeptide
GFPSHMKLGYHFQCPIPRTASRFYLWRRC

SEQ ID NO: 18119 - protein, 29 aa, Artificial Sequence
  Synthetic polypeptide
GFPSHMKLGYHFQCPIPRTASRFYLWRRC

SEQ ID NO: 18120 - protein, 29 aa, Artificial Sequence
  Synthetic polypeptide
GFPSHMKLGYHFQCPIPRTASRFYLWRRC

SEQ ID NO: 18121 - protein, 29 aa, Artificial Sequence
  Synthetic polypeptide
GFPSHMKLGYHFQCPIPRTASRFYLWRRC

SEQ ID NO: 18122 - protein, 348 aa, Artificial Sequence
  Synthetic polypeptide
NWDIIFNAQYPELPPDFIFGEDAEFLPDPSALQNLASWNPSNPECLLLVVKELVQQYHQFQCSRLRESSRLMFEYQTLLEEPQYGENMEIYAGKKNNWTGEFSARFLLKLPVDFSNIPTYLLKDVNEDPGEDVALLSVSFEDTEATQVYPKLYLSPRIEHALGGSSALHIPAFPGGGCLIDYVPQVCHLLTNKVQYVIQGYHKRREYIAAFLSHFGTGVVEYDAEGFTKLTLLLMWKDFCFLVHIDLPLFFPRDQPTLTFQSVYHFTNSGQLYSQAQKNYPYSPRWDGNEMAKRAKGCQGSRDACSPWEQVLAFAVAKTGCKLLQPQRNWPSSRGPPWRASEGERTAQ

SEQ ID NO: 18123 - protein, 316 aa, Artificial Sequence
  Synthetic polypeptide
NWDIIFNAQYPELPPDFIFGEDAEFLPDPSALQNLASWNPSNPECLLLVVKELVQQYHQFQCSRLRESSRLMFEYQTLLEEPQYGENMEIYAGKKNNWTGEFSARFLLKLPVDFSNIPTYLLKDVNEDPGEDVALLSVSFEDTEATQVYPKLYLSPRIEHALGGSSALHIPAFPGGGCLIDYVPQVCHLLTNKVQYVIQGYHKRREYIAAFLSHFGTGVVEYDAEGFTKLTLLLMWKDFCFLVHIDLPLFFPRDQPTLTFQSVYHFTNSGQLYSQAQKNYPYSPRWDGNEMAKRAKAYFKTFVPQFQEAAFANGKL

SEQ ID NO: 18124 - protein, 316 aa, Artificial Sequence; identical to SEQ ID NO: 18123
  Synthetic polypeptide

SEQ ID NO: 18125 - protein, 309 aa, Artificial Sequence
  Synthetic polypeptide
NWDIIFNAQYPELPPDFIFGEDAEFLPDPSALQNLASWNPSNPECLLLVVKELVQQYHQFQCSRLRESSRLMFEYQTLLEEPQYGENMEIYAGKKNNWTGEFSARFLLKLPVDFSNIPTYLLKDVNEDPGEDVALLSVSFEDTEATQVYPKLYLSPRIEHALGGSSALHIPAFPGGGCLIDYVPQVCHLLTNKVQYVIQGYHKRREYIAAFLSHFGTGVVEYDAEGFTKLTLLLMWKDFCFLVHIDLPLFFPRDQPTLTFQSVYHFTNSGQLYSQAQKNYPYSPRWDGNEMAKRAKRESNRDGEESSSA

SEQ ID NO: 18126 - protein, 309 aa, Artificial Sequence; identical to SEQ ID NO: 18125
  Synthetic polypeptide

SEQ ID NO: 18127 - protein, 217 aa, Artificial Sequence
  Synthetic polypeptide
NWDIIFNAQYPELPPDFIFGEDAEFLPDPSALQNLASWNPSNPECLLLVVKELVQQYHQFQCSRLRESSRLMFEYQTLLEEPQYGENMEIYAGKKNNWTGEFSARFLLKLPVDFSNIPTYLLKDVNEDPGEDVALLSVSFEDTEATQVYPKLYLSPRIEQLSLSPCHTDFLLTRFLPAPLWGSEVSVPSGPFHLLIILPQPLSGLVRPCLLFSQPCS

SEQ ID NO: 18128 - protein, 120 aa, Artificial Sequence
  Synthetic polypeptide
NWDIIFNAQYPELPPDFIFGEDAEFLPDPSALQNLASWNPSNPECLLLVVKELVQQYHQFQCSRLRESSRLMFEYQTLLEEPQYGENMEIYAGKKNNWVRIFENGKKDDFIHNKIINSYV

SEQ ID NO: 18129 - protein, 82 aa, Artificial Sequence
  Synthetic polypeptide
CACSPFTSCHDCKLAEVFARSRCWHHASCTACRTGISFSMPNTQNCLPILSLEKMLNSCQTPQLCRILPPGILQILNVSYLW

SEQ ID NO: 18130 - protein, 82 aa, Artificial Sequence; identical to SEQ ID NO: 18129
  Synthetic polypeptide

SEQ ID NO: 18131 - protein, 82 aa, Artificial Sequence; identical to SEQ ID NO: 18129
  Synthetic polypeptide

SEQ ID NO: 18132 - protein, 82 aa, Artificial Sequence; identical to SEQ ID NO: 18129
  Synthetic polypeptide

SEQ ID NO: 18133 - protein, 82 aa, Artificial Sequence; identical to SEQ ID NO: 18129
  Synthetic polypeptide

SEQ ID NO: 18134 - protein, 82 aa, Artificial Sequence; identical to SEQ ID NO: 18129
  Synthetic polypeptide

SEQ ID NO: 18135 - protein, 82 aa, Artificial Sequence; identical to SEQ ID NO: 18129
  Synthetic polypeptide

SEQ ID NO: 18136 - protein, 82 aa, Artificial Sequence; identical to SEQ ID NO: 18129
  Synthetic polypeptide

SEQ ID NO: 18137 - protein, 95 aa, Artificial Sequence
  Synthetic polypeptide
MVWCCPCDNERVLALTSCEIWLFKRAWHLLLLSLPLSSCDVPALPSPPAMIVSLLRSLPEADAGTMLPVQPAELGYHFQCPIPRTASRFYLWRRC

SEQ ID NO: 18138 - protein, 95 aa, Artificial Sequence; identical to SEQ ID NO: 18137
  Synthetic polypeptide

SEQ ID NO: 18139 - protein, 95 aa, Artificial Sequence; identical to SEQ ID NO: 18137
  Synthetic polypeptide

SEQ ID NO: 18140 - protein, 95 aa, Artificial Sequence; identical to SEQ ID NO: 18137
  Synthetic polypeptide

SEQ ID NO: 18141 - protein, 95 aa, Artificial Sequence; identical to SEQ ID NO: 18137
  Synthetic polypeptide

SEQ ID NO: 18142 - protein, 95 aa, Artificial Sequence; identical to SEQ ID NO: 18137
  Synthetic polypeptide

SEQ ID NO: 18143 - protein, 95 aa, Artificial Sequence; identical to SEQ ID NO: 18137
  Synthetic polypeptide

SEQ ID NO: 18144 - protein, 95 aa, Artificial Sequence; identical to SEQ ID NO: 18137
  Synthetic polypeptide

SEQ ID NO: 18145 - protein, 103 aa, Artificial Sequence
  Synthetic polypeptide
GLCQKQMLAPCFLYSLQNWDIIFNAQYPELPPDFIFGEDAEFLPDPSALQNLASWNPSNPECLLLVVKELVQQYHQFQCSRLRESSRLMFEYQTLLEEPQYGE

SEQ ID NO: 18146 - protein, 365 aa, Artificial Sequence
  Synthetic polypeptide
GLCQKQMLAPCFLYSLQNWDIIFNAQYPELPPDFIFGEDAEFLPDPSALQNLASWNPSNPECLLLVVKELVQQYHQFQCSRLRESSRLMFEYQTLLEEPQYGENMEIYAGKKNNWTGEFSARFLLKLPVDFSNIPTYLLKDVNEDPGEDVALLSVSFEDTEATQVYPKLYLSPRIEHALGGSSALHIPAFPGGGCLIDYVPQVCHLLTNKVQYVIQGYHKRREYIAAFLSHFGTGVVEYDAEGFTKLTLLLMWKDFCFLVHIDLPLFFPRDQPTLTFQSVYHFTNSGQLYSQAQKNYPYSPRWDGNEMAKRAKGCQGSRDACSPWEQVLAFAVAKTGCKLLQPQRNWPSSRGPPWRASEGERTAQ

SEQ ID NO: 18147 - protein, 333 aa, Artificial Sequence
  Synthetic polypeptide
GLCQKQMLAPCFLYSLQNWDIIFNAQYPELPPDFIFGEDAEFLPDPSALQNLASWNPSNPECLLLVVKELVQQYHQFQCSRLRESSRLMFEYQTLLEEPQYGENMEIYAGKKNNWTGEFSARFLLKLPVDFSNIPTYLLKDVNEDPGEDVALLSVSFEDTEATQVYPKLYLSPRIEHALGGSSALHIPAFPGGGCLIDYVPQVCHLLTNKVQYVIQGYHKRREYIAAFLSHFGTGVVEYDAEGFTKLTLLLMWKDFCFLVHIDLPLFFPRDQPTLTFQSVYHFTNSGQLYSQAQKNYPYSPRWDGNEMAKRAKAYFKTFVPQFQEAAFANGKL

SEQ ID NO: 18148 - protein, 333 aa, Artificial Sequence; identical to SEQ ID NO: 18147
  Synthetic polypeptide

SEQ ID NO: 18149 - protein, 326 aa, Artificial Sequence
  Synthetic polypeptide
GLCQKQMLAPCFLYSLQNWDIIFNAQYPELPPDFIFGEDAEFLPDPSALQNLASWNPSNPECLLLVVKELVQQYHQFQCSRLRESSRLMFEYQTLLEEPQYGENMEIYAGKKNNWTGEFSARFLLKLPVDFSNIPTYLLKDVNEDPGEDVALLSVSFEDTEATQVYPKLYLSPRIEHALGGSSALHIPAFPGGGCLIDYVPQVCHLLTNKVQYVIQGYHKRREYIAAFLSHFGTGVVEYDAEGFTKLTLLLMWKDFCFLVHIDLPLFFPRDQPTLTFQSVYHFTNSGQLYSQAQKNYPYSPRWDGNEMAKRAKRESNRDGEESSSA

SEQ ID NO: 18150 - protein, 326 aa, Artificial Sequence; identical to SEQ ID NO: 18149
  Synthetic polypeptide

SEQ ID NO: 18151 - protein, 234 aa, Artificial Sequence
  Synthetic polypeptide
GLCQKQMLAPCFLYSLQNWDIIFNAQYPELPPDFIFGEDAEFLPDPSALQNLASWNPSNPECLLLVVKELVQQYHQFQCSRLRESSRLMFEYQTLLEEPQYGENMEIYAGKKNNWTGEFSARFLLKLPVDFSNIPTYLLKDVNEDPGEDVALLSVSFEDTEATQVYPKLYLSPRIEQLSLSPCHTDFLLTRFLPAPLWGSEVSVPSGPFHLLIILPQPLSGLVRPCLLFSQPCS

SEQ ID NO: 18152 - protein, 137 aa, Artificial Sequence
  Synthetic polypeptide
GLCQKQMLAPCFLYSLQNWDIIFNAQYPELPPDFIFGEDAEFLPDPSALQNLASWNPSNPECLLLVVKELVQQYHQFQCSRLRESSRLMFEYQTLLEEPQYGENMEIYAGKKNNWVRIFENGKKDDFIHNKIINSYV

SEQ ID NO: 18153 - protein, 256 aa, Artificial Sequence
  Synthetic polypeptide
LDPKLFAGESSFVWFADKSQARRTSSCTWNQLSPEEEEKRRIRRERNKLAAAKCRNRRRELTEKLQAIGPWQVAVPHIPLFPWQETEELEEEKSGLQKEIAELQKEKEKLEFMLVAHGPVCKISPEERRSPPAPGLQPMRSGGGSVGAVVVKQEPLEEDSPSSSSAGLDKAQRSVIKPISIAGGFYGEEPLHTPIVVTSTPAVTPGTSNLVFTYPSVLEQESPASPSESCSKAHRRSSSSGDQSSDSLNSPTLLAL

SEQ ID NO: 18154 - protein, 59 aa, Artificial Sequence
  Synthetic polypeptide
ILSSLQGNLPLFGSQINPKPVELHLAHGTSCLLKRRRSVASGGRGTSWLQPSAGTDAGS

SEQ ID NO: 18155 - protein, 59 aa, Artificial Sequence; identical to SEQ ID NO: 18154
  Synthetic polypeptide

SEQ ID NO: 18156 - protein, 59 aa, Artificial Sequence; identical to SEQ ID NO: 18154
  Synthetic polypeptide

SEQ ID NO: 18157 - protein, 59 aa, Artificial Sequence; identical to SEQ ID NO: 18154
  Synthetic polypeptide

SEQ ID NO: 18158 - protein, 11 aa, Artificial Sequence
  Synthetic polypeptide
NFILHMEPAVS

SEQ ID NO: 18159 - protein, 11 aa, Artificial Sequence
  Synthetic polypeptide
NFILHMEPAVS

SEQ ID NO: 18160 - protein, 11 aa, Artificial Sequence
  Synthetic polypeptide
NFILHMEPAVS

SEQ ID NO: 18161 - protein, 11 aa, Artificial Sequence
  Synthetic polypeptide
NFILHMEPAVS

SEQ ID NO: 18162 - protein, 239 aa, Artificial Sequence
  Synthetic polypeptide
LDPKLFAGESSFVWFADKSQARRTSSCTWNQLSPEEEEKRRIRRERNKLAAAKCRNRRRELTEKLQAETEELEEEKSGLQKEIAELQKEKEKLEFMLVAHGPVCKISPEERRSPPAPGLQPMRSGGGSVGAVVVKQEPLEEDSPSSSSAGLDKAQRSVIKPISIAGGFYGEEPLHTPIVVTSTPAVTPGTSNLVFTYPSVLEQESPASPSESCSKAHRRSSSSGDQSSDSLNSPTLLAL

SEQ ID NO: 18163 - protein, 239 aa, Artificial Sequence; identical to SEQ ID NO: 18162
  Synthetic polypeptide

SEQ ID NO: 18164 - protein, 154 aa, Artificial Sequence
  Synthetic polypeptide
LDPKLFAGESSFVWFADKSQARRTSSCTWNQLSPEEEEKRRIRRERNKLAAAKCRNRRRELTEKLQAETEELEEEKSGLQKEIAELQKEKEKLEFMLVAHGPVCKISPEERRSPPAPGLQPMRSGGGSVGAVVVKQEPLEEDSPSSSSAGLDKA

SEQ ID NO: 18165 - protein, 97 aa, Artificial Sequence
  Synthetic polypeptide
ISQAWWHTPVVSATQEAEVVEDGYEFFAKRQLVTLFSAPNYCGEFDNAGGMMSVDETLMCSFQILKPSEKKAKYQYGGLNSGRPVTPPRTANPPKKR

SEQ ID NO: 18166 - protein, 97 aa, Artificial Sequence; identical to SEQ ID NO: 18165
  Synthetic polypeptide

SEQ ID NO: 18167 - protein, 97 aa, Artificial Sequence; identical to SEQ ID NO: 18165
  Synthetic polypeptide

SEQ ID NO: 18168 - protein, 32 aa, Artificial Sequence
  Synthetic polypeptide
LARHGGTHLWSQLLRRLRWWKMDMNFLLNDSW

SEQ ID NO: 18169 - protein, 32 aa, Artificial Sequence; identical to SEQ ID NO: 18168
  Synthetic polypeptide

SEQ ID NO: 18170 - protein, 32 aa, Artificial Sequence; identical to SEQ ID NO: 18168
  Synthetic polypeptide

SEQ ID NO: 18171 - protein, 45 aa, Artificial Sequence
  Synthetic polypeptide
SELCFPHVQNENNTCQNFLSLILMMHHARKFFLIPKLQFQNYLPF

SEQ ID NO: 18172 - protein, 45 aa, Artificial Sequence; identical to SEQ ID NO: 18171
  Synthetic polypeptide

SEQ ID NO: 18173 - protein, 45 aa, Artificial Sequence; identical to SEQ ID NO: 18171
  Synthetic polypeptide

SEQ ID NO: 18174 - protein, 45 aa, Artificial Sequence; identical to SEQ ID NO: 18171
  Synthetic polypeptide

SEQ ID NO: 18175 - protein, 45 aa, Artificial Sequence; identical to SEQ ID NO: 18171
  Synthetic polypeptide

SEQ ID NO: 18176 - protein, 45 aa, Artificial Sequence; identical to SEQ ID NO: 18171
  Synthetic polypeptide

SEQ ID NO: 18177 - protein, 30 aa, Artificial Sequence
  Synthetic polypeptide
LCDVELVLFSLSFAFLMCKMRIIPARIFFL

SEQ ID NO: 18178 - protein, 30 aa, Artificial Sequence; identical to SEQ ID NO: 18177
  Synthetic polypeptide

SEQ ID NO: 18179 - protein, 30 aa, Artificial Sequence; identical to SEQ ID NO: 18177
  Synthetic polypeptide

SEQ ID NO: 18180 - protein, 30 aa, Artificial Sequence; identical to SEQ ID NO: 18177
  Synthetic polypeptide

SEQ ID NO: 18181 - protein, 30 aa, Artificial Sequence; identical to SEQ ID NO: 18177
  Synthetic polypeptide

SEQ ID NO: 18182 - protein, 30 aa, Artificial Sequence; identical to SEQ ID NO: 18177
  Synthetic polypeptide

SEQ ID NO: 18183 - protein, 558 aa, Artificial Sequence
  Synthetic polypeptide
YLPEFSFFDPNDASCQEILFDPKTSVSELFAILRQWVPQVQQNIDIIGNEILKRGCNVNDRDGLTDMTLLHYTCKSGAHGIGDVETAVKFATQLIDLGADISLRSRWTNMNALHYAAYFDVPELIRVILKTSKPKDVDATCSDFNFGTALHIAAYNLCAGAVKCLLEQGANPAFRNDKGQIPADVVPDPVDMPLEMADAAATAKEIKQMLLDAVPLSCNISKAMLPNYDHVTGKAMLTSLGLKLGDRVVIAGQKVGTLRFCGTTEFASGQWAGIELDEPEGKNNGSVGKVQYFKCAPKYGIFAPLSKISKAKGRRKNITHTPSTKAAVPLIRSQKIDVAHVTSKVNTGLMTSKKDSASESTLSLPPGEELKTVTEKDVALLGSVSSCSSTSSLEHRQSYPKKQNAISSNKKTMSKSPSLSSRASAGLNSSATSTANNSRCEGELRLGERVLVVGQRLGTIRFFGTTNFAPGYWYGIELEKPHGKNDGSVGGVQYFSCSPRYGIFAPPSRVQRVTDSLDTLSEISSNKQNHSYPGFRRSFSTTSASSQKEINRRNAFSK

SEQ ID NO: 18184 - protein, 454 aa, Artificial Sequence
  Synthetic polypeptide
YLPEFSFFDPNDASCQEILFDPKTSVSELFAILRQWVPQVQQNIDIIGNEILKRGCNVNDRDGLTDMTLLHYTCKSGAHGIGDVETAVKFATQLIDLGADISLRSRWTNMNALHYAAYFDVPELIRVILKTSKPKDVDATCSDFNFGTALHIAAYNLCAGAVKCLLEQGANPAFRNDKGQIPADVVPDPVDMPLEMADAAATAKEIKQMLLDAVPLSCNISKAMLPNYDHVTGKAMLTSLGLKLGDRVVIAGQKVGTLRFCGTTEFASGQWAGIELDEPEGKNNGSVGKVQYFKCAPKYGIFAPLSKISKAKGRRKNITHTPSTKAAVPLIRSQKIDVAHVTSKVNTGLMTSKKDSASESTLSLPPGEELKTVTEKDVALLGSVSSCSSTSSLEHRQSYPKKQNAISSNKKTMSKSPSLSSRASAGIYGFFNQAFLVFFILVCLFEFLSNIYSK

SEQ ID NO: 18185 - protein, 664 aa, Artificial Sequence
  Synthetic polypeptide
YLPEFSFFDPNDASCQEILFDPKTSVSELFAILRQWVPQVQQNIDIIGNEILKRGCNVNDRDGLTDMTLLHYTCKSGAHGIGDVETAVKFATQLIDLGADISLRSRWTNMNALHYAAYFDVPELIRVILKTSKPKDVDATCSDFNFGTALHIAAYNLCAGAVKCLLEQGANPAFRNDKGQIPADVVPDPVDMPLEMADAAATAKEIKQMLLDAVPLSCNISKAMLPNYDHVTGKAMLTSLGLKLGDRVVIAGQKVGTLRFCGTTEFASGQWAGIELDEPEGKNNGSVGKVQYFKCAPKYGIFAPLSKISKAKGRRKNITHTPSTKAAVPLIRSQKIDVAHVTSKVNTGLMTSKKDSASESTLSLPPGEELKTVTEKDVALLGSVSSCSSTSSLEHRQSYPKKQNAISSNKKTMSKSPSLSSRASAGLNSSATSTANNSRCEGELRLGERVLVVGQRLGTIRFFGTTNFAPGYWYGIELEKPHGKNDGSVGGVQYFSCSPRYGIFAPPSRVQRVTDSLDTLSEISSNKQNHSYPGFRRSFSTTSASSQKEINRRNAFSKSKAALRRSWSSTPTAGGIEGSVKLHEGSQVLLTSSNEMGTVRYVGPTDFASGIWLGLELRSAKGKNDGSVGDKRYFTCKPNHGVLVRPSRVTYRGINGSKLVDENC

SEQ ID NO: 18186 - protein, 664 aa, Artificial Sequence; identical to SEQ ID NO: 18185
  Synthetic polypeptide

SEQ ID NO: 18187 - protein, 56 aa, Artificial Sequence
  Synthetic polypeptide
YLPEFSFFDPNDASCQEILFDPKTSVSELFAILRQWVPQVQQNIDIIGNEVMWKQL

SEQ ID NO: 18188 - protein, 173 aa, Artificial Sequence
  Synthetic polypeptide
YLPEFSFFDPNDASCQEILFDPKTSVSELFAILRQWVPQVQQNIDIIGNEILKRGCNVNDRDGLTDMTLLHYTCKSGAHGIGDVETAVKFATQLIDLGADISLRSRWTNMNALHYAAYFDVPELIRVILKTSKPKDVDATCSDFNFGTALHIAAYNLCAGAVKCLLEQGANPA

SEQ ID NO: 18189 - protein, 45 aa, Artificial Sequence
  Synthetic polypeptide
DLIRSDGFIRGFSPFARHFSLLPPCEEGCVCFRFHHDYLPRPVRF

SEQ ID NO: 18190 - protein, 45 aa, Artificial Sequence; identical to SEQ ID NO: 18189
  Synthetic polypeptide

SEQ ID NO: 18191 - protein, 45 aa, Artificial Sequence; identical to SEQ ID NO: 18189
  Synthetic polypeptide

SEQ ID NO: 18192 - protein, 45 aa, Artificial Sequence; identical to SEQ ID NO: 18189
  Synthetic polypeptide

SEQ ID NO: 18193 - protein, 90 aa, Artificial Sequence
  Synthetic polypeptide
GAFLPLLGTSLSCHLVKKDVFASASTMIIFPDPSDFDRCCKLKDRLPSIVVEPTEGEVESGELRWPPEEFLVQEDEQDNCEETAKENKEQ

SEQ ID NO: 18194 - protein, 90 aa, Artificial Sequence; identical to SEQ ID NO: 18193
  Synthetic polypeptide

SEQ ID NO: 18195 - protein, 90 aa, Artificial Sequence; identical to SEQ ID NO: 18193
  Synthetic polypeptide

SEQ ID NO: 18196 - protein, 36 aa, Artificial Sequence
  Synthetic polypeptide
GAFLPLLGTSLSCHLVKKDVFASASTMIIFPDPSDF

SEQ ID NO: 18197 - protein, 257 aa, Artificial Sequence
  Synthetic polypeptide
SDRPSGMQEAACPRCEISFRVWMCGGSLEIVPCSRVGHVFRKKHPYVFPDGNANTYIKNTKRTAEVWMDEYKQYYYAARPFALERPFGNVESRLDLRKNLRCQSFKWYLENIYPELSIPKESSIQKGNIRQRQKCLESQRQNNQETPNLKLSPCAKVKGEDAKSQVWAFTYTQQILQEELCLSVITLFPGAPVVLVLCKNGDDRQQWTKTGSHIEHIASHLCLDTDMFGDGTENGKEIVVNPCESSLMSQHWDMVSS

SEQ ID NO: 18198 - protein, 257 aa, Artificial Sequence; identical to SEQ ID NO: 18197
  Synthetic polypeptide

SEQ ID NO: 18199 - protein, 257 aa, Artificial Sequence; identical to SEQ ID NO: 18197
  Synthetic polypeptide

SEQ ID NO: 18200 - protein, 257 aa, Artificial Sequence; identical to SEQ ID NO: 18197
  Synthetic polypeptide

SEQ ID NO: 18201 - protein, 257 aa, Artificial Sequence; identical to SEQ ID NO: 18197
  Synthetic polypeptide

SEQ ID NO: 18202 - protein, 27 aa, Artificial Sequence
  Synthetic polypeptide
VTGPVGCRKQPALAVKSPSECGCAGAA

SEQ ID NO: 18203 - protein, 27 aa, Artificial Sequence
  Synthetic polypeptide
VTGPVGCRKQPALAVKSPSECGCAGAA

SEQ ID NO: 18204 - protein, 27 aa, Artificial Sequence
  Synthetic polypeptide
VTGPVGCRKQPALAVKSPSECGCAGAA

SEQ ID NO: 18205 - protein, 27 aa, Artificial Sequence
  Synthetic polypeptide
VTGPVGCRKQPALAVKSPSECGCAGAA

SEQ ID NO: 18206 - protein, 27 aa, Artificial Sequence
  Synthetic polypeptide
VTGPVGCRKQPALAVKSPSECGCAGAA

SEQ ID NO: 18207 - protein, 27 aa, Artificial Sequence
  Synthetic polypeptide
VTGPVGCRKQPALAVKSPSECGCAGAA

SEQ ID NO: 18208 - protein, 138 aa, Artificial Sequence
  Synthetic polypeptide
SDRPSGMQEAACPRCEISFRVWMCGGSLEIVPCSRVGHVFRKKHPYVFPDGNANTYIKNTKRTAEVWMDEYKQYYYAARPFALERPFGNVESRLDLRKNLRCQSFKWYLENIYPELSIPKESSIQKGNIRQRQKCLES

SEQ ID NO: 18209 - protein, 1320 aa, Artificial Sequence
  Synthetic polypeptide
QVVEKNADPETTLLAYLRRKLGLSGTKLGCGEGGCGACTVMLSKYDRLQNKIVHFSANACLAPICSLHHVAVTTVEGIGSTKTRLHPVQERIAKSHGSQCGFCTPGIVMSMYTLLRNQPEPTMEEIENAFQGNLCRCTGYRPILQGFRTFARDGGCCGGDGNNPNCCMNQKKDHSVSLSPSLFKPEEFTPLDPTQEPIFPPELLRLKDTPRKQLRFEGERVTWIQASTLKELLDLKAQHPDAKLVVGNTEIGIEMKFKNMLFPMIVCPAWIPELNSVEHGPDGISFGAACPLSIVEKTLVDAVAKLPAQKTEVFRGVLEQLRWFAGKQVKSVASVGGNIITASPISDLNPVFMASGAKLTLVSRGTRRTVQMDHTFFPGYRKTLLSPEEILLSIEIPYSREGEYFSAFKQASRREDDIAKVTSGMRVLFKPGTTEVQELALCYGGMANRTISALKTTQRQLSKLWKEELLQDVCAGLAEELHLPPDAPGGMVDFRCTLTLSFFFKFYLTVLQKLGQENLEDKCGKLDPTFASATLLFQKDPPADVQLFQEVPKGQSEEDMVGRPLPHLAADMQASGEAVYCDDIPRYENELSLRLVTSTRAHAKIKSIDTSEAKKVPGFVCFISADDVPGSNITGICNDETVFAKDKVTCVGHIIGAVVADTPEHTQRAAQGVKITYEELPAIITIEDAIKNNSFYGPELKIEKGDLKKGFSEADNVVSGEIYIGGQEHFYLETHCTIAVPKGEAGEMELFVSTQNTMKTQSFVAKMLGVPANRIVVRVKRMGGGFGGKETRSTVVSTAVALAAYKTGRPVRCMLDRDEDMLITGGRHPFLARYKVGFMKTGTVVALEVDHFSNVGNTQDLSQSIMERALFHMDNCYKIPNIRGTGRLCKTNLPSNTAFRGFGGPQGMLIAECWMSEVAVTCGMPAEEVRRKNLYKEGDLTHFNQKLEGFTLPRCWEECLASSQYHARKSEVDKFNKENCWKKRGLCIIPTKFGISFTVPFLNQAGALLHVYTDGSVLLTHGGTEMGQGLHTKMVQVASRALKIPTSKIYISETSTNTVPNTSPTAASVSADLNGQAVYAACQTILKRLEPYKKKNPSGSWEDWVTAAYMDTVSLSATGFYRTPNLGYSFETNSGNPFHYFSYGVACSEVEIDCLTGDHKNLRTDIVMDVGSSLNPAIDIGQVEGAFVQGLGLFTLEELHYSPEGSLHTRGPSTYKIPAFGSIPIEFRVSLLRDCPNKKAIYASKAVGEPPLFLAASIFFAIKDAIRAARAQHTGNNVKELFRLDSPATPEKIRNACVDKFTTLCVTGVPENCKPWSVRV

SEQ ID NO: 18210 - protein, 35 aa, Artificial Sequence
  Synthetic polypeptide
QHFGRLRWVDHLRSGVRDQLGQRGVGVCPVPYISS

SEQ ID NO: 18211 - protein, 178 aa, Artificial Sequence
  Synthetic polypeptide
GQEFETSLANVVLVSVQSLILVAEPYFNEPGYERSRGTPSGTQSSREYDGNIRQATVKWAMLEQIRNPSPCFKEVIHKHFYLKRVEIMAQCEEWIADIQQYSSDKRVGRTMSHHAAALKRHTAQLREELLKLPCPEGLDPDTDDAPEVCRATTGAEETLMHDQVKPSSSKELPSDFQL

SEQ ID NO: 18212 - protein, 32 aa, Artificial Sequence
  Synthetic polypeptide
ALWEAEMGGSFEVRSSRPAWPTWCWCLSSPLY

SEQ ID NO: 18213 - protein, 27 aa, Artificial Sequence
  Synthetic polypeptide
KYKKLAGHGEKVQWEACRLYRSEENSA

SEQ ID NO: 18214 - protein, 27 aa, Artificial Sequence
  Synthetic polypeptide
KYKKLAGHGEKVQWEACRLYRSEENSA

SEQ ID NO: 18215 - protein, 27 aa, Artificial Sequence
  Synthetic polypeptide
KYKKLAGHGEKVQWEACRLYRSEENSA

SEQ ID NO: 18216 - protein, 27 aa, Artificial Sequence
  Synthetic polypeptide
KYKKLAGHGEKVQWEACRLYRSEENSA

SEQ ID NO: 18217 - protein, 114 aa, Artificial Sequence
  Synthetic polypeptide
PDMVKKFSGKHVVFIAQRRILPKPTRKSRTKNKQKRPRSRTLTAVHDAILEDLVFPSEIVGKRIRVKLDGSRLIKVHLDKAQQNNVEHKVETFSGVYKKLTGKDVNFEFPEFQL

SEQ ID NO: 18218 - protein, 114 aa, Artificial Sequence; identical to SEQ ID NO: 18217
  Synthetic polypeptide

SEQ ID NO: 18219 - protein, 114 aa, Artificial Sequence; identical to SEQ ID NO: 18217
  Synthetic polypeptide

SEQ ID NO: 18220 - protein, 107 aa, Artificial Sequence
  Synthetic polypeptide
PDMVKKFSGKHVVFIAQRRILPKPTRKSRTKNKQKRPRSRTLTAVHDAILEDLVFPSEIVGKRIRVKLDGSRLIKVHLDKAQQNNVEHKVIGQHFIMERFSHSESGF

SEQ ID NO: 18221 - protein, 15 aa, Artificial Sequence
  Synthetic polypeptide
VCEPLSGCGGHVWAG

SEQ ID NO: 18222 - protein, 15 aa, Artificial Sequence
  Synthetic polypeptide
VCEPLSGCGGHVWAG

SEQ ID NO: 18223 - protein, 15 aa, Artificial Sequence
  Synthetic polypeptide
VCEPLSGCGGHVWAG

SEQ ID NO: 18224 - protein, 15 aa, Artificial Sequence
  Synthetic polypeptide
VCEPLSGCGGHVWAG

SEQ ID NO: 18225 - protein, 15 aa, Artificial Sequence
  Synthetic polypeptide
VCEPLSGCGGHVWAG

SEQ ID NO: 18226 - protein, 67 aa, Artificial Sequence
  Synthetic polypeptide
CVSLYPAVEVTSGPGDVLHGKLSAPDEGLCAGRGGVSFGYQVLPRARAPAAQRHRPDFPADWRHKNS

SEQ ID NO: 18227 - protein, 67 aa, Artificial Sequence; identical to SEQ ID NO: 18226
  Synthetic polypeptide

SEQ ID NO: 18228 - protein, 16 aa, Artificial Sequence
  Synthetic polypeptide
CVSLYPAVEVTSGPGD

SEQ ID NO: 18229 - protein, 69 aa, Artificial Sequence
  Synthetic polypeptide
CVSLYPAVEVTSGPGDVLHGKLSAPDEGLCAGRGGVSFGYQVLPRARAPAAQRHRPDFPAARSFTSGRI

SEQ ID NO: 18230 - protein, 68 aa, Artificial Sequence
  Synthetic polypeptide
CVSLYPAVEVTSGPGDVLHGKLSAPDEGLCAGRGGVSFGYQVLPRARAPAAQRHRPDFPAADWRHKNS

SEQ ID NO: 18231 - protein, 204 aa, Artificial Sequence
  Synthetic polypeptide
NHLTPTPQRRIILAFLSSQQLTAMDCRTLRLENTLKWPLPICNGFRATKVMRNPKTVTEKQIGDIKTAEKYFQDVEKVTQKLDGLQGKIMVLMNSAFLHLGQNNFAEAHRFFTEILRMDPRNAVANNNAAVCLLYLGKLKDSLRQLEAMVQQDPRHYLHESVLFNLTTMYELESSRSMQKKQALLEAVAGKEGDSFNTQCLKLA

SEQ ID NO: 18232 - protein, 204 aa, Artificial Sequence; identical to SEQ ID NO: 18231
  Synthetic polypeptide

SEQ ID NO: 18233 - protein, 204 aa, Artificial Sequence; identical to SEQ ID NO: 18231
  Synthetic polypeptide

SEQ ID NO: 18234 - protein, 7 aa, Artificial Sequence
  Synthetic polypeptide
QRSRLET

SEQ ID NO: 18235 - protein, 7 aa, Artificial Sequence
  Synthetic polypeptide
QRSRLET

SEQ ID NO: 18236 - protein, 7 aa, Artificial Sequence
  Synthetic polypeptide
QRSRLET

SEQ ID NO: 18237 - protein, 25 aa, Artificial Sequence
  Synthetic polypeptide
WLPCHQGDEESQNCDREADWRHKNS

SEQ ID NO: 18238 - protein, 25 aa, Artificial Sequence
  Synthetic polypeptide
WLPCHQGDEESQNCDREADWRHKNS

SEQ ID NO: 18239 - protein, 25 aa, Artificial Sequence
  Synthetic polypeptide
WLPCHQGDEESQNCDREADWRHKNS

SEQ ID NO: 18240 - protein, 126 aa, Artificial Sequence
  Synthetic polypeptide
GRAPWLRPVIPARGGGGGWITVETSLGNMRRILPKPTRKSRTKNKQKRPRSRTLTAVHDAILEDLVFPSEIVGKRIRVKLDGSRLIKVHLDKAQQNNVEHKVETFSGVYKKLTGKDVNFEFPEFQL

SEQ ID NO: 18241 - protein, 126 aa, Artificial Sequence; identical to SEQ ID NO: 18240
  Synthetic polypeptide

SEQ ID NO: 18242 - protein, 126 aa, Artificial Sequence; identical to SEQ ID NO: 18240
  Synthetic polypeptide

SEQ ID NO: 18243 - protein, 27 aa, Artificial Sequence
  Synthetic polypeptide
ACNPSTGRWRRVDHCRDQPGQHEENSA

SEQ ID NO: 18244 - protein, 27 aa, Artificial Sequence
  Synthetic polypeptide
ACNPSTGRWRRVDHCRDQPGQHEENSA

SEQ ID NO: 18245 - protein, 27 aa, Artificial Sequence
  Synthetic polypeptide
ACNPSTGRWRRVDHCRDQPGQHEENSA

SEQ ID NO: 18246 - protein, 27 aa, Artificial Sequence
  Synthetic polypeptide
ACNPSTGRWRRVDHCRDQPGQHEENSA

SEQ ID NO: 18247 - protein, 119 aa, Artificial Sequence
  Synthetic polypeptide
GRAPWLRPVIPARGGGGGWITVETSLGNMRRILPKPTRKSRTKNKQKRPRSRTLTAVHDAILEDLVFPSEIVGKRIRVKLDGSRLIKVHLDKAQQNNVEHKVIGQHFIMERFSHSESGF

SEQ ID NO: 18248 - protein, 27 aa, Artificial Sequence
  Synthetic polypeptide
GRALWLTPVIPALWEAEAGGSREENSA

SEQ ID NO: 18249 - protein, 27 aa, Artificial Sequence
  Synthetic polypeptide
GRALWLTPVIPALWEAEAGGSREENSA

SEQ ID NO: 18250 - protein, 27 aa, Artificial Sequence
  Synthetic polypeptide
GRALWLTPVIPALWEAEAGGSREENSA

SEQ ID NO: 18251 - protein, 27 aa, Artificial Sequence
  Synthetic polypeptide
GRALWLTPVIPALWEAEAGGSREENSA

SEQ ID NO: 18252 - protein, 110 aa, Artificial Sequence
  Synthetic polypeptide
SQHFGRLRQADHERRILPKPTRKSRTKNKQKRPRSRTLTAVHDAILEDLVFPSEIVGKRIRVKLDGSRLIKVHLDKAQQNNVEHKVETFSGVYKKLTGKDVNFEFPEFQL

SEQ ID NO: 18253 - protein, 110 aa, Artificial Sequence; identical to SEQ ID NO: 18252
  Synthetic polypeptide

SEQ ID NO: 18254 - protein, 110 aa, Artificial Sequence; identical to SEQ ID NO: 18252
  Synthetic polypeptide

SEQ ID NO: 18255 - protein, 30 aa, Artificial Sequence
  Synthetic polypeptide
GRRITRGEFCLSQLEKAVQKISKSVPGAVL

SEQ ID NO: 18256 - protein, 30 aa, Artificial Sequence; identical to SEQ ID NO: 18255
  Synthetic polypeptide

SEQ ID NO: 18257 - protein, 30 aa, Artificial Sequence; identical to SEQ ID NO: 18255
  Synthetic polypeptide

SEQ ID NO: 18258 - protein, 30 aa, Artificial Sequence; identical to SEQ ID NO: 18255
  Synthetic polypeptide

SEQ ID NO: 18259 - protein, 103 aa, Artificial Sequence
  Synthetic polypeptide
SQHFGRLRQADHERRILPKPTRKSRTKNKQKRPRSRTLTAVHDAILEDLVFPSEIVGKRIRVKLDGSRLIKVHLDKAQQNNVEHKVIGQHFIMERFSHSESGF

SEQ ID NO: 18260 - protein, 130 aa, Artificial Sequence
  Synthetic polypeptide
GRALWLTPVIPALWEAEAGGSRGQEIETILADTRRILPKPTRKSRTKNKQKRPRSRTLTAVHDAILEDLVFPSEIVGKRIRVKLDGSRLIKVHLDKAQQNNVEHKVETFSGVYKKLTGKDVNFEFPEFQL

SEQ ID NO: 18261 - protein, 130 aa, Artificial Sequence; identical to SEQ ID NO: 18260
  Synthetic polypeptide

SEQ ID NO: 18262 - protein, 130 aa, Artificial Sequence; identical to SEQ ID NO: 18260
  Synthetic polypeptide

SEQ ID NO: 18263 - protein, 48 aa, Artificial Sequence
  Synthetic polypeptide
SQHFGRLRQADHEVRRSRPSWLTRGEFCLSQLEKAVQKISKSVPGAVL

SEQ ID NO: 18264 - protein, 48 aa, Artificial Sequence; identical to SEQ ID NO: 18263
  Synthetic polypeptide

SEQ ID NO: 18265 - protein, 48 aa, Artificial Sequence; identical to SEQ ID NO: 18263
  Synthetic polypeptide

SEQ ID NO: 18266 - protein, 48 aa, Artificial Sequence; identical to SEQ ID NO: 18263
  Synthetic polypeptide

SEQ ID NO: 18267 - protein, 6 aa, Artificial Sequence
  Synthetic polypeptide
HEENSA

SEQ ID NO: 18268 - protein, 6 aa, Artificial Sequence
  Synthetic polypeptide
HEENSA

SEQ ID NO: 18269 - protein, 6 aa, Artificial Sequence
  Synthetic polypeptide
HEENSA

SEQ ID NO: 18270 - protein, 6 aa, Artificial Sequence
  Synthetic polypeptide
HEENSA

SEQ ID NO: 18271 - protein, 123 aa, Artificial Sequence
  Synthetic polypeptide
GRALWLTPVIPALWEAEAGGSRGQEIETILADTRRILPKPTRKSRTKNKQKRPRSRTLTAVHDAILEDLVFPSEIVGKRIRVKLDGSRLIKVHLDKAQQNNVEHKVIGQHFIMERFSHSESGF

SEQ ID NO: 18272 - protein, 24 aa, Artificial Sequence
  Synthetic polypeptide
IRQVRPQKPIRGHLFQGQLHSRSL

SEQ ID NO: 18273 - protein, 24 aa, Artificial Sequence
  Synthetic polypeptide
IRQVRPQKPIRGHLFQGQLHSRSL

SEQ ID NO: 18274 - protein, 24 aa, Artificial Sequence
  Synthetic polypeptide
IRQVRPQKPIRGHLFQGQLHSRSL

SEQ ID NO: 18275 - protein, 24 aa, Artificial Sequence
  Synthetic polypeptide
IRQVRPQKPIRGHLFQGQLHSRSL

SEQ ID NO: 18276 - protein, 24 aa, Artificial Sequence
  Synthetic polypeptide
IRQVRPQKPIRGHLFQGQLHSRSL

SEQ ID NO: 18277 - protein, 48 aa, Artificial Sequence
  Synthetic polypeptide
AEHSGLHLSSQSFGRLRWKNCLRPGVQDQPRQHRKMLSLQKKNFKLGR

SEQ ID NO: 18278 - protein, 48 aa, Artificial Sequence; identical to SEQ ID NO: 18277
  Synthetic polypeptide

SEQ ID NO: 18279 - protein, 48 aa, Artificial Sequence; identical to SEQ ID NO: 18277
  Synthetic polypeptide

SEQ ID NO: 18280 - protein, 48 aa, Artificial Sequence; identical to SEQ ID NO: 18277
  Synthetic polypeptide

SEQ ID NO: 18281 - protein, 48 aa, Artificial Sequence; identical to SEQ ID NO: 18277
  Synthetic polypeptide

SEQ ID NO: 18282 - protein, 532 aa, Artificial Sequence
  Synthetic polypeptide
AGETTKAYQRPPIPGTTAQPVTLMQLLAVTVAVATPTTLPRPSPSAASTTSIPRPQSVGHRSQEMDLWSTATYTSSQNRPRADPGIQRQDPSGAAFQKPVGADVSLGEMDSWKPGSVLLDEGLVPKEELSTQSLEPVSLGDPNCKIDLSFLIDGSTSIGKRRFRIQKQLLADVAQALDIGPAGPLMGVVQYGDNPATHFNLKTHTNSRDLKTAIEKITQRGGLSNVGRAISFVTKNFFSKANGNRSGAPNVVVVMVDGWPTDKVEEASRLARESGINIFFITIEGAAENEKQYVVEPNFANKAVCRTNGFYSLHVQSWFGLHKTLQPLVKRVCDTDRLACSKTCLNSADIGFVIDGSSSVGTGNFRTVLQFVTNLTKEFEISDTDTRIGAVQYTYEQRLEFGFDKYSSKPDILNAIKRVGYWSGGTSTGAAINFALEQLFKKSKPNKRKLMILITDGRSYDDVRIPAMAAHLKGVITYAIGVAWAAQEELEVIATHPARDHSFFVDEFDNLHQYVPRIIQNICTEFNSQPRN

SEQ ID NO: 18283 - protein, 517 aa, Artificial Sequence
  Synthetic polypeptide
AGETTKAYQRPPIPGTTAQPVTLMQLLAVTVAVATPTTLPRPSPSAASTTSIPRPQSVGHRSQEMDLWSTATYTSSQNRPRADPGIQRQDPSGAAFQKPVGADVSLGLVPKEELSTQSLEPVSLGDPNCKIDLSFLIDGSTSIGKRRFRIQKQLLADVAQALDIGPAGPLMGVVQYGDNPATHFNLKTHTNSRDLKTAIEKITQRGGLSNVGRAISFVTKNFFSKANGNRSGAPNVVVVMVDGWPTDKVEEASRLARESGINIFFITIEGAAENEKQYVVEPNFANKAVCRTNGFYSLHVQSWFGLHKTLQPLVKRVCDTDRLACSKTCLNSADIGFVIDGSSSVGTGNFRTVLQFVTNLTKEFEISDTDTRIGAVQYTYEQRLEFGFDKYSSKPDILNAIKRVGYWSGGTSTGAAINFALEQLFKKSKPNKRKLMILITDGRSYDDVRIPAMAAHLKGVITYAIGVAWAAQEELEVIATHPARDHSFFVDEFDNLHQYVPRIIQNICTEFNSQPRN

SEQ ID NO: 18284 - protein, 491 aa, Artificial Sequence
  Synthetic polypeptide
AGETTKAYQRPPIPGTTAQPVTLMQLLAVTVAVATPTTLPRPSPSAASTTSIPRPQSVGHRSQEMGEMDSWKPGSVLLDEGLVPKEELSTQSLEPVSLGDPNCKIDLSFLIDGSTSIGKRRFRIQKQLLADVAQALDIGPAGPLMGVVQYGDNPATHFNLKTHTNSRDLKTAIEKITQRGGLSNVGRAISFVTKNFFSKANGNRSGAPNVVVVMVDGWPTDKVEEASRLARESGINIFFITIEGAAENEKQYVVEPNFANKAVCRTNGFYSLHVQSWFGLHKTLQPLVKRVCDTDRLACSKTCLNSADIGFVIDGSSSVGTGNFRTVLQFVTNLTKEFEISDTDTRIGAVQYTYEQRLEFGFDKYSSKPDILNAIKRVGYWSGGTSTGAAINFALEQLFKKSKPNKRKLMILITDGRSYDDVRIPAMAAHLKGVITYAIGVAWAAQEELEVIATHPARDHSFFVDEFDNLHQYVPRIIQNICTEFNSQPRN

SEQ ID NO: 18285 - protein, 495 aa, Artificial Sequence
  Synthetic polypeptide
AGETTKAYQRPPIPGTTAQPVTLMQLLAVTVAVATPTTLPRPSPSAASTTSIPRPQSVGHRSQEMDLWSTATYTSSQNRPRADPGLVPKEELSTQSLEPVSLGDPNCKIDLSFLIDGSTSIGKRRFRIQKQLLADVAQALDIGPAGPLMGVVQYGDNPATHFNLKTHTNSRDLKTAIEKITQRGGLSNVGRAISFVTKNFFSKANGNRSGAPNVVVVMVDGWPTDKVEEASRLARESGINIFFITIEGAAENEKQYVVEPNFANKAVCRTNGFYSLHVQSWFGLHKTLQPLVKRVCDTDRLACSKTCLNSADIGFVIDGSSSVGTGNFRTVLQFVTNLTKEFEISDTDTRIGAVQYTYEQRLEFGFDKYSSKPDILNAIKRVGYWSGGTSTGAAINFALEQLFKKSKPNKRKLMILITDGRSYDDVRIPAMAAHLKGVITYAIGVAWAAQEELEVIATHPARDHSFFVDEFDNLHQYVPRIIQNICTEFNSQPRN

SEQ ID NO: 18286 - protein, 496 aa, Artificial Sequence
  Synthetic polypeptide
AGETTKAYQRPPIPGTTAQPVTLMQLLAVTVAVATPTTLPRPSPSAASTTSIPRPQSVGHRSQEMDLWSTATYTSSQNRPRADPGIQRQDPSGAAFQKPVGADVSLDCKIDLSFLIDGSTSIGKRRFRIQKQLLADVAQALDIGPAGPLMGVVQYGDNPATHFNLKTHTNSRDLKTAIEKITQRGGLSNVGRAISFVTKNFFSKANGNRSGAPNVVVVMVDGWPTDKVEEASRLARESGINIFFITIEGAAENEKQYVVEPNFANKAVCRTNGFYSLHVQSWFGLHKTLQPLVKRVCDTDRLACSKTCLNSADIGFVIDGSSSVGTGNFRTVLQFVTNLTKEFEISDTDTRIGAVQYTYEQRLEFGFDKYSSKPDILNAIKRVGYWSGGTSTGAAINFALEQLFKKSKPNKRKLMILITDGRSYDDVRIPAMAAHLKGVITYAIGVAWAAQEELEVIATHPARDHSFFVDEFDNLHQYVPRIIQNICTEFNSQPRN

SEQ ID NO: 18287 - protein, 32 aa, Artificial Sequence
  Synthetic polypeptide
GPRHFGPVWDNFDRLFQLQDSHGVGITTSQPF

SEQ ID NO: 18288 - protein, 99 aa, Artificial Sequence
  Synthetic polypeptide
VVDTGDALPRSAPREGPCSSCWRPAGPQPLAVKLFWLESRLQEITPWRCRDKAPDILAQYGTTLTVFFSFRTPMELELPPASHFEFIGSSANCRRHQYL

SEQ ID NO: 18289 - protein, 333 aa, Artificial Sequence
  Synthetic polypeptide
PSFSASGLPWSWNYHQPAILNSSALRQIAEGTSISEMWQNDLQPLLIERYPGSPGSYAARQHIMQRIQRLQADWVLEIDTFLSQTPYGYRSFSNIISTLNPTAKRHLVLACHYDSKYFSHWNNRVFVGATDSAVPCAMMLELARALDKKLLSLKTVSDSKPDLSLQLIFFDGEEAFLHWSPQDSLYGSRHLAAKMASTPHPPGARGTSQLHGMDLLVLLDLIGAPNPTFPNFFPNSARWFERLQAIEHELHELGLLKDHSLEGRYFQNYSYGGVIQDDHIPFLRRGVPVLHLIPSPFPEVWHTMDDNEENLDESTIDNLNKILQVFVLEYLHL

SEQ ID NO: 18290 - protein, 35 aa, Artificial Sequence
  Synthetic polypeptide
GASPPGSHPVREGGGGQPPPGQPPHPGGRNQGVCW

SEQ ID NO: 18291 - protein, 35 aa, Artificial Sequence; identical to SEQ ID NO: 18290
  Synthetic polypeptide

SEQ ID NO: 18292 - protein, 35 aa, Artificial Sequence; identical to SEQ ID NO: 18290
  Synthetic polypeptide

SEQ ID NO: 18293 - protein, 35 aa, Artificial Sequence; identical to SEQ ID NO: 18290
  Synthetic polypeptide

SEQ ID NO: 18294 - protein, 35 aa, Artificial Sequence; identical to SEQ ID NO: 18290
  Synthetic polypeptide

SEQ ID NO: 18295 - protein, 35 aa, Artificial Sequence; identical to SEQ ID NO: 18290
  Synthetic polypeptide

SEQ ID NO: 18296 - protein, 35 aa, Artificial Sequence; identical to SEQ ID NO: 18290
  Synthetic polypeptide

SEQ ID NO: 18297 - protein, 273 aa, Artificial Sequence
  Synthetic polypeptide
EVRSPSARQPPRLGSEERLRPAATPSGKEVGVSPRQASRPIREGETKVYVGNLGTGAGKGELERAFSYYGPLRTVWIARNPPGFAFVEFEDPRDAEDAVRGLDGKVICGSRVRVELSTGMPRRSRFDRPPARRPFDPNDRCYECGEKGHYAYDCHRYSRRRRSRSRSRSHSRSRGRRYSRSRSRSRGRRSRSASPRRSRSISLRRSRSASLRRSRSGSIKGSRYFQSPSRSRSRSRSISRPRSSRSKSRSPSPKRSRSPSGSPRRSASPERMD

SEQ ID NO: 18298 - protein, 59 aa, Artificial Sequence
  Synthetic polypeptide
GAPPPGSRPVWEVRSVSARQPPRPGRRWGSAPARPAAPSGREKPRCMLVTWELALAKES

SEQ ID NO: 18299 - protein, 59 aa, Artificial Sequence; identical to SEQ ID NO: 18298
  Synthetic polypeptide

SEQ ID NO: 18300 - protein, 59 aa, Artificial Sequence; identical to SEQ ID NO: 18298
  Synthetic polypeptide

SEQ ID NO: 18301 - protein, 59 aa, Artificial Sequence; identical to SEQ ID NO: 18298
  Synthetic polypeptide

SEQ ID NO: 18302 - protein, 59 aa, Artificial Sequence; identical to SEQ ID NO: 18298
  Synthetic polypeptide

SEQ ID NO: 18303 - protein, 59 aa, Artificial Sequence; identical to SEQ ID NO: 18298
  Synthetic polypeptide

SEQ ID NO: 18304 - protein, 59 aa, Artificial Sequence; identical to SEQ ID NO: 18298
  Synthetic polypeptide

SEQ ID NO: 18305 - protein, 172 aa, Artificial Sequence
  Synthetic polypeptide
EVRSPSARQPPRLGSEERLRPAATPSGKEVGVSPRQASRPIREGETKVYVGNLGTGAGKGELERAFSYYGPLRTVWIARNPPGFAFVEFEDPRDAEDAVRGLDGKVICGSRVRVELSTGMPRRSRFDRPPARRPFDPNDRCYECGEKGHYAYDCHRYSRRRRSRFLRLSQSP

SEQ ID NO: 18306 - protein, 172 aa, Artificial Sequence; identical to SEQ ID NO: 18305
  Synthetic polypeptide

SEQ ID NO: 18307 - protein, 261 aa, Artificial Sequence
  Synthetic polypeptide
EVRSPSARQPPRLGSEERLRPAATPSGKEVGVSPRQASRPIREGETKVYVGNLGTGAGKGELERAFSYYGPLRTVWIARNPPGFAFVEFEDPRDAEDAVRGLDGKVICGSRVRVELSTGMPRRSRFDRPPARRPFDPNDRCYECGEKGHYAYDCHRYSRRRRSRSRSRSHSRSRGRRYSRSRSRSRGRRSRSASPRRSRSISLRRSRSASLRRSRSGSIKGSRYFQSPSRSRSRSRSISRPRSSRSPSGSPRRSASPERMD

SEQ ID NO: 18308 - protein, 270 aa, Artificial Sequence
  Synthetic polypeptide
EVRSPSARQPPRLGSEERLRPAATPSGKEVGVSPRQASRPIREGETKVYVGNLGTGAGKGELERAFSYYGPLRTVWIARNPPGFAFVEFEDPRDAEDAVRGLDGKVICGSRVRVELSTGMPRRSRFDRPPARRPFDPNDRCYECGEKGHYAYDCHRYSRRRRSRSRSRSHSRSRGRRYSRSRSRSRGRRSRSASPRRSRSISLRRSRSASLRRSRSGSIKGSRSPSRSRSRSRSISRPRSSRSKSRSPSPKRSRSPSGSPRRSASPERMD

SEQ ID NO: 18309 - protein, 167 aa, Artificial Sequence
  Synthetic polypeptide
EVRSPSARQPPRLGSEERLRPAATPSGKEVGVSPRQASRPIREGETKVYVGNLGTGAGKGELERAFSYYGPLRTVWIARNPPGFAFVEFEDPRDAEDAVRGLDGKVICGSRVRVELSTGMPRRSRFDRPPARRPFDPNDRCYECGEKGHYAYDCHRYSRRRRSRYLF

SEQ ID NO: 18310 - protein, 167 aa, Artificial Sequence; identical to SEQ ID NO: 18309
  Synthetic polypeptide

SEQ ID NO: 18311 - protein, 242 aa, Artificial Sequence
  Synthetic polypeptide
GASPPGSHPVREGETKVYVGNLGTGAGKGELERAFSYYGPLRTVWIARNPPGFAFVEFEDPRDAEDAVRGLDGKVICGSRVRVELSTGMPRRSRFDRPPARRPFDPNDRCYECGEKGHYAYDCHRYSRRRRSRSRSRSHSRSRGRRYSRSRSRSRGRRSRSASPRRSRSISLRRSRSASLRRSRSGSIKGSRYFQSPSRSRSRSRSISRPRSSRSKSRSPSPKRSRSPSGSPRRSASPERMD

SEQ ID NO: 18312 - protein, 46 aa, Artificial Sequence
  Synthetic polypeptide
EVRSPSARQPPRLGSEERLRPAATPSGKEKPRCMLVTWELALAKES

SEQ ID NO: 18313 - protein, 46 aa, Artificial Sequence; identical to SEQ ID NO: 18312
  Synthetic polypeptide

SEQ ID NO: 18314 - protein, 46 aa, Artificial Sequence; identical to SEQ ID NO: 18312
  Synthetic polypeptide

SEQ ID NO: 18315 - protein, 46 aa, Artificial Sequence; identical to SEQ ID NO: 18312
  Synthetic polypeptide

SEQ ID NO: 18316 - protein, 46 aa, Artificial Sequence; identical to SEQ ID NO: 18312
  Synthetic polypeptide

SEQ ID NO: 18317 - protein, 46 aa, Artificial Sequence; identical to SEQ ID NO: 18312
  Synthetic polypeptide

SEQ ID NO: 18318 - protein, 46 aa, Artificial Sequence; identical to SEQ ID NO: 18312
  Synthetic polypeptide

SEQ ID NO: 18319 - protein, 33 aa, Artificial Sequence
  Synthetic polypeptide
GAPPPGSRPVWEVRSVSARQPPRPGRRNQGVCW

SEQ ID NO: 18320 - protein, 33 aa, Artificial Sequence; identical to SEQ ID NO: 18319
  Synthetic polypeptide

SEQ ID NO: 18321 - protein, 33 aa, Artificial Sequence; identical to SEQ ID NO: 18319
  Synthetic polypeptide

SEQ ID NO: 18322 - protein, 33 aa, Artificial Sequence; identical to SEQ ID NO: 18319
  Synthetic polypeptide

SEQ ID NO: 18323 - protein, 33 aa, Artificial Sequence; identical to SEQ ID NO: 18319
  Synthetic polypeptide

SEQ ID NO: 18324 - protein, 33 aa, Artificial Sequence; identical to SEQ ID NO: 18319
  Synthetic polypeptide

SEQ ID NO: 18325 - protein, 33 aa, Artificial Sequence; identical to SEQ ID NO: 18319
  Synthetic polypeptide

SEQ ID NO: 18326 - protein, 141 aa, Artificial Sequence
  Synthetic polypeptide
GASPPGSHPVREGETKVYVGNLGTGAGKGELERAFSYYGPLRTVWIARNPPGFAFVEFEDPRDAEDAVRGLDGKVICGSRVRVELSTGMPRRSRFDRPPARRPFDPNDRCYECGEKGHYAYDCHRYSRRRRSRFLRLSQSP

SEQ ID NO: 18327 - protein, 141 aa, Artificial Sequence; identical to SEQ ID NO: 18326
  Synthetic polypeptide

SEQ ID NO: 18328 - protein, 230 aa, Artificial Sequence
  Synthetic polypeptide
GASPPGSHPVREGETKVYVGNLGTGAGKGELERAFSYYGPLRTVWIARNPPGFAFVEFEDPRDAEDAVRGLDGKVICGSRVRVELSTGMPRRSRFDRPPARRPFDPNDRCYECGEKGHYAYDCHRYSRRRRSRSRSRSHSRSRGRRYSRSRSRSRGRRSRSASPRRSRSISLRRSRSASLRRSRSGSIKGSRYFQSPSRSRSRSRSISRPRSSRSPSGSPRRSASPERMD

SEQ ID NO: 18329 - protein, 239 aa, Artificial Sequence
  Synthetic polypeptide
GASPPGSHPVREGETKVYVGNLGTGAGKGELERAFSYYGPLRTVWIARNPPGFAFVEFEDPRDAEDAVRGLDGKVICGSRVRVELSTGMPRRSRFDRPPARRPFDPNDRCYECGEKGHYAYDCHRYSRRRRSRSRSRSHSRSRGRRYSRSRSRSRGRRSRSASPRRSRSISLRRSRSASLRRSRSGSIKGSRSPSRSRSRSRSISRPRSSRSKSRSPSPKRSRSPSGSPRRSASPERMD

SEQ ID NO: 18330 - protein, 136 aa, Artificial Sequence
  Synthetic polypeptide
GASPPGSHPVREGETKVYVGNLGTGAGKGELERAFSYYGPLRTVWIARNPPGFAFVEFEDPRDAEDAVRGLDGKVICGSRVRVELSTGMPRRSRFDRPPARRPFDPNDRCYECGEKGHYAYDCHRYSRRRRSRYLF

SEQ ID NO: 18331 - protein, 136 aa, Artificial Sequence; identical to SEQ ID NO: 18330
  Synthetic polypeptide

SEQ ID NO: 18332 - protein, 41 aa, Artificial Sequence
  Synthetic polypeptide
GASLPGRPSSEMWGAPLSRCPFWEKPRCMLVTWELALAKES

SEQ ID NO: 18333 - protein, 41 aa, Artificial Sequence; identical to SEQ ID NO: 18332
  Synthetic polypeptide

SEQ ID NO: 18334 - protein, 41 aa, Artificial Sequence; identical to SEQ ID NO: 18332
  Synthetic polypeptide

SEQ ID NO: 18335 - protein, 41 aa, Artificial Sequence; identical to SEQ ID NO: 18332
  Synthetic polypeptide

SEQ ID NO: 18336 - protein, 41 aa, Artificial Sequence; identical to SEQ ID NO: 18332
  Synthetic polypeptide

SEQ ID NO: 18337 - protein, 41 aa, Artificial Sequence; identical to SEQ ID NO: 18332
  Synthetic polypeptide

SEQ ID NO: 18338 - protein, 41 aa, Artificial Sequence; identical to SEQ ID NO: 18332
  Synthetic polypeptide

SEQ ID NO: 18339 - protein, 56 aa, Artificial Sequence
  Synthetic polypeptide
GAPLPGCPVWKVRSVSARPPSHLGSEERLCPAAHRLRCGERLCPAAPSGRNQGVCW

SEQ ID NO: 18340 - protein, 56 aa, Artificial Sequence; identical to SEQ ID NO: 18339
  Synthetic polypeptide

SEQ ID NO: 18341 - protein, 56 aa, Artificial Sequence; identical to SEQ ID NO: 18339
  Synthetic polypeptide

SEQ ID NO: 18342 - protein, 56 aa, Artificial Sequence; identical to SEQ ID NO: 18339
  Synthetic polypeptide

SEQ ID NO: 18343 - protein, 56 aa, Artificial Sequence; identical to SEQ ID NO: 18339
  Synthetic polypeptide

SEQ ID NO: 18344 - protein, 56 aa, Artificial Sequence; identical to SEQ ID NO: 18339
  Synthetic polypeptide

SEQ ID NO: 18345 - protein, 56 aa, Artificial Sequence; identical to SEQ ID NO: 18339
  Synthetic polypeptide

SEQ ID NO: 18346 - protein, 242 aa, Artificial Sequence
  Synthetic polypeptide
DVGSASVPLPLLGETKVYVGNLGTGAGKGELERAFSYYGPLRTVWIARNPPGFAFVEFEDPRDAEDAVRGLDGKVICGSRVRVELSTGMPRRSRFDRPPARRPFDPNDRCYECGEKGHYAYDCHRYSRRRRSRSRSRSHSRSRGRRYSRSRSRSRGRRSRSASPRRSRSISLRRSRSASLRRSRSGSIKGSRYFQSPSRSRSRSRSISRPRSSRSKSRSPSPKRSRSPSGSPRRSASPERMD

SEQ ID NO: 18347 - protein, 141 aa, Artificial Sequence
  Synthetic polypeptide
DVGSASVPLPLLGETKVYVGNLGTGAGKGELERAFSYYGPLRTVWIARNPPGFAFVEFEDPRDAEDAVRGLDGKVICGSRVRVELSTGMPRRSRFDRPPARRPFDPNDRCYECGEKGHYAYDCHRYSRRRRSRFLRLSQSP

SEQ ID NO: 18348 - protein, 141 aa, Artificial Sequence; identical to SEQ ID NO: 18347
  Synthetic polypeptide

SEQ ID NO: 18349 - protein, 230 aa, Artificial Sequence
  Synthetic polypeptide
DVGSASVPLPLLGETKVYVGNLGTGAGKGELERAFSYYGPLRTVWIARNPPGFAFVEFEDPRDAEDAVRGLDGKVICGSRVRVELSTGMPRRSRFDRPPARRPFDPNDRCYECGEKGHYAYDCHRYSRRRRSRSRSRSHSRSRGRRYSRSRSRSRGRRSRSASPRRSRSISLRRSRSASLRRSRSGSIKGSRYFQSPSRSRSRSRSISRPRSSRSPSGSPRRSASPERMD

SEQ ID NO: 18350 - protein, 239 aa, Artificial Sequence
  Synthetic polypeptide
DVGSASVPLPLLGETKVYVGNLGTGAGKGELERAFSYYGPLRTVWIARNPPGFAFVEFEDPRDAEDAVRGLDGKVICGSRVRVELSTGMPRRSRFDRPPARRPFDPNDRCYECGEKGHYAYDCHRYSRRRRSRSRSRSHSRSRGRRYSRSRSRSRGRRSRSASPRRSRSISLRRSRSASLRRSRSGSIKGSRSPSRSRSRSRSISRPRSSRSKSRSPSPKRSRSPSGSPRRSASPERMD

SEQ ID NO: 18351 - protein, 136 aa, Artificial Sequence
  Synthetic polypeptide
DVGSASVPLPLLGETKVYVGNLGTGAGKGELERAFSYYGPLRTVWIARNPPGFAFVEFEDPRDAEDAVRGLDGKVICGSRVRVELSTGMPRRSRFDRPPARRPFDPNDRCYECGEKGHYAYDCHRYSRRRRSRYLF

SEQ ID NO: 18352 - protein, 136 aa, Artificial Sequence; identical to SEQ ID NO: 18351
  Synthetic polypeptide

SEQ ID NO: 18353 - protein, 19 aa, Artificial Sequence
  Synthetic polypeptide
LTLVIPALWEAKEFISLIS

SEQ ID NO: 18354 - protein, 19 aa, Artificial Sequence
  Synthetic polypeptide
LTLVIPALWEAKEFISLIS

SEQ ID NO: 18355 - protein, 19 aa, Artificial Sequence
  Synthetic polypeptide
LTLVIPALWEAKEFISLIS

SEQ ID NO: 18356 - protein, 12 aa, Artificial Sequence
  Synthetic polypeptide
SQHFGRPRNLSH

SEQ ID NO: 18357 - protein, 12 aa, Artificial Sequence
  Synthetic polypeptide
SQHFGRPRNLSH

SEQ ID NO: 18358 - protein, 12 aa, Artificial Sequence
  Synthetic polypeptide
SQHFGRPRNLSH

SEQ ID NO: 18359 - protein, 419 aa, Artificial Sequence
  Synthetic polypeptide
MLAVTHACNPSTLGGQGIYLTNILKTEEGNPEVLKRHGKELINFSKRRKVAEITGEIQQYQNQPYCLRVESDIKRFFENLNPMGNSMEKEFTDYLFNKSLEIEPRNPKPLPRFPKKYSYPLKSPGVRPSNPRPGTMRHPTPLQQEPRKISYSRIPESETESTASAPNSPRTPLTPPPASGASSTTDVCSVFDSDHSSPFHSSNDTVFIQVTLPHGPRSASVSSISLTKGTDEVPVPPPVPPRRRPESAPAESSPSKIMSKHLDSPPAIPPRQPTSKAYSPRYSISDRTSISDPPESPPLLPPREPVRTPDVFSSSPLHLQPPPLGKKSDHGNAFFPNSPSPFTPPPPQTPSPHGTRRHLPSPPLTQEVDLHSIAGPPVPPRQSTSQHIPKLPPKTYKREHTHPSMHRDGPPLLENAHSS

SEQ ID NO: 18360 - protein, 419 aa, Artificial Sequence; identical to SEQ ID NO: 18359
  Synthetic polypeptide

SEQ ID NO: 18361 - protein, 404 aa, Artificial Sequence
  Synthetic polypeptide
MLAVTHACNPSTLGGQGIYLTNILKTEEGNPEVLKRHGKELINFSKRRKVAEITGEIQQYQNQPYCLRVESDIKRFFENLNPMGNSMEKEFTDYLFNKSLEIEPRNPKPLPRFPKKYSYPLKSPGVRPSNPRPGTMRHPTPLQQEPRKISYSRIPESETESTASAPNSPRTPLTPPPASGASSTTDVCSVFDSDHSSPFHSRSASVSSISLTKGTDEVPVPPPVPPRRRPESAPAESSPSKIMSKHLDSPPAIPPRQPTSKAYSPRYSISDRTSISDPPESPPLLPPREPVRTPDVFSSSPLHLQPPPLGKKSDHGNAFFPNSPSPFTPPPPQTPSPHGTRRHLPSPPLTQEVDLHSIAGPPVPPRQSTSQHIPKLPPKTYKREHTHPSMHRDGPPLLENAHSS

SEQ ID NO: 18362 - protein, 36 aa, Artificial Sequence
  Synthetic polypeptide
RSQDGRIGTAPVYSSQRERRRRRAISAFPSEEDHYH

SEQ ID NO: 18363 - protein, 36 aa, Artificial Sequence; identical to SEQ ID NO: 18362
  Synthetic polypeptide

SEQ ID NO: 18364 - protein, 36 aa, Artificial Sequence; identical to SEQ ID NO: 18362
  Synthetic polypeptide

SEQ ID NO: 18365 - protein, 36 aa, Artificial Sequence; identical to SEQ ID NO: 18362
  Synthetic polypeptide

SEQ ID NO: 18366 - protein, 36 aa, Artificial Sequence; identical to SEQ ID NO: 18362
  Synthetic polypeptide

SEQ ID NO: 18367 - protein, 36 aa, Artificial Sequence; identical to SEQ ID NO: 18362
  Synthetic polypeptide

SEQ ID NO: 18368 - protein, 36 aa, Artificial Sequence; identical to SEQ ID NO: 18362
  Synthetic polypeptide

SEQ ID NO: 18369 - protein, 358 aa, Artificial Sequence
  Synthetic polypeptide
EQLRSTAPSVSDAEDGRFLHFHLRKIITIRIFDREEYEKECSFSLVLEEPKWIRRGMKGGFTITDEYDDKQPLTSKEEEERRIAEMGRPILGEHTKLEVIIEESYEFKSTVDKLIKKTNLALVVGTNSWREQFIEAITVSAGEDDDDDECGEEKLPSCFDYVMHFLTVFWKVLFAFVPPTEYWNGWACFIVSILMIGLLTAFIGDLASHFGCTIGLKDSVTAVVFVALGTSVPDTFASKVAATQDQYADASIGNVTGSNAVNVFLGIGVAWSIAAIYHAANGEQFKVSPGTLAFSVTLFTIFAFINVGVLLYRRRPEIGGELGGPRTAKLLTSCLFVLLWLLYIFFSSLEAYCHIKGF

SEQ ID NO: 18370 - protein, 358 aa, Artificial Sequence; identical to SEQ ID NO: 18369
  Synthetic polypeptide

SEQ ID NO: 18371 - protein, 358 aa, Artificial Sequence; identical to SEQ ID NO: 18369
  Synthetic polypeptide

SEQ ID NO: 18372 - protein, 358 aa, Artificial Sequence; identical to SEQ ID NO: 18369
  Synthetic polypeptide

SEQ ID NO: 18373 - protein, 386 aa, Artificial Sequence
  Synthetic polypeptide
EQLRSTAPSVSDAEDGRFLHFHLRKIITIRIFDREEYEKECSFSLVLEEPKWIRRGMKGGFTITGKYLFGQPVFRKVHAREHPILSTVITIADEYDDKQPLTSKEEEERRIAEMGRPILGEHTKLEVIIEESYEFKSTVDKLIKKTNLALVVGTNSWREQFIEAITVSAGEDDDDDECGEEKLPSCFDYVMHFLTVFWKVLFAFVPPTEYWNGWACFIVSILMIGLLTAFIGDLASHFGCTIGLKDSVTAVVFVALGTSVPDTFASKVAATQDQYADASIGNVTGSNAVNVFLGIGVAWSIAAIYHAANGEQFKVSPGTLAFSVTLFTIFAFINVGVLLYRRRPEIGGELGGPRTAKLLTSCLFVLLWLLYIFFSSLEAYCHIKGF

SEQ ID NO: 18374 - protein, 358 aa, Artificial Sequence
  Synthetic polypeptide
EQLRSTAPSVSDAEDGRFLHFHLRKIITIRIFDREEYEKECSFSLVLEEPKWIRRGMKEGFCFTDEYDDKQPLTSKEEEERRIAEMGRPILGEHTKLEVIIEESYEFKSTVDKLIKKTNLALVVGTNSWREQFIEAITVSAGEDDDDDECGEEKLPSCFDYVMHFLTVFWKVLFAFVPPTEYWNGWACFIVSILMIGLLTAFIGDLASHFGCTIGLKDSVTAVVFVALGTSVPDTFASKVAATQDQYADASIGNVTGSNAVNVFLGIGVAWSIAAIYHAANGEQFKVSPGTLAFSVTLFTIFAFINVGVLLYRRRPEIGGELGGPRTAKLLTSCLFVLLWLLYIFFSSLEAYCHIKGF

SEQ ID NO: 18375 - protein, 53 aa, Artificial Sequence
  Synthetic polypeptide
EQLRSTAPSVSDAEDGRFLHFHLRKIITIRIFDREEYEKECSFSLVLEEPKWI

SEQ ID NO: 18376 - protein, 20 aa, Artificial Sequence
  Synthetic polypeptide
VRIKACGFHRSTTYHICHTN

SEQ ID NO: 18377 - protein, 20 aa, Artificial Sequence
  Synthetic polypeptide
VRIKACGFHRSTTYHICHTN

SEQ ID NO: 18378 - protein, 20 aa, Artificial Sequence
  Synthetic polypeptide
VRIKACGFHRSTTYHICHTN

SEQ ID NO: 18379 - protein, 20 aa, Artificial Sequence
  Synthetic polypeptide
VRIKACGFHRSTTYHICHTN

SEQ ID NO: 18380 - protein, 23 aa, Artificial Sequence
  Synthetic polypeptide
EHTFLLFKPPVCGILWQPKLRQD

SEQ ID NO: 18381 - protein, 23 aa, Artificial Sequence
  Synthetic polypeptide
EHTFLLFKPPVCGILWQPKLRQD

SEQ ID NO: 18382 - protein, 23 aa, Artificial Sequence
  Synthetic polypeptide
EHTFLLFKPPVCGILWQPKLRQD

SEQ ID NO: 18383 - protein, 23 aa, Artificial Sequence
  Synthetic polypeptide
EHTFLLFKPPVCGILWQPKLRQD

SEQ ID NO: 18384 - protein, 20 aa, Artificial Sequence
  Synthetic polypeptide
DRIKACGFHRSTTYHICHTN

SEQ ID NO: 18385 - protein, 20 aa, Artificial Sequence
  Synthetic polypeptide
DRIKACGFHRSTTYHICHTN

SEQ ID NO: 18386 - protein, 20 aa, Artificial Sequence
  Synthetic polypeptide
DRIKACGFHRSTTYHICHTN

SEQ ID NO: 18387 - protein, 20 aa, Artificial Sequence
  Synthetic polypeptide
DRIKACGFHRSTTYHICHTN

SEQ ID NO: 18388 - protein, 89 aa, Artificial Sequence
  Synthetic polypeptide
ATSLWYFMAAQAKTGLKPVVSTEAPPIIFATPTKLTSDSTVYDYAGKNKVPELQKFFQETYLQTILFLWLLETPVVGILDKGTFPAGLQ

SEQ ID NO: 18389 - protein, 104 aa, Artificial Sequence
  Synthetic polypeptide
ATSLWYFMAAQAKTGLKPVVSTEAPPIIFATPTKLTSDSTVYDYAGKNKVPELQKFFQKADGVPVYLKRGLPDQMLYRTTMALTVGGTIYCLIALYMASQPKNK

SEQ ID NO: 18390 - protein, 104 aa, Artificial Sequence; identical to SEQ ID NO: 18389
  Synthetic polypeptide

SEQ ID NO: 18391 - protein, 69 aa, Artificial Sequence
  Synthetic polypeptide
ATSLWYFMAAQAKTGLKPVVSTEAPPIIFATPTKLTSDSTVYDYAGKNKVPELQKFFQVREDTLQQKSL

SEQ ID NO: 18392 - protein, 46 aa, Artificial Sequence
  Synthetic polypeptide
DTTILNLSQLITLQWPENQMRGNNQNWKLKFGIQIAHLRIDRLTSF

SEQ ID NO: 18393 - protein, 46 aa, Artificial Sequence; identical to SEQ ID NO: 18392
  Synthetic polypeptide

SEQ ID NO: 18394 - protein, 46 aa, Artificial Sequence; identical to SEQ ID NO: 18392
  Synthetic polypeptide

SEQ ID NO: 18395 - protein, 46 aa, Artificial Sequence; identical to SEQ ID NO: 18392
  Synthetic polypeptide

SEQ ID NO: 18396 - protein, 46 aa, Artificial Sequence; identical to SEQ ID NO: 18392
  Synthetic polypeptide

SEQ ID NO: 18397 - protein, 46 aa, Artificial Sequence; identical to SEQ ID NO: 18392
  Synthetic polypeptide

SEQ ID NO: 18398 - protein, 46 aa, Artificial Sequence; identical to SEQ ID NO: 18392
  Synthetic polypeptide

SEQ ID NO: 18399 - protein, 8 aa, Artificial Sequence
  Synthetic polypeptide
PCSGRRIR

SEQ ID NO: 18400 - protein, 8 aa, Artificial Sequence
  Synthetic polypeptide
PCSGRRIR

SEQ ID NO: 18401 - protein, 8 aa, Artificial Sequence
  Synthetic polypeptide
PCSGRRIR

SEQ ID NO: 18402 - protein, 8 aa, Artificial Sequence
  Synthetic polypeptide
PCSGRRIR

SEQ ID NO: 18403 - protein, 8 aa, Artificial Sequence
  Synthetic polypeptide
PCSGRRIR

SEQ ID NO: 18404 - protein, 8 aa, Artificial Sequence
  Synthetic polypeptide
PCSGRRIR

SEQ ID NO: 18405 - protein, 8 aa, Artificial Sequence
  Synthetic polypeptide
PCSGRRIR

SEQ ID NO: 18406 - protein, 473 aa, Artificial Sequence
  Synthetic polypeptide
TELINAVCSECSTDCPFPASFSLLGSPYFMRHNNIELKPVNNPAVAGESDEREQSKLEVKVWDPNSPLTDRQIDQFLVVARAVGTFARALDCSSSVRQPSLHMSAAAASRDITLFHAMDTLYRHSYDLSSAISVLVPLGGPVLCRDEMEEWSASEASLFEEALEKYGKDFNDIRQDFLPWKSLTSIIEYYYMWKTTDRYVQQKRLKAAEAESKLKQVYIPTYKPNPNQISTSNGKPGAVNGAVGTTFQPQNPLLGRACESCYATQSHQWYSWGPPNMQCRLCAICWLYWKKYGGLKMPTQSEEEKLSPSPTTEDPRVRSHVSRQAMQGMPVRNTGSPKSAVKTRQAFFLHTTYFTKFARQVCKNTLRLRQAARRPFVAINYAAIRAEYADRHAELSGSPLKSKSTRKPLACIIGYLEIHPAKKPNVIRSTPSLQTPTTKRMLTTPNHTSLSILGKRNYSHHNGLDELTCCVSD

SEQ ID NO: 18407 - protein, 473 aa, Artificial Sequence; identical to SEQ ID NO: 18406
  Synthetic polypeptide

SEQ ID NO: 18408 - protein, 395 aa, Artificial Sequence
  Synthetic polypeptide
TELINAVCSECSTDCPFPASFSLLGSPYFMRHNNIELKPVNNPAVAGESDEREQSKLEVKVWDPNSPLTDRQIDQFLVVARAVGTFARALDCSSSVRQPSLHMSAAAASRDITLFHAMDTLYRHSYDLSSAISVLVPLGGPVLCRDEMEEWSASEASLFEEALEKYGKDFNDIRQDFLPWKSLTSIIEYYYMWKTTDRYVQQKRLKAAEAESKLKQVYIPTYSKPNPNQISTSNGKPGAVNGAVGTTFQPQNPLLGRACESCYATQSHQWYSWGPPNMQCRLCAICWLYWKKYGGLKMPTQSEEEKLSPSPTTEDPRVRSHVSRQAMQGMPVRNTGSPKSAVKTRQAFFLHTTYFTKFARQVCKNTLRLRQAARRPFVAINYAAIRAECKMLLNS

SEQ ID NO: 18409 - protein, 272 aa, Artificial Sequence
  Synthetic polypeptide
TELINAVCSECSTDCPFPASFSLLGSPYFMRHNNIELKPVNNPAVAGESDEREQSKLEVKVWDPNSPLTDRQIDQFLVVARAVGTFARALDCSSSVRQPSLHMSAAAASRDITLFHAMDTLYRHSYDLSSAISVLVPLGGPVLCRDEMEEWSASEASLFEEALEKYGKDFNDIRQDFLPWKSLTSIIEYYYMWKTTDRYVQQKRLKAAEAESKLKQVYIPTYKPNPNQISTSNGKPGAVNGAVGTTFQPQNPLLGRACESCYVSPVVFLGPT

SEQ ID NO: 18410 - protein, 394 aa, Artificial Sequence
  Synthetic polypeptide
TELINAVCSECSTDCPFPASFSLLGSPYFMRHNNIELKPVNNPAVAGESDEREQSKLEVKVWDPNSPLTDRQIDQFLVVARAVGTFARALDCSSSVRQPSLHMSAAAASRDITLFHAMDTLYRHSYDLSSAISVLVPLGGPVLCRDEMEEWSASEASLFEEALEKYGKDFNDIRQDFLPWKSLTSIIEYYYMWKTTDRYVQQKRLKAAEAESKLKQVYIPTYKPNPNQISTSNGKPGAVNGAVGTTFQPQNPLLGRACESCYATQSHQWYSWGPPNMQCRLCAICWLYWKKYGGLKMPTQSEEEKLSPSPTTEDPRVRSHVSRQAMQGMPVRNTGSPKSAVKTRQAFFLHTTYFTKFARQVCKNTLRLRQAARRPFVAINYAAIRAECKMLLNS

SEQ ID NO: 18411 - protein, 470 aa, Artificial Sequence
  Synthetic polypeptide
TELINAVCSECSTDCPFPASFSLLGSPYFMRHNNIELKPVNNPAVAGESDEREQSKLEVKVWDPNSPLTDRQIDQFLVVARAVGTFARALDCSSSVRQPSLHMSAAAASRDITLFHAMDTLYRHSYDLSSAISVLVPLGGPVLCRDEMEEWSASEASLFEEALEKYGKDFNDIRQDFLPWKSLTSIIEYYYMWKTTDRYVQQKRLKAAEAESKLKQVYIPTYKPNPNQISTSNGKPGAVNGAVGTTFQPQNPLLGRACESCYATQSHQWYSWGPPNMQCRLCAICWLYWKKYGGLKMPTQSEEEKLSPSPTTEDPRVRSHVSRQAMQGMPVRNTGSPKSAVKTRQAFFLHTTYFTKFARQVCKNTLRLRQAARRPFVAINYAAIRAEYADRHAELSGSPLKSKSTRKPLACIIGYLEIHPAKKPNVIRSTPSLQTPTTKRMLTTPNHTSLSILGKRNYSHHNGLDEKLMK

SEQ ID NO: 18412 - protein, 474 aa, Artificial Sequence
  Synthetic polypeptide
TELINAVCSECSTDCPFPASFSLLGSPYFMRHNNIELKPVNNPAVAGESDEREQSKLEVKVWDPNSPLTDRQIDQFLVVARAVGTFARALDCSSSVRQPSLHMSAAAASRDITLFHAMDTLYRHSYDLSSAISVLVPLGGPVLCRDEMEEWSASEASLFEEALEKYGKDFNDIRQDFLPWKSLTSIIEYYYMWKTTDRYVQQKRLKAAEAESKLKQVYIPTYSKPNPNQISTSNGKPGAVNGAVGTTFQPQNPLLGRACESCYATQSHQWYSWGPPNMQCRLCAICWLYWKKYGGLKMPTQSEEEKLSPSPTTEDPRVRSHVSRQAMQGMPVRNTGSPKSAVKTRQAFFLHTTYFTKFARQVCKNTLRLRQAARRPFVAINYAAIRAEYADRHAELSGSPLKSKSTRKPLACIIGYLEIHPAKKPNVIRSTPSLQTPTTKRMLTTPNHTSLSILGKRNYSHHNGLDELTCCVSD

SEQ ID NO: 18413 - protein, 554 aa, Artificial Sequence
  Synthetic polypeptide
LCCLLAVLFWVFHLLQAYSDSKHGTNSDFQHELTDITVCTKAKLWLAKRQNPCLVTRAVYIDILFLLTCCLNRSAKDNQPVLESLGFWEEVRGIISGSELITGFPWAFKVPGLPQYLQSLTRLAIAAVWAAAAKSGERETNVPISFSQLLESAFPEVRSLTLEALLEKFLAAASGLGEKGVPPLLCNMGEKFLLLAMKENHPECFCKILKILHCMDPGEWLPQTEHCVHLTPKEFLIWTMDIASNERSEIQSVALRLASKVISHHMQTCVENRELIAAELKQWVQLVILSCEDHLPTESRLAVVEVLTSTTPLFLTNPHPILELQDTLALWKCVLTLLQSEEQAVRDAATETVTTAMSQENTCQSTEFAFCQVDASIALALALAVLCDLLQQWDQLAPGLPILLGWLLGESDDLVACVESMHQVEEDYLFEKAEVNFWAETLIFVKYLCKHLFCLLSKSGWRPPSPEMLCHLQRMVSEQCHLLSQFFRELPPAAEFVKTVEFTRLRIQEERTLACLRLLAFLEGKEGEDTLVLSVWDSYAESRQLTLPRTEAAC

SEQ ID NO: 18414 - protein, 554 aa, Artificial Sequence; identical to SEQ ID NO: 18413
  Synthetic polypeptide

SEQ ID NO: 18415 - protein, 554 aa, Artificial Sequence; identical to SEQ ID NO: 18413
  Synthetic polypeptide

SEQ ID NO: 18416 - protein, 554 aa, Artificial Sequence; identical to SEQ ID NO: 18413
  Synthetic polypeptide

SEQ ID NO: 18417 - protein, 27 aa, Artificial Sequence
  Synthetic polypeptide
LCYFGFFICCKPTQTPNTERIQTSSTS

SEQ ID NO: 18418 - protein, 27 aa, Artificial Sequence
  Synthetic polypeptide
LCYFGFFICCKPTQTPNTERIQTSSTS

SEQ ID NO: 18419 - protein, 27 aa, Artificial Sequence
  Synthetic polypeptide
LCYFGFFICCKPTQTPNTERIQTSSTS

SEQ ID NO: 18420 - protein, 27 aa, Artificial Sequence
  Synthetic polypeptide
LCYFGFFICCKPTQTPNTERIQTSSTS

SEQ ID NO: 18421 - protein, 50 aa, Artificial Sequence
  Synthetic polypeptide
VGKSGLWSQLVSLWILALLLTSCVILGFSFVASLLRLQTRNEFRLPARAD

SEQ ID NO: 18422 - protein, 50 aa, Artificial Sequence; identical to SEQ ID NO: 18421
  Synthetic polypeptide

SEQ ID NO: 18423 - protein, 50 aa, Artificial Sequence; identical to SEQ ID NO: 18421
  Synthetic polypeptide

SEQ ID NO: 18424 - protein, 50 aa, Artificial Sequence; identical to SEQ ID NO: 18421
  Synthetic polypeptide

SEQ ID NO: 18425 - protein, 592 aa, Artificial Sequence
  Synthetic polypeptide
LLWAMMEPQGLDLPCQWFSDVECRQCRTDSSEKTNDIRPVIAAAYCLERFKTAVQRGSTQIEPGSLPESRRQSSEFEKAKTCQLFINAAVDSPAIDYHISLAQSALQICLTHPELQNEICCQLIKQTRRRQPQNQPGPLQGWQLLALCVGLFLPHHPFLWLLRLHLKRNADSRTEFGKYAIYCQRCVERTQQNGDREARPSRMEILSTLLRNPYHHSLPFSIPVHFMNGIYQVVGFDASTTVEEFLNTLNQDTGMRKPAQSGFALFTDDPSGRDLEHCLQGNIKICDIISKWEQASKEQQPGKCEGTRTVRLTYKNRLYFSVQARGETDREKLLLMYQTNDQIINGLFPLNKDLALEMAALLSQVEIGDFERPFSTPAGHVTNQCKVNQTLKQVIEKFYPKRYRDGCSEEQLRQLCQRLSTRWMALRGHSAADCVRIYLTVARKWPFFGAKLFLAKPITPSSLGSTFLWLAVHEDGLSLLEYNSMRLIVSYVYKSLMTFGGYQDDFMVVINNTHSKDKPTEKLLFAMAKPKILEITLLIASYINNFHQQKAAFHHLSAPALLSAQTRGPQARMMGSQPLLSSSRPTKGPTLL

SEQ ID NO: 18426 - protein, 24 aa, Artificial Sequence
  Synthetic polypeptide
SLAVFLSHGDRVQNLRRPRPASFL

SEQ ID NO: 18427 - protein, 13 aa, Artificial Sequence
  Synthetic polypeptide
EGQDLPAFYKCCS

SEQ ID NO: 18428 - protein, 30 aa, Artificial Sequence
  Synthetic polypeptide
GLPSPVKLKFYGSGSQRVLMVLVWMLLNSS

SEQ ID NO: 18429 - protein, 30 aa, Artificial Sequence; identical to SEQ ID NO: 18428
  Synthetic polypeptide

SEQ ID NO: 18430 - protein, 30 aa, Artificial Sequence; identical to SEQ ID NO: 18428
  Synthetic polypeptide

SEQ ID NO: 18431 - protein, 30 aa, Artificial Sequence; identical to SEQ ID NO: 18428
  Synthetic polypeptide

SEQ ID NO: 18432 - protein, 30 aa, Artificial Sequence; identical to SEQ ID NO: 18428
  Synthetic polypeptide

SEQ ID NO: 18433 - protein, 30 aa, Artificial Sequence; identical to SEQ ID NO: 18428
  Synthetic polypeptide

SEQ ID NO: 18434 - protein, 30 aa, Artificial Sequence; identical to SEQ ID NO: 18428
  Synthetic polypeptide

SEQ ID NO: 18435 - protein, 428 aa, Artificial Sequence
  Synthetic polypeptide
WFYKWEFFCTNSLACCHVRCDFAPHSPSAMIVRPPQPCETEILRFWLTKGVDGFSLDAVKFLLEAKHLRDEIQVNKTQIPDTVTQYSELYHDFTTTQVGMHDIVRSFRQTMDQYSTEPGRYRFMGTEAYAESIDRTVMYYGLPFIQEADFPFNNYLSMLDTVSGNSVYEVITSWMENMPEGKWPNWMIGGPDSSRLTSRLGNQYVNVMNMLLFTLPGTPITYYGEEIGMGNIVAANLNESYDINTLRSKSPMQWDNSSNAGFSEASNTWLPTNSDYHTVNVDVQKTQPRSALKLYQDLSLLHANELLLNRGWFCHLRNDSHYVVYTRELDGIDRIFIVVLNFGESTLLNLHNMISGLPAKMRIRLSTNSADKGSKVDTSGIFLDKGEGLIFEHNTKNLLHRQTAFRDRCFVSNRACYSSVLNILYTSC

SEQ ID NO: 18436 - protein, 428 aa, Artificial Sequence; identical to SEQ ID NO: 18435
  Synthetic polypeptide

SEQ ID NO: 18437 - protein, 307 aa, Artificial Sequence
  Synthetic polypeptide
WFYKWEFFCTNSLACCHVRCDFAPHSPSAMIVRPPQPCETEILRFWLTKGVDGFSLDAVKFLLEAKHLRDEIQVNKTQIPDTVTQYSELYHDFTTTQVGMHDIVRSFRQTMDQYSTEPGRYRFMGTEAYAESIDRTVMYYGLPFIQEADFPFNNYLSMLDTVSGNSVYEVITSWMENMPEGKWPNWMIGGPDSSRLTSRLGNQYVNVMNMLLFTLPGTPITYYGEEIGMGNIVAANLNESYDINTLRSKSPMQWDNSSNAGFSEASNTWLPTNSDYHTVNVDSCSVTHARVQWRDLGTLQPLLPGFK

SEQ ID NO: 18438 - protein, 134 aa, Artificial Sequence
  Synthetic polypeptide
WFYKWEFFCTNSLACCHVRCDFAPHSPSAMIVRPPQPCETEILRFWLTKGVDGFSLDAVKFLLEAKHLRDEIQVNKTQIPDTVTQYSELYHDFTTTQVGMHDIVRSFRQTMDQYSTEPGRYRLTTAYALISSQA

SEQ ID NO: 18439 - protein, 245 aa, Artificial Sequence
  Synthetic polypeptide
WFYKWEFFCTNSLACCHVRCDFAPHSPSAMIVRPPQPCETEILRFWLTKGVDGFSLDAVKFLLEAKHLRDEIQVNKTQIPDTVTQYSELYHDFTTTQVGMHDIVRSFRQTMDQYSTEPGRYRFMGTEAYAESIDRTVMYYGLPFIQEADFPFNNYLSMLDTVSGNSVYEVITSWMENMPEGKWPNWMIGGPDSSRLTSRLGNQYVNVMNMLLFTLPGTPITYYGEEIGMGNIVAANLNESYDIVS

SEQ ID NO: 18440 - protein, 307 aa, Artificial Sequence
  Synthetic polypeptide
WFYKWEFFCTNSLACCHVRCDFAPHSPSAMIVRPPQPCETEILRFWLTKGVDGFSLDAVKFLLEAKHLRDEIQVNKTQIPDTVTQYSELYHDFTTTQVGMHDIVRSFRQTMDQYSTEPGRYRFMGTEAYAESIDRTVMYYGLPFIQEADFPFNNYLSMLDTVSGNSVYEVITSWMENMPEGKWPNWMIGGPDSSRLTSRLGNQYVNVMNMLLFTLPGTPITYYGEEIGMGNIVAANLNESYDINTLRSKSPMQWDNSSNAGFSEASNTWLPTNSDYHTVNVDVSISENFMLILETKKWVSTESTHSP

SEQ ID NO: 18441 - protein, 108 aa, Artificial Sequence
  Synthetic polypeptide
WFYKWEFFCTNSLACCHVRCDFAPHSPSAMIVRPPQPCETEILRFWLTKGVDGFSLDAVKFLLEAKHLRDEIQVNKTQIPDTVTQYSELYHDFTTTQVGMHDIVRSFR

SEQ ID NO: 18442 - protein, 41 aa, Artificial Sequence
  Synthetic polypeptide
ASASSSERENLMSKASGHLKRFWLTTASSTIIYSGPLLCVS

SEQ ID NO: 18443 - protein, 6 aa, Artificial Sequence
  Synthetic polypeptide
ARHLAI

SEQ ID NO: 18444 - protein, 205 aa, Artificial Sequence
  Synthetic polypeptide
EREPNEQGIWPSEEVLAYYCLKHNNIFRALAVCELGGGMTCLAGLMVAISADVKEVLLTDGNEKAIRNVQDIITRNQKAGVFKTQKISSCVLRWDNETDVSQLEGHFDIVMCADCLFLDQYRASLVDAIKRLLQPRGKAMVFAPRRGNTLNQFCNLAEKAGFCIQRHENYDEHISNFHSKLKKENPDIYEENLHYPLLLILTKHG

SEQ ID NO: 18445 - protein, 17 aa, Artificial Sequence
  Synthetic polypeptide
DEENQDNERRCLQRMCL

SEQ ID NO: 18446 - protein, 17 aa, Artificial Sequence
  Synthetic polypeptide
DEENQDNERRCLQRMCL

SEQ ID NO: 18447 - protein, 17 aa, Artificial Sequence
  Synthetic polypeptide
DEENQDNERRCLQRMCL

SEQ ID NO: 18448 - protein, 17 aa, Artificial Sequence
  Synthetic polypeptide
DEENQDNERRCLQRMCL

SEQ ID NO: 18449 - protein, 325 aa, Artificial Sequence
  Synthetic polypeptide
SGSWMAVLKQVLHMRTFSPAHGEMRKIRTTKGGVYKECVCENYKLAVNCFVNNNRQCQCTSVGAQNTVICSKLAAKCLVMKAEMNGSKLGRRAKPEGALQNNDGLYDPDCDESGLFKAKQCNGTSMCWCVNTAGVRRTDKDTEITCSERVRTYWIIIELKHKAREKPYDSKSLRTALQKEITTRYQLDPKFITSILYENNVITIDLVQNSSQKTQNDVDIADVAYYFEKDVKGESLFHSKKMDLTVNGEQLDLDPGQTLIYYVDEKAPEFSMQGLKAGVIAVIVVVVIAVVAGIVVLVISRKKRMAKYEKAEIKEMGEMHRELNA

SEQ ID NO: 18450 - protein, 325 aa, Artificial Sequence; identical to SEQ ID NO: 18449
  Synthetic polypeptide

SEQ ID NO: 18451 - protein, 325 aa, Artificial Sequence; identical to SEQ ID NO: 18449
  Synthetic polypeptide

SEQ ID NO: 18452 - protein, 22 aa, Artificial Sequence
  Synthetic polypeptide
GKSGQRKEVFTKNVSVKTTSWP

SEQ ID NO: 18453 - protein, 22 aa, Artificial Sequence
  Synthetic polypeptide
GKSGQRKEVFTKNVSVKTTSWP

SEQ ID NO: 18454 - protein, 22 aa, Artificial Sequence
  Synthetic polypeptide
GKSGQRKEVFTKNVSVKTTSWP

SEQ ID NO: 18455 - protein, 22 aa, Artificial Sequence
  Synthetic polypeptide
GKSGQRKEVFTKNVSVKTTSWP

SEQ ID NO: 18456 - protein, 134 aa, Artificial Sequence
  Synthetic polypeptide
SGSWMAVLKQVLHMRTFSPAHGEMRKIRTTKGGVYKECVCENYKLAVNCFVNNNRQCQCTSVGAQNTVICSKLAAKCLVMKAEMNGSKLGRRAKPEGALQNNDGLYDPDCDESGLFKAKQCNGTSMCWCVNTAG

SEQ ID NO: 18457 - protein, 368 aa, Artificial Sequence
  Synthetic polypeptide
GVRSAPPRAQSASPSASEHLRRGPGTPSSLSSRRGPACPRPRAARPAPRVPLPAHALPRVLAFGLLLAAATATFAAAQEECVCENYKLAVNCFVNNNRQCQCTSVGAQNTVICSKLAAKCLVMKAEMNGSKLGRRAKPEGALQNNDGLYDPDCDESGLFKAKQCNGTSMCWCVNTAGVRRTDKDTEITCSERVRTYWIIIELKHKAREKPYDSKSLRTALQKEITTRYQLDPKFITSILYENNVITIDLVQNSSQKTQNDVDIADVAYYFEKDVKGESLFHSKKMDLTVNGEQLDLDPGQTLIYYVDEKAPEFSMQGLKAGVIAVIVVVVIAVVAGIVVLVISRKKRMAKYEKAEIKEMGEMHRELNA

SEQ ID NO: 18458 - protein, 89 aa, Artificial Sequence
  Synthetic polypeptide
VCAPPRRAHRALVLRRASTFDAVRGPPRRCPPDADPRAPGLALPGRLLVSHSRRTPSRESSRSGFCLPRRRRLLPQLRKNVSVKTTSWP

SEQ ID NO: 18459 - protein, 70 aa, Artificial Sequence
  Synthetic polypeptide
SFGERAPSTRSGDPLVAVLPTRTRVPQASRCPAGSSCPTPGARPPASPRVRASACRGDGDFCRSSGRMCL

SEQ ID NO: 18460 - protein, 253 aa, Artificial Sequence
  Synthetic polypeptide
GVRSAPPRAQSASPSASEHLRRGPGTPSSLSSRRGPACPRPRAARPAPRVPLPAHALPRVLAFGLLLAAATATFAAAQEGEARIGAELWSWAGLGGSGPRPSAPETGIIGRGPRGRAFQRGDRTVRPCSGSGPPRGRKRRGPSRGAASLRSFARLECVCENYKLAVNCFVNNNRQCQCTSVGAQNTVICSKLAAKCLVMKAEMNGSKLGRRAKPEGALQNNDGLYDPDCDESGLFKAKQCNGTSMCWCVNTAG

SEQ ID NO: 18461 - protein, 107 aa, Artificial Sequence
  Synthetic polypeptide
VCAPPRRAHRALVLRRASTFDAVRGPPRRCPPDADPRAPGLALPGRLLVSHSRRTPSRESSRSGFCLPRRRRLLPQLRKVRRGLEQSCGAGLGWGAAAPGPRPPKRA

SEQ ID NO: 18462 - protein, 67 aa, Artificial Sequence
  Synthetic polypeptide
SFGERAPSTRSGDPLVAVLPTRTRVPQASRCPAGSSCPTPGARPPASPRVRASACRGDGDFCRSSGR

SEQ ID NO: 18463 - protein, 64 aa, Artificial Sequence
  Synthetic polypeptide
KCVTSPCSLSSYCSWPCEVLAHPSPSISIVSFLRPPQKLSRCQNHASCKACRIQGDTRVRHGQQ

SEQ ID NO: 18464 - protein, 25 aa, Artificial Sequence
  Synthetic polypeptide
ADARIMLPAKPAEFREIPGFVMGSN

SEQ ID NO: 18465 - protein, 47 aa, Artificial Sequence
  Synthetic polypeptide
GAGSPFTFHQYCKFPETSPEAEQMPESCFLQSLQNSGRYQGSSWAAM

SEQ ID NO: 18466 - protein, 596 aa, Artificial Sequence
  Synthetic polypeptide
FGPAYLCNLILHLPRTPCSSFPFQKFYAFVTIASLPRIPTFTWKNPAHPVKPDLLSPPLSSLPFCPAMLTHAPGQSPLLLPAYTCRRHLPSCCNLSTYLSPLLVFELLEDRDKVCIIFASPGPKTAWFQKQCTDGYEWDPVRQQCKDIDECDIVPDACKGGMKCVNHYGGYLCLPKTAQIIVNNEQPQQETQPAEGTSGATTGVVAASSMATSGVLPGGGFVASAAAVAGPEMQTGRNNFVIRRNPADPQRIPSNPSHRIQCAAGYEQSEHNVCQDIDECTAGTHNCRADQVCINLRGSFACQCPPGYQKRGEQCVDIDECTIPPYCHQRCVNTPGSFYCQCSPGFQLAANNYTCVDINECDASNQCAQQCYNILGSFICQCNQGYELSSDRLNCEDIDECRTSSYLCQYQCVNEPGKFSCMCPQGYQVVRSRTCQDINECETTNECREDEMCWNYHGGFRCYPRNPCQDPYILTPENRCVCPVSNAMCRELPQSIVYKYMSIRSDRSVPSDIFQIQATTIYANTINTFRIKSGNENGEFYLRQTSPVSAMLVLVKSLSGPREHIVDLEMLTVSSIGTFRTSSVLRLTIIVGPFSF

SEQ ID NO: 18467 - protein, 596 aa, Artificial Sequence; identical to SEQ ID NO: 18466
  Synthetic polypeptide

SEQ ID NO: 18468 - protein, 596 aa, Artificial Sequence; identical to SEQ ID NO: 18466
  Synthetic polypeptide

SEQ ID NO: 18469 - protein, 90 aa, Artificial Sequence
  Synthetic polypeptide
SLIYCHLLCQVFPSALPCSPMPPGRVHYSFLHTLVEGTCHLAATCLPICLLFWSLSCLRTGTKSASSLHPQALKLPGFRSNALTDMSGIL

SEQ ID NO: 18470 - protein, 90 aa, Artificial Sequence; identical to SEQ ID NO: 18469
  Synthetic polypeptide

SEQ ID NO: 18471 - protein, 90 aa, Artificial Sequence; identical to SEQ ID NO: 18469
  Synthetic polypeptide

SEQ ID NO: 18472 - protein, 90 aa, Artificial Sequence; identical to SEQ ID NO: 18469
  Synthetic polypeptide

SEQ ID NO: 18473 - protein, 90 aa, Artificial Sequence; identical to SEQ ID NO: 18469
  Synthetic polypeptide

SEQ ID NO: 18474 - protein, 90 aa, Artificial Sequence; identical to SEQ ID NO: 18469
  Synthetic polypeptide

SEQ ID NO: 18475 - protein, 90 aa, Artificial Sequence; identical to SEQ ID NO: 18469
  Synthetic polypeptide

SEQ ID NO: 18476 - protein, 90 aa, Artificial Sequence; identical to SEQ ID NO: 18469
  Synthetic polypeptide

SEQ ID NO: 18477 - protein, 90 aa, Artificial Sequence; identical to SEQ ID NO: 18469
  Synthetic polypeptide

SEQ ID NO: 18478 - protein, 9 aa, Artificial Sequence
  Synthetic polypeptide
NCLVSEAMH

SEQ ID NO: 18479 - protein, 9 aa, Artificial Sequence
  Synthetic polypeptide
NCLVSEAMH

SEQ ID NO: 18480 - protein, 9 aa, Artificial Sequence
  Synthetic polypeptide
NCLVSEAMH

SEQ ID NO: 18481 - protein, 9 aa, Artificial Sequence
  Synthetic polypeptide
NCLVSEAMH

SEQ ID NO: 18482 - protein, 9 aa, Artificial Sequence
  Synthetic polypeptide
NCLVSEAMH

SEQ ID NO: 18483 - protein, 9 aa, Artificial Sequence
  Synthetic polypeptide
NCLVSEAMH

SEQ ID NO: 18484 - protein, 9 aa, Artificial Sequence
  Synthetic polypeptide
NCLVSEAMH

SEQ ID NO: 18485 - protein, 9 aa, Artificial Sequence
  Synthetic polypeptide
NCLVSEAMH

SEQ ID NO: 18486 - protein, 9 aa, Artificial Sequence
  Synthetic polypeptide
NCLVSEAMH

SEQ ID NO: 18487 - protein, 275 aa, Artificial Sequence
  Synthetic polypeptide
FGPAYLCNLILHLPRTPCSSFPFQKFYAFVTIASLPRIPTFTWKNPAHPVKPDLLSPPLSSLPFCPAMLTHAPGQSPLLLPAYTCRRHLPSCCNLSTYLSPLLVFELLEDRDKVCIIFASPGPKTAWFQKQCTDGYEWDPVRQQCKDIDECDIVPDACKGGMKCVNHYGGYLCLPKTAQIIVNNEQPQQETQPAEGTSGATTGVVAASSMATSGVLPGGGFVASAAAVAGPEMQTGRNNFVIRRNPADPQRIPSNPSHRIQCAAGYEQSEHNVCQ

SEQ ID NO: 18488 - protein, 222 aa, Artificial Sequence
  Synthetic polypeptide
FGPAYLCNLILHLPRTPCSSFPFQKFYAFVTIASLPRIPTFTWKNPAHPVKPDLLSPPLSSLPFCPAMLTHAPGQSPLLLPAYTCRRHLPSCCNLSTYLSPLLVFELLEDRDKVCIIFASPGPKTAWFQKQCTDGYEWDPVRQQCKDIDECDIVPDACKGGMKCVNHYGGYLCLPKTAQIIVNNEQPQQETQPAEGTSGATTGVVAASSMATSGVLPGGGFV

SEQ ID NO: 18489 - protein, 209 aa, Artificial Sequence
  Synthetic polypeptide
FGPAYLCNLILHLPRTPCSSFPFQKFYAFVTIASLPRIPTFTWKNPAHPVKPDLLSPPLSSLPFCPAMLTHAPGQSPLLLPAYTCRRHLPSCCNLSTYLSPLLVFELLEDRDKVCIIFASPGPKTAWFQKQCTDGYEWDPVRQQCKDIDECDIVPDACKGGMKCVNHYGGYLCLPKTAQIIVNNEQPQQETQPAEGTSGATTGVVAASS

SEQ ID NO: 18490 - protein, 190 aa, Artificial Sequence
  Synthetic polypeptide
FGPAYLCNLILHLPRTPCSSFPFQKFYAFVTIASLPRIPTFTWKNPAHPVKPDLLSPPLSSLPFCPAMLTHAPGQSPLLLPAYTCRRHLPSCCNLSTYLSPLLVFELLEDRDKVCIIFASPGPKTAWFQKQCTDGYEWDPVRQQCKDIDECDIVPDACKGGMKCVNHYGGYLCLPKTAQIIVNNEQPQQE

SEQ ID NO: 18491 - protein, 164 aa, Artificial Sequence
  Synthetic polypeptide
FGPAYLCNLILHLPRTPCSSFPFQKFYAFVTIASLPRIPTFTWKNPAHPVKPDLLSPPLSSLPFCPAMLTHAPGQSPLLLPAYTCRRHLPSCCNLSTYLSPLLVFELLEDRDKVCIIFASPGPKTAWFQKQCTDGYEWDPVRQQCKDIDECDIVPDACKGGMKC

SEQ ID NO: 18492 - protein, 154 aa, Artificial Sequence
  Synthetic polypeptide
FGPAYLCNLILHLPRTPCSSFPFQKFYAFVTIASLPRIPTFTWKNPAHPVKPDLLSPPLSSLPFCPAMLTHAPGQSPLLLPAYTCRRHLPSCCNLSTYLSPLLVFELLEDRDKVCIIFASPGPKTAWFQKQCTDGYEWDPVRQQCKDIDECDIV

SEQ ID NO: 18493 - protein, 23 aa, Artificial Sequence
  Synthetic polypeptide
SQHSGRPSLLRLQTWISTSWRHS

SEQ ID NO: 18494 - protein, 23 aa, Artificial Sequence
  Synthetic polypeptide
SQHSGRPSLLRLQTWISTSWRHS

SEQ ID NO: 18495 - protein, 44 aa, Artificial Sequence
  Synthetic polypeptide
MGTVAHTCNPSTLGGQVYCVCRHGFQPAGGILDCSNQKARWDHI

SEQ ID NO: 18496 - protein, 44 aa, Artificial Sequence; identical to SEQ ID NO: 18495
  Synthetic polypeptide

SEQ ID NO: 18497 - protein, 146 aa, Artificial Sequence
  Synthetic polypeptide
WAQWLTPVIPALWEAKSIASADMDFNQLEAFLTAQTKKQGGITSDQAAVISKFWKSHKTKIRESLMNQSRWNSGLRGLSWRVDGKSQSRHSAQIHTPVAIIELELGKYGQESEFLCLEFDEVKVNQILKTLSEVEESISTLISQPN

SEQ ID NO: 18498 - protein, 115 aa, Artificial Sequence
  Synthetic polypeptide
WAQWLTPVIPALWEAKSIASADMDFNQLEAFLTAQTKKQGGITSDQAAVISKFWKSHKTKIRESLMNQSRWNSGLRGLSWRVDGKSQSRHSAQIHTPVAIIELELGKYGQVHCNQ

SEQ ID NO: 18499 - protein, 27 aa, Artificial Sequence
  Synthetic polypeptide
GAVETVWTSASSRAESSHSLILPLYGI

SEQ ID NO: 18500 - protein, 27 aa, Artificial Sequence
  Synthetic polypeptide
GAVETVWTSASSRAESSHSLILPLYGI

SEQ ID NO: 18501 - protein, 27 aa, Artificial Sequence
  Synthetic polypeptide
GAVETVWTSASSRAESSHSLILPLYGI

SEQ ID NO: 18502 - protein, 41 aa, Artificial Sequence
  Synthetic polypeptide
FCLYMESEFLCLEFDEVKVNQILKTLSEVEESISTLISQPN

SEQ ID NO: 18503 - protein, 41 aa, Artificial Sequence; identical to SEQ ID NO: 18502
  Synthetic polypeptide

SEQ ID NO: 18504 - protein, 41 aa, Artificial Sequence; identical to SEQ ID NO: 18502
  Synthetic polypeptide

SEQ ID NO: 18505 - protein, 28 aa, Artificial Sequence
  Synthetic polypeptide
EFPQSDSAFIWNLNFCVWNLMRSKSTKF

SEQ ID NO: 18506 - protein, 28 aa, Artificial Sequence
  Synthetic polypeptide
EFPQSDSAFIWNLNFCVWNLMRSKSTKF

SEQ ID NO: 18507 - protein, 28 aa, Artificial Sequence
  Synthetic polypeptide
EFPQSDSAFIWNLNFCVWNLMRSKSTKF

SEQ ID NO: 18508 - protein, 30 aa, Artificial Sequence
  Synthetic polypeptide
ERRLGSGPDSVTLGTYLWASCSLLEARSWK

SEQ ID NO: 18509 - protein, 102 aa, Artificial Sequence
  Synthetic polypeptide
KDVWVLVLTLLPLVRTCGHHVPCWKQDRGNERHHRAGDQPGEIHLRIYIGPCYSWRNCSATYLFCFHTKKPIQIPPGPPRPICDSICYLLQLSDPSLYDEVH

SEQ ID NO: 18510 - protein, 270 aa, Artificial Sequence
  Synthetic polypeptide
LCYPWYVPVGIMFLVGSKIVEMKDIIVLVTSLGKYIFASILGHVIHGGIVLPLIYFVFTRKNPFRFLLGLLAPFATAFATCSSSATLPSMMKCIEENNGVDKRISRFILPIGATVNMDGAAIFQCVAAVFIAQLNNVELNAGQIFTILVTATASSVGAAGVPAGGVLTIAIILEAIGLPTHDLPLILAVDWIVDRTTTVVNVEGDALGAGILHHLNQKATKKGEQELAEVKVEAIPNCKSEEETSPLVTHQNPAGPVASAPELESKESVL

SEQ ID NO: 18511 - protein, 70 aa, Artificial Sequence
  Synthetic polypeptide
CHMKKKRSQQSSVKECDDWRADGCLPSIVHPQPAGEAHQDGLAEEAEVHREELAAEVLCAEGAAALLLQG

SEQ ID NO: 18512 - protein, 70 aa, Artificial Sequence; identical to SEQ ID NO: 18511
  Synthetic polypeptide

SEQ ID NO: 18513 - protein, 70 aa, Artificial Sequence; identical to SEQ ID NO: 18511
  Synthetic polypeptide

SEQ ID NO: 18514 - protein, 70 aa, Artificial Sequence; identical to SEQ ID NO: 18511
  Synthetic polypeptide

SEQ ID NO: 18515 - protein, 70 aa, Artificial Sequence; identical to SEQ ID NO: 18511
  Synthetic polypeptide

SEQ ID NO: 18516 - protein, 70 aa, Artificial Sequence; identical to SEQ ID NO: 18511
  Synthetic polypeptide

SEQ ID NO: 18517 - protein, 70 aa, Artificial Sequence; identical to SEQ ID NO: 18511
  Synthetic polypeptide

SEQ ID NO: 18518 - protein, 632 aa, Artificial Sequence
  Synthetic polypeptide
RKKDLSKARSRSVMTGEQMAAFHPSSTPNPLERPIKMGWLKKQRSIVKNWQQRYFVLRAQQLYYYKDEEDTKPQGCMYLPGCTIKEIATNPEEAGKFVFEIIPASWDQNRMGQDSYVLMASSQAEMEEWVKFLRRVAGTPCGVFGQRLDETVAYEQKFGPHLVPILVEKCAEFILEHGRNEEGIFRLPGQDNLVKQLRDAFDAGERPSFDRDTDVHTVASLLKLYLRDLPEPVVPWSQYEGFLLCGQLTNADEAKAQQELMKQLSILPRDNYSLLSYICRFLHEIQLNCAVNKMSVDNLATVIGVNLIRSKVEDPAVIMRGTPQIQRVMTMMIRDHEVLFPKSKDIPLSPPAQKNDPKKAPVARSSVGWDATEDLRISRTDSFSSMTSDSDTTSPTGQQPSDAFPEDSSKVPREKPGDWKMQSRKRTQTLPNRKCFLTSAFQGANSSKMEIFKNEFWSPSSEAKAGEGHRRTMSQDLRQLSDSQRTSTYDNVPSLPGSPGEEASALSSQACDSKGDTLASPNSETGPGKKNSGEEEIDSLQRMVQELRKEIETQKQMYEEQIKNLEKENYDVWAKVVRLNEELEKEKKKSAALEISLRNMERSREDVEKRNKALEEEVKEFVKSMKEPKTEA

SEQ ID NO: 18519 - protein, 632 aa, Artificial Sequence; identical to SEQ ID NO: 18518
  Synthetic polypeptide

SEQ ID NO: 18520 - protein, 25 aa, Artificial Sequence
  Synthetic polypeptide
YKRTLNNNLMPYEEKKISAKLGQGV

SEQ ID NO: 18521 - protein, 25 aa, Artificial Sequence
  Synthetic polypeptide
YKRTLNNNLMPYEEKKISAKLGQGV

SEQ ID NO: 18522 - protein, 25 aa, Artificial Sequence
  Synthetic polypeptide
YKRTLNNNLMPYEEKKISAKLGQGV

SEQ ID NO: 18523 - protein, 25 aa, Artificial Sequence
  Synthetic polypeptide
YKRTLNNNLMPYEEKKISAKLGQGV

SEQ ID NO: 18524 - protein, 25 aa, Artificial Sequence
  Synthetic polypeptide
YKRTLNNNLMPYEEKKISAKLGQGV

SEQ ID NO: 18525 - protein, 25 aa, Artificial Sequence
  Synthetic polypeptide
YKRTLNNNLMPYEEKKISAKLGQGV

SEQ ID NO: 18526 - protein, 25 aa, Artificial Sequence
  Synthetic polypeptide
YKRTLNNNLMPYEEKKISAKLGQGV

SEQ ID NO: 18527 - protein, 25 aa, Artificial Sequence
  Synthetic polypeptide
YKRTLNNNLMPYEEKKISAKLGQGV

SEQ ID NO: 18528 - protein, 633 aa, Artificial Sequence
  Synthetic polypeptide
RKKDLSKARSRSVMTGEQMAAFHPSSTPNPLERPIKMGWLKKQRSIVKNWQQRYFVLRAQQLYYYKDEEDTKPQGCMYLPGCTIKEIATNPEEAGKFVFEIIPASWDQNRMGQDSYVLMASSQAEMEEWVKFLRRVAGTPCGAVFGQRLDETVAYEQKFGPHLVPILVEKCAEFILEHGRNEEGIFRLPGQDNLVKQLRDAFDAGERPSFDRDTDVHTVASLLKLYLRDLPEPVVPWSQYEGFLLCGQLTNADEAKAQQELMKQLSILPRDNYSLLSYICRFLHEIQLNCAVNKMSVDNLATVIGVNLIRSKVEDPAVIMRGTPQIQRVMTMMIRDHEVLFPKSKDIPLSPPAQKNDPKKAPVARSSVGWDATEDLRISRTDSFSSMTSDSDTTSPTGQQPSDAFPEDSSKVPREKPGDWKMQSRKRTQTLPNRKCFLTSAFQGANSSKMEIFKNEFWSPSSEAKAGEGHRRTMSQDLRQLSDSQRTSTYDNVPSLPGSPGEEASALSSQACDSKGDTLASPNSETGPGKKNSGEEEIDSLQRMVQELRKEIETQKQMYEEQIKNLEKENYDVWAKVVRLNEELEKEKKKSAALEISLRNMERSREDVEKRNKALEEEVKEFVKSMKEPKTEA

SEQ ID NO: 18529 - protein, 633 aa, Artificial Sequence; identical to SEQ ID NO: 18528
  Synthetic polypeptide

SEQ ID NO: 18530 - protein, 593 aa, Artificial Sequence
  Synthetic polypeptide
RKKDLSKARSRSVMTGEQMAAFHPSSTPNPLERPIKMGWLKKQRSIVKNWQQRYFVLRAQQLYYYKDEEDTKPQGCMYLPGCTIKEIATNPEEAGKFVFEIIPVFGQRLDETVAYEQKFGPHLVPILVEKCAEFILEHGRNEEGIFRLPGQDNLVKQLRDAFDAGERPSFDRDTDVHTVASLLKLYLRDLPEPVVPWSQYEGFLLCGQLTNADEAKAQQELMKQLSILPRDNYSLLSYICRFLHEIQLNCAVNKMSVDNLATVIGVNLIRSKVEDPAVIMRGTPQIQRVMTMMIRDHEVLFPKSKDIPLSPPAQKNDPKKAPVARSSVGWDATEDLRISRTDSFSSMTSDSDTTSPTGQQPSDAFPEDSSKVPREKPGDWKMQSRKRTQTLPNRKCFLTSAFQGANSSKMEIFKNEFWSPSSEAKAGEGHRRTMSQDLRQLSDSQRTSTYDNVPSLPGSPGEEASALSSQACDSKGDTLASPNSETGPGKKNSGEEEIDSLQRMVQELRKEIETQKQMYEEQIKNLEKENYDVWAKVVRLNEELEKEKKKSAALEISLRNMERSREDVEKRNKALEEEVKEFVKSMKEPKTEA

SEQ ID NO: 18531 - protein, 126 aa, Artificial Sequence
  Synthetic polypeptide
RKKDLSKARSRSVMTGEQMAAFHPSSTPNPLERPIKMGWLKKQRSIVKNWQQRYFVLRAQQLYYYKDEEDTKPQQCLASAWMRLWPMNRNSAPIWCPSWWRNVQSSSWSTAGMKRASSVCLGRTTW

SEQ ID NO: 18532 - protein, 74 aa, Artificial Sequence
  Synthetic polypeptide
CHMKKKRSQQSSVKECDDWRADGCLPSIVHPQPAGEAHQDGLAEEAEVHREELAAEWSSRKHQDGHCGVSYTWL

SEQ ID NO: 18533 - protein, 79 aa, Artificial Sequence
  Synthetic polypeptide
RKKDLSKARSRSVMTGEQMAAFHPSSTPNPLERPIKMGWLKKQRSIVKNWQQSGPPGSTRTGTVEFPTHGSESRLATGR

SEQ ID NO: 18534 - protein, 452 aa, Artificial Sequence
  Synthetic polypeptide
RKKDLSKARSRSVMTGEQMAAFHPSSTPNPLERPIKMGWLKKQRSIVKNWQQRYFVLRAQQLYYYKDEEDTKPQGCMYLPGCTIKEIATNPEEAGKFVFEIIPASWDQNRMGQDSYVLMASSQAEMEEWVKFLRRVAGTPCGAVFGQRLDETVAYEQKFGPHLVPILVEKCAEFILEHGRNEEGIFRLPGQDNLVKQLRDAFDAGERPSFDRDTDVHTVASLLKLYLRDLPEPVVPWSQYEGFLLCGQLTNADEAKAQQELMKQLSILPRDNYSLLSYICRFLHEIQLNCAVNKMSVDNLATVIGVNLIRSKVEDPAVIMRGTPQIQRVMTMMIRDHEVLFPKSKDIPLSPPAQKNDPKKAPVARSSVGWDATEDLRISRTDSFSSMVRCREPSCFHWVLPLVQAIPCKACSRVAIWGVLGDAVAVGAAATDSSEHTLKAWPLSKSSFYWHL

SEQ ID NO: 18535 - protein, 31 aa, Artificial Sequence
  Synthetic polypeptide
KKDWKDIHTSKRVTHLETTGKYCLFSVEEMI

SEQ ID NO: 18536 - protein, 31 aa, Artificial Sequence; identical to SEQ ID NO: 18535
  Synthetic polypeptide

SEQ ID NO: 18537 - protein, 31 aa, Artificial Sequence; identical to SEQ ID NO: 18535
  Synthetic polypeptide

SEQ ID NO: 18538 - protein, 15 aa, Artificial Sequence
  Synthetic polypeptide
IHRKKTGRTFTHQNG

SEQ ID NO: 18539 - protein, 15 aa, Artificial Sequence
  Synthetic polypeptide
IHRKKTGRTFTHQNG

SEQ ID NO: 18540 - protein, 15 aa, Artificial Sequence
  Synthetic polypeptide
IHRKKTGRTFTHQNG

SEQ ID NO: 18541 - protein, 49 aa, Artificial Sequence
  Synthetic polypeptide
KSRTQNTTVLSHWVSRYIEKRLEGHSHIKTGDTSGDYRKVLLVLCGGDD

SEQ ID NO: 18542 - protein, 49 aa, Artificial Sequence; identical to SEQ ID NO: 18541
  Synthetic polypeptide

SEQ ID NO: 18543 - protein, 49 aa, Artificial Sequence; identical to SEQ ID NO: 18541
  Synthetic polypeptide

SEQ ID NO: 18544 - protein, 20 aa, Artificial Sequence
  Synthetic polypeptide
FHLLDPRSTPPSTCSLPCRG

SEQ ID NO: 18545 - protein, 20 aa, Artificial Sequence
  Synthetic polypeptide
FHLLDPRSTPPSTCSLPCRG

SEQ ID NO: 18546 - protein, 68 aa, Artificial Sequence
  Synthetic polypeptide
EDNFISWILDLPPHQRAPFPVAADEVSHWGRHDKKGPWRCLQPAVRLLCHREGRAGHEGSSWGGGAHL

SEQ ID NO: 18547 - protein, 68 aa, Artificial Sequence; identical to SEQ ID NO: 18546
  Synthetic polypeptide

SEQ ID NO: 18548 - protein, 49 aa, Artificial Sequence
  Synthetic polypeptide
GTTGEAADVGRPISEGPGAAWTSLQHHPTESQKVFPALYYLEYQRCDPG

SEQ ID NO: 18549 - protein, 49 aa, Artificial Sequence; identical to SEQ ID NO: 18548
  Synthetic polypeptide

SEQ ID NO: 18550 - protein, 49 aa, Artificial Sequence; identical to SEQ ID NO: 18548
  Synthetic polypeptide

SEQ ID NO: 18551 - protein, 49 aa, Artificial Sequence; identical to SEQ ID NO: 18548
  Synthetic polypeptide

SEQ ID NO: 18552 - protein, 49 aa, Artificial Sequence; identical to SEQ ID NO: 18548
  Synthetic polypeptide

SEQ ID NO: 18553 - protein, 49 aa, Artificial Sequence; identical to SEQ ID NO: 18548
  Synthetic polypeptide

SEQ ID NO: 18554 - protein, 49 aa, Artificial Sequence; identical to SEQ ID NO: 18548
  Synthetic polypeptide

SEQ ID NO: 18555 - protein, 49 aa, Artificial Sequence; identical to SEQ ID NO: 18548
  Synthetic polypeptide

SEQ ID NO: 18556 - protein, 49 aa, Artificial Sequence; identical to SEQ ID NO: 18548
  Synthetic polypeptide

SEQ ID NO: 18557 - protein, 49 aa, Artificial Sequence; identical to SEQ ID NO: 18548
  Synthetic polypeptide

SEQ ID NO: 18558 - protein, 49 aa, Artificial Sequence; identical to SEQ ID NO: 18548
  Synthetic polypeptide

SEQ ID NO: 18559 - protein, 303 aa, Artificial Sequence
  Synthetic polypeptide
AQQGKLQMWVDLFPKALGRPGPPFNITPRRARRFFLRCIIWNTRDVILDDLSLTGEKMSDIYVKGWMIGFEEHKQKTDVHYRSLGGEGNFNWRFIFPFDYLPAEQVCTIAKKDAFWRLDKTESKIPARVVFQIWDNDKFSFDDFLGSLQLDLNRMPKPAKTAKKCSLDQLDDAFHPEWFVSLFEQKTVKGWWPCVAEEGEKKILAGKLEMTLEIVAESEHEERPAGQGRDEPNMNPKLEDPRRPDTSFLWFTSPYKTMKFILWRRFRWAIILFIILFILLLFLAIFIYAFPNYAAMKLVKPFS

SEQ ID NO: 18560 - protein, 303 aa, Artificial Sequence; identical to SEQ ID NO: 18559
  Synthetic polypeptide

SEQ ID NO: 18561 - protein, 303 aa, Artificial Sequence; identical to SEQ ID NO: 18559
  Synthetic polypeptide

SEQ ID NO: 18562 - protein, 303 aa, Artificial Sequence; identical to SEQ ID NO: 18559
  Synthetic polypeptide

SEQ ID NO: 18563 - protein, 303 aa, Artificial Sequence; identical to SEQ ID NO: 18559
  Synthetic polypeptide

SEQ ID NO: 18564 - protein, 303 aa, Artificial Sequence; identical to SEQ ID NO: 18559
  Synthetic polypeptide

SEQ ID NO: 18565 - protein, 303 aa, Artificial Sequence; identical to SEQ ID NO: 18559
  Synthetic polypeptide

SEQ ID NO: 18566 - protein, 303 aa, Artificial Sequence; identical to SEQ ID NO: 18559
  Synthetic polypeptide

SEQ ID NO: 18567 - protein, 303 aa, Artificial Sequence; identical to SEQ ID NO: 18559
  Synthetic polypeptide

SEQ ID NO: 18568 - protein, 303 aa, Artificial Sequence; identical to SEQ ID NO: 18559
  Synthetic polypeptide

SEQ ID NO: 18569 - protein, 303 aa, Artificial Sequence; identical to SEQ ID NO: 18559
  Synthetic polypeptide

SEQ ID NO: 18570 - protein, 45 aa, Artificial Sequence
  Synthetic polypeptide
HNRGSCRCGSTYFRRPWGGLDLPSTSPHGEPEGFSCVVLSGIPEM

SEQ ID NO: 18571 - protein, 45 aa, Artificial Sequence; identical to SEQ ID NO: 18570
  Synthetic polypeptide

SEQ ID NO: 18572 - protein, 45 aa, Artificial Sequence; identical to SEQ ID NO: 18570
  Synthetic polypeptide

SEQ ID NO: 18573 - protein, 45 aa, Artificial Sequence; identical to SEQ ID NO: 18570
  Synthetic polypeptide

SEQ ID NO: 18574 - protein, 45 aa, Artificial Sequence; identical to SEQ ID NO: 18570
  Synthetic polypeptide

SEQ ID NO: 18575 - protein, 45 aa, Artificial Sequence; identical to SEQ ID NO: 18570
  Synthetic polypeptide

SEQ ID NO: 18576 - protein, 45 aa, Artificial Sequence; identical to SEQ ID NO: 18570
  Synthetic polypeptide

SEQ ID NO: 18577 - protein, 45 aa, Artificial Sequence; identical to SEQ ID NO: 18570
  Synthetic polypeptide

SEQ ID NO: 18578 - protein, 45 aa, Artificial Sequence; identical to SEQ ID NO: 18570
  Synthetic polypeptide

SEQ ID NO: 18579 - protein, 45 aa, Artificial Sequence; identical to SEQ ID NO: 18570
  Synthetic polypeptide

SEQ ID NO: 18580 - protein, 45 aa, Artificial Sequence; identical to SEQ ID NO: 18570
  Synthetic polypeptide

SEQ ID NO: 18581 - protein, 170 aa, Artificial Sequence
  Synthetic polypeptide
AKITPLHSSLGNRLHQICCCTQHWCRRPPTSKTGPCICCTVLRKRTAWPAQPAQPTGPMVTGVCSDSPPRSTTWDELTSGPRLGATPGCGTSAMGITTAWTSSLTMISSPQMAPRWLRATKLVSVSKTLSVRRMSPSGMSVPTLESKASLWVAGISTGMTLTVSGLTSRM

SEQ ID NO: 18582 - protein, 170 aa, Artificial Sequence; identical to SEQ ID NO: 18581
  Synthetic polypeptide

SEQ ID NO: 18583 - protein, 170 aa, Artificial Sequence; identical to SEQ ID NO: 18581
  Synthetic polypeptide

SEQ ID NO: 18584 - protein, 170 aa, Artificial Sequence; identical to SEQ ID NO: 18581
  Synthetic polypeptide

SEQ ID NO: 18585 - protein, 98 aa, Artificial Sequence
  Synthetic polypeptide
SQLLGRLRQENHLNPGGRGCSEPRSRRCIPASATDCIRSVAALSTGAGDRLHRRPAPAYVVLCCGRELPGQLSPLSQLALWSPASAPILLPDPQPGTS

SEQ ID NO: 18586 - protein, 98 aa, Artificial Sequence; identical to SEQ ID NO: 18585
  Synthetic polypeptide

SEQ ID NO: 18587 - protein, 98 aa, Artificial Sequence; identical to SEQ ID NO: 18585
  Synthetic polypeptide

SEQ ID NO: 18588 - protein, 98 aa, Artificial Sequence; identical to SEQ ID NO: 18585
  Synthetic polypeptide

SEQ ID NO: 18589 - protein, 248 aa, Artificial Sequence
  Synthetic polypeptide
TQVAEVAVSQDHAAAFQPRQQTASDLLLHSALVQETAYIEDRPLHMLYCAAEENCLASSARSANWPYGHRRLLRFSSQIHNLGRADFRPKAGRHSWVWHECHGHYHSMDIFTHYDILTPNGTKVAEGHKASFCLEDTECQEDVSKRYECANFGEQGITVGCWDLYRHDIDCQWIDITDVKPGNYILQVVINPNFEVAESDFTNNAMKCNCKYDGHRIWVHNCHIGDAFSEEANRRFERYPGQTSNQII

SEQ ID NO: 18590 - protein, 248 aa, Artificial Sequence; identical to SEQ ID NO: 18589
  Synthetic polypeptide

SEQ ID NO: 18591 - protein, 248 aa, Artificial Sequence; identical to SEQ ID NO: 18589
  Synthetic polypeptide

SEQ ID NO: 18592 - protein, 226 aa, Artificial Sequence
  Synthetic polypeptide
TQVAEVAVSQDHAAAFQPRQQTASDLLLHSALVQETAYIEDRPLHMLYCAAEENCLASSARSANWPYGHRRLLRFSSQIHNLGRADFRPKAGRHSWVWHECHGHYHSMDIFTHYDILTPNGTKVAEGHKASFCLEDTECQEDVSKRYECANFGEQGITVGCWDLYRHDIDCQWIDITDVKPGNYILQVVINPNFEVAESDFTNNAMKCNCKYDGHRIWVHNCHIGI

SEQ ID NO: 18593 - protein, 87 aa, Artificial Sequence
  Synthetic polypeptide
LNFLAFIFLPCCMLPALEHQTPSSSAFGLLDLHEWFARGSWAFSHRLKAALSASLLLRFWDSDWLPCSTACRRPIVGLHLVIVCHTT

SEQ ID NO: 18594 - protein, 87 aa, Artificial Sequence; identical to SEQ ID NO: 18593
  Synthetic polypeptide

SEQ ID NO: 18595 - protein, 87 aa, Artificial Sequence; identical to SEQ ID NO: 18593
  Synthetic polypeptide

SEQ ID NO: 18596 - protein, 14 aa, Artificial Sequence
  Synthetic polypeptide
SYATPHEALAILQL

SEQ ID NO: 18597 - protein, 14 aa, Artificial Sequence
  Synthetic polypeptide
SYATPHEALAILQL

SEQ ID NO: 18598 - protein, 14 aa, Artificial Sequence
  Synthetic polypeptide
SYATPHEALAILQL

SEQ ID NO: 18599 - protein, 167 aa, Artificial Sequence
  Synthetic polypeptide
SRQKKVECGDLTEFSGLHLSPMLHASCSRTSDSKFFSLWTLGLTRMVCQGLLGLQPQTEGCTVCFPTFEVLGLGLAPLLHSLQTAYCGTSSCDRMPHHMKPLPYYSYDQPVIGYCQAHQPLHVTKGYETVSPEQDESPGLELGRDHSFIATIARSAAPAIYLERIAN

SEQ ID NO: 18600 - protein, 167 aa, Artificial Sequence; identical to SEQ ID NO: 18599
  Synthetic polypeptide

SEQ ID NO: 18601 - protein, 167 aa, Artificial Sequence; identical to SEQ ID NO: 18599
  Synthetic polypeptide

SEQ ID NO: 18602 - protein, 51 aa, Artificial Sequence
  Synthetic polypeptide
HWEHDFGNFTYHSEMGPQKFGNPDANSGKAVGATCYTGDYTCQHKQQRPIW

SEQ ID NO: 18603 - protein, 917 aa, Artificial Sequence
  Synthetic polypeptide
WHSQQHSLSTGSMTSATSPIILKWDPKSLEIRTLTVERLLEPLVTQVTTLVNTSNKGPSGKKKGRSKKAHVLAASVEQATQNFLEKGEQIAKESQDLKEELVAAVEDVRKQGETMRIASSEFADDPCSSVKRGTMVRAARALLSAVTRLLILADMADVMRLLSHLKIVEEALEAVKNATNEQDLANRFKEFGKEMVKLNYVAARRQQELKDPHCRDEMAAARGALKKNATMLYTASQAFLRHPDVAATRANRDYVFKQVQEAIAGISNAAQATSPTDEAKGHTGIGELAAALNEFDNKIILDPMTFSEARFRPSLEERLESIISGAALMADSSCTRDDRRERIVAECNAVRQALQDLLSEYMNNTGRKEKGDPLNIAIDKMTKKTRDLRRQLRKAVMDHISDSFLETNVPLLVLIEAAKSGNEKEVKEYAQVFREHANKLVEVANLACSISNNEEGVKLVRMAATQIDSLCPQVINAALTLAARPQSKVAQDNMDVFKDQWEKQVRVLTEAVDDITSVDDFLSVSENHILEDVNKCVIALQEGDVDTLDRTAGAIRGRAARVIHIINAEMENYEAGVYTEKVLEATKLLSETVMPRFAEQVEVAIEALSANVPQPFEENEFIDASRLVYDGVRDIRKAVLMIRTPEELEDDSDFEQEDYDVRSRTSVQTEDDQLIAGQSARAIMAQLPQEEKAKIAEQVEIFHQEKSKLDAEVAKWDDSGNDIIVLAKQMCMIMMEMTDFTRGKGPLKNTSDVINAAKKIAEAGSRMDKLARAVADQCPDSACKQDLLAYLQRIALYCHQLNICSKVKAEVQNLGGELIVSGLDSATSLIQAAKNLMNAVVLTVKASYVASTKYQKVYGTAAVNSPVVSWKMKAPEKKPLVKREKPEEFQTRVRRGSQKKHISPVQALSEFKAMDSF

SEQ ID NO: 18604 - protein, 19 aa, Artificial Sequence
  Synthetic polypeptide
LRWALLDGTPSSTALALGA

SEQ ID NO: 18605 - protein, 909 aa, Artificial Sequence
  Synthetic polypeptide
TGGSMTSATSPIILKWDPKSLEIRTLTVERLLEPLVTQVTTLVNTSNKGPSGKKKGRSKKAHVLAASVEQATQNFLEKGEQIAKESQDLKEELVAAVEDVRKQGETMRIASSEFADDPCSSVKRGTMVRAARALLSAVTRLLILADMADVMRLLSHLKIVEEALEAVKNATNEQDLANRFKEFGKEMVKLNYVAARRQQELKDPHCRDEMAAARGALKKNATMLYTASQAFLRHPDVAATRANRDYVFKQVQEAIAGISNAAQATSPTDEAKGHTGIGELAAALNEFDNKIILDPMTFSEARFRPSLEERLESIISGAALMADSSCTRDDRRERIVAECNAVRQALQDLLSEYMNNTGRKEKGDPLNIAIDKMTKKTRDLRRQLRKAVMDHISDSFLETNVPLLVLIEAAKSGNEKEVKEYAQVFREHANKLVEVANLACSISNNEEGVKLVRMAATQIDSLCPQVINAALTLAARPQSKVAQDNMDVFKDQWEKQVRVLTEAVDDITSVDDFLSVSENHILEDVNKCVIALQEGDVDTLDRTAGAIRGRAARVIHIINAEMENYEAGVYTEKVLEATKLLSETVMPRFAEQVEVAIEALSANVPQPFEENEFIDASRLVYDGVRDIRKAVLMIRTPEELEDDSDFEQEDYDVRSRTSVQTEDDQLIAGQSARAIMAQLPQEEKAKIAEQVEIFHQEKSKLDAEVAKWDDSGNDIIVLAKQMCMIMMEMTDFTRGKGPLKNTSDVINAAKKIAEAGSRMDKLARAVADQCPDSACKQDLLAYLQRIALYCHQLNICSKVKAEVQNLGGELIVSGLDSATSLIQAAKNLMNAVVLTVKASYVASTKYQKVYGTAAVNSPVVSWKMKAPEKKPLVKREKPEEFQTRVRRGSQKKHISPVQALSEFKAMDSF

SEQ ID NO: 18606 - protein, 19 aa, Artificial Sequence
  Synthetic polypeptide
ATFSTVLYCSSLIYKREGA

SEQ ID NO: 18607 - protein, 74 aa, Artificial Sequence
  Synthetic polypeptide
RFNFDDHEQLSLLFYTAVPSFINGREHDFGNFTYHSEMGPQKFGNPDANSGKAVGATCYTGDYTCQHKQQRPIW

SEQ ID NO: 18608 - protein, 15 aa, Artificial Sequence
  Synthetic polypeptide
EGDYTCQHKQQRPIW

SEQ ID NO: 18609 - protein, 15 aa, Artificial Sequence
  Synthetic polypeptide
EGDYTCQHKQQRPIW

SEQ ID NO: 18610 - protein, 15 aa, Artificial Sequence
  Synthetic polypeptide
EGDYTCQHKQQRPIW

SEQ ID NO: 18611 - protein, 15 aa, Artificial Sequence
  Synthetic polypeptide
EGDYTCQHKQQRPIW

SEQ ID NO: 18612 - protein, 15 aa, Artificial Sequence
  Synthetic polypeptide
EGDYTCQHKQQRPIW

SEQ ID NO: 18613 - protein, 15 aa, Artificial Sequence
  Synthetic polypeptide
EGDYTCQHKQQRPIW

SEQ ID NO: 18614 - protein, 15 aa, Artificial Sequence
  Synthetic polypeptide
EGDYTCQHKQQRPIW

SEQ ID NO: 18615 - protein, 15 aa, Artificial Sequence
  Synthetic polypeptide
EGDYTCQHKQQRPIW

SEQ ID NO: 18616 - protein, 887 aa, Artificial Sequence
  Synthetic polypeptide
KRMWLKQSAPGTTNKKVTTLVNTSNKGPSGKKKGRSKKAHVLAASVEQATQNFLEKGEQIAKESQDLKEELVAAVEDVRKQGETMRIASSEFADDPCSSVKRGTMVRAARALLSAVTRLLILADMADVMRLLSHLKIVEEALEAVKNATNEQDLANRFKEFGKEMVKLNYVAARRQQELKDPHCRDEMAAARGALKKNATMLYTASQAFLRHPDVAATRANRDYVFKQVQEAIAGISNAAQATSPTDEAKGHTGIGELAAALNEFDNKIILDPMTFSEARFRPSLEERLESIISGAALMADSSCTRDDRRERIVAECNAVRQALQDLLSEYMNNTGRKEKGDPLNIAIDKMTKKTRDLRRQLRKAVMDHISDSFLETNVPLLVLIEAAKSGNEKEVKEYAQVFREHANKLVEVANLACSISNNEEGVKLVRMAATQIDSLCPQVINAALTLAARPQSKVAQDNMDVFKDQWEKQVRVLTEAVDDITSVDDFLSVSENHILEDVNKCVIALQEGDVDTLDRTAGAIRGRAARVIHIINAEMENYEAGVYTEKVLEATKLLSETVMPRFAEQVEVAIEALSANVPQPFEENEFIDASRLVYDGVRDIRKAVLMIRTPEELEDDSDFEQEDYDVRSRTSVQTEDDQLIAGQSARAIMAQLPQEEKAKIAEQVEIFHQEKSKLDAEVAKWDDSGNDIIVLAKQMCMIMMEMTDFTRGKGPLKNTSDVINAAKKIAEAGSRMDKLARAVADQCPDSACKQDLLAYLQRIALYCHQLNICSKVKAEVQNLGGELIVSGLDSATSLIQAAKNLMNAVVLTVKASYVASTKYQKVYGTAAVNSPVVSWKMKAPEKKPLVKREKPEEFQTRVRRGSQKKHISPVQALSEFKAMDSF

SEQ ID NO: 18617 - protein, 887 aa, Artificial Sequence; identical to SEQ ID NO: 18616
  Synthetic polypeptide

SEQ ID NO: 18618 - protein, 887 aa, Artificial Sequence; identical to SEQ ID NO: 18616
  Synthetic polypeptide

SEQ ID NO: 18619 - protein, 887 aa, Artificial Sequence; identical to SEQ ID NO: 18616
  Synthetic polypeptide

SEQ ID NO: 18620 - protein, 11 aa, Artificial Sequence
  Synthetic polypeptide
NSLPQEQPIRR

SEQ ID NO: 18621 - protein, 11 aa, Artificial Sequence
  Synthetic polypeptide
NSLPQEQPIRR

SEQ ID NO: 18622 - protein, 11 aa, Artificial Sequence
  Synthetic polypeptide
NSLPQEQPIRR

SEQ ID NO: 18623 - protein, 11 aa, Artificial Sequence
  Synthetic polypeptide
NSLPQEQPIRR

SEQ ID NO: 18624 - protein, 11 aa, Artificial Sequence
  Synthetic polypeptide
NSLPQEQPIRR

SEQ ID NO: 18625 - protein, 11 aa, Artificial Sequence
  Synthetic polypeptide
NSLPQEQPIRR

SEQ ID NO: 18626 - protein, 11 aa, Artificial Sequence
  Synthetic polypeptide
NSLPQEQPIRR

SEQ ID NO: 18627 - protein, 11 aa, Artificial Sequence
  Synthetic polypeptide
NSLPQEQPIRR

SEQ ID NO: 18628 - protein, 48 aa, Artificial Sequence
  Synthetic polypeptide
KRMWLKQSAPGTTNKKVTTLVNTSNKGPSGKKKGRSKKAHVLAASVEQ

SEQ ID NO: 18629 - protein, 99 aa, Artificial Sequence
  Synthetic polypeptide
KRMWLKQSAPGTTNKKVTTLVNTSNKGPSGKKKGRSKKAHVLAASVEQATQNFLEKGEQIAKESQDLKEELVAAVEDVRKQGETMRIASSEFADDPCSS

SEQ ID NO: 18630 - protein, 935 aa, Artificial Sequence
  Synthetic polypeptide
KRMWLKQSAPGTTNKKVTTLVNTSNKGPSGKKKGRSKKAHVLAASVEQATQNFLEKGEQIAKESQDLKEELVAAVEDVRKQGETMRIASSEFADDPCSSVKRGTMVRAARALLSAVTRLLILADMADVMRLLSHLKIVEEALEAVKNATNEQDLANRFKEFGKEMVKLNYVAARRQQELKDPHCRDEMAAARGALKKNATMLYTASQAFLRHPDVAATRANRDYVFKQVQEAIAGISNAAQATSPTDEAKGHTGIGELAAALNEFDNKIILDPMTFSEARFRPSLEERLESIISGAALMADSSCTRDDRRERIVAECNAVRQALQDLLSEYMNNTGRKEKGDPLNIAIDKMTKKTRDLRRQLRKAVMDHISDSFLETNVPLLVLIEAAKSGNEKEVKEYAQVFREHANKLVEVANLACSISNNEEGVKLVRMAATQIDSLCPQVINAALTLAARPQSKVAQDNMDVFKDQWEKQVRVLTEAVDDITSVDDFLSVSENHILEDVNKCVIALQEGDVDTLDRTAGAIRGRAARVIHIINAEMENYEAGVYTEKVLEATKLLSETVMPRFAEQVEVAIEALSANVPQPFEENEFIDASRLVYDGVRDIRKAVLMIRTPEELEDDSDFEQEDYDVRSRTSVQTEDDQLIAGQSARAIMAQLPQEEKAKIAEQVEIFHQEKSKLDAEVAKWDDSGNDIIVLAKQMCMIMMEMTDFTRGKGPLKNTSDVINAAKKIAEAGSRMDKLARAVADQCPDSACKQDLLAYLQRIALYCHQLNICSKVKAEVQNLGGELIVSGTGVQSTFTTFYEVDCDVIDGGRASQLSTHLPTCAEGAPIGSGSSDSSMLDSATSLIQAAKNLMNAVVLTVKASYVASTKYQKVYGTAAVNSPVVSWKMKAPEKKPLVKREKPEEFQTRVRRGSQKKHISPVQALSEFKAMDSF

SEQ ID NO: 18631 - protein, 842 aa, Artificial Sequence
  Synthetic polypeptide
KRMWLKQSAPGTTNKKVTTLVNTSNKGPSGKKKGRSKKAHVLAASVEQATQNFLEKGEQIAKESQDLKEELVAAVEDVRKQGETMRIASSEFADDPCSSVKRGTMVRAARALLSAVTRLLILADMADVMRLLSHLKIVEEALEAVKNATNEQDLANRFKEFGKEMVKLNYVAARRQQELKDPHCRDEMAAARGALKKNATMLYTASQAFLRHPDVAATRANRDYVFKQVQEAIAGISNAAQATSPTDEAKGHTGIGELAAALNEFDNKIILDPMTFSEARFRPSLEERLESIISGAALMADSSCTRDDRRERIVAECNAVRQALQDLLSEYMNNTGRKEKGDPLNIAIDKMTKKTRDLRRQLRKAVMDHISDSFLETNVPLLVLIEAAKSGNEKEVKEYAQVFREHANKLVEVANLACSISNNEEGVKLVRMAATQIDSLCPQVINAALTLAARPQSKVAQDNMDVFKDQWEKQVRVLTEAVDDITSVDDFLSVSENHILEDVNKCVIALQEGDVDTLDRTAGAIRGRAARVIHIINAEMENYEAGVYTEKVLEATKLLSETVMPRFAEQVEVAIEALSANVPQPFEENEFIDASRLVYDGVRDIRKAVLMIRTPEELEDDSDFEQEDYDVRSRTSVQTEDDQLIAGQSARAIMAQLPQEEKAKIAEQVEIFHQEKSKLDAEVAKWDDSGNDIIVLAKQMCMIMMEMTDFTRGKGPLKNTSDVINAAKKIAEAGSRMDKLARAVADQLDSATSLIQAAKNLMNAVVLTVKASYVASTKYQKVYGTAAVNSPVVSWKMKAPEKKPLVKREKPEEFQTRVRRGSQKKHISPVQALSEFKAMDSF

SEQ ID NO: 18632 - protein, 8 aa, Artificial Sequence
  Synthetic polypeptide
WNLVQREE

SEQ ID NO: 18633 - protein, 8 aa, Artificial Sequence
  Synthetic polypeptide
WNLVQREE

SEQ ID NO: 18634 - protein, 149 aa, Artificial Sequence
  Synthetic polypeptide
GTLCRGKSKKTSTRPTLSTIFAPKVPTLEVPAPEAVSSGHSTLPPLVSRPGSADTPSEAEQRFRKKRRRSQRRPRLRQFSDLWVRLEESDIVPQLQVPVLDRHISTELRLPRRGHSHHSQMVASSACLSLWTPVFWVLVLAFQTETPLL

SEQ ID NO: 18635 - protein, 149 aa, Artificial Sequence; identical to SEQ ID NO: 18634
  Synthetic polypeptide

SEQ ID NO: 18636 - protein, 90 aa, Artificial Sequence
  Synthetic polypeptide
EPCAEGRVKRPPHGPLCPPSLLQKSLPWKYRHQKPYPQGTQRCLPLCPGLEVPTRPVRPNRGSGRSGGGHSGGRDSGNSAICGSAWRRVT

SEQ ID NO: 18637 - protein, 90 aa, Artificial Sequence; identical to SEQ ID NO: 18636
  Synthetic polypeptide

SEQ ID NO: 18638 - protein, 186 aa, Artificial Sequence
  Synthetic polypeptide
CPGYPLSFVTSGHFMGNNTVLDVLRREGYEVEHAPAGRPIHKGKSKKTSTRPTLSTIFAPKVPTLEVPAPEAVSSGHSTLPPLVSRPGSADTPSEAEQRFRKKRRRSQRRPRLRQFSDLWVRLEESDIVPQLQVPVLDRHISTELRLPRRGHSHHSQMVASSACLSLWTPVFWVLVLAFQTETPLL

SEQ ID NO: 18639 - protein, 186 aa, Artificial Sequence; identical to SEQ ID NO: 18638
  Synthetic polypeptide

SEQ ID NO: 18640 - protein, 21 aa, Artificial Sequence
  Synthetic polypeptide
LQVISWATTQCWMFCGVKAMR

SEQ ID NO: 18641 - protein, 21 aa, Artificial Sequence
  Synthetic polypeptide
LQVISWATTQCWMFCGVKAMR

SEQ ID NO: 18642 - protein, 19 aa, Artificial Sequence
  Synthetic polypeptide
LCDFRSFHGQQHSAGCFAA

SEQ ID NO: 18643 - protein, 19 aa, Artificial Sequence
  Synthetic polypeptide
LCDFRSFHGQQHSAGCFAA

SEQ ID NO: 18644 - protein, 19 aa, Artificial Sequence
  Synthetic polypeptide
APGNQANFRMRVLLCFFSG

SEQ ID NO: 18645 - protein, 205 aa, Artificial Sequence
  Synthetic polypeptide
PNPGLKDQCVSLRGRVSKLPETKPIFACVFFFAFFLGKKKKRKREKQLSQTQSQQQVQEAEGALASKSKKPCVQYLPPEKPCDSPASSHGSMLDSPATPSAALASPAAPAATHSEQAQPLSLTTKPETRAQLALHSAAFLSAKAAASSSGQMGSQPPLLSRPLPLGSMPTALLASPPSFPATLHAHQALPVLQAQPLSLVTKSAH

SEQ ID NO: 18646 - protein, 195 aa, Artificial Sequence
  Synthetic polypeptide
ASGGVSLSSRKPSQFSHACSSLLFFWVRKRRGREKSSCPRHSHSSKSRRQRVPWPPRARSHVFSTCPPRSPVTALPPPTGACWTPRPLPLQLWPHQLPLLPPIRSKPSPSPSPPNQKPGPSWLSTLPPSCRLRLQPPPLGRWAASLPSCPGPSPLGPCPQLCWPLPRPSPPRSMPTRPSRCYRPSLFPWSPSLPT

SEQ ID NO: 18647 - protein, 37 aa, Artificial Sequence
  Synthetic polypeptide
PGTSHLTSLSLLFRVCEVGNRVGAVPAAGERGDGNYA

SEQ ID NO: 18648 - protein, 123 aa, Artificial Sequence
  Synthetic polypeptide
ASFSASVKWGIELERCQQQANEVTEIMRNNFGKVLERGVKLAELQQRSDQLLDMSSTFNKTTQNLAQKKCWENIRYRICVGLVVVGVLLIILIVLLVVFLPQSSDSSSAPRTQDAGIASGPGN

SEQ ID NO: 18649 - protein, 3 aa, Artificial Sequence
  Synthetic polypeptide
SGE

SEQ ID NO: 18650 - protein, 29 aa, Artificial Sequence
  Synthetic polypeptide
TGPGIWLGLGIWALPGHFSIGWTLKTWGW

SEQ ID NO: 18651 - protein, 29 aa, Artificial Sequence
  Synthetic polypeptide
TGPGIWLGLGIWALPGHFSIGWTLKTWGW

SEQ ID NO: 18652 - protein, 29 aa, Artificial Sequence
  Synthetic polypeptide
TGPGIWLGLGIWALPGHFSIGWTLKTWGW

SEQ ID NO: 18653 - protein, 29 aa, Artificial Sequence
  Synthetic polypeptide
TGPGIWLGLGIWALPGHFSIGWTLKTWGW

SEQ ID NO: 18654 - protein, 29 aa, Artificial Sequence
  Synthetic polypeptide
TGPGIWLGLGIWALPGHFSIGWTLKTWGW

SEQ ID NO: 18655 - protein, 19 aa, Artificial Sequence
  Synthetic polypeptide
MDLESGLVLESGLYQVTFQ

SEQ ID NO: 18656 - protein, 19 aa, Artificial Sequence
  Synthetic polypeptide
MDLESGLVLESGLYQVTFQ

SEQ ID NO: 18657 - protein, 19 aa, Artificial Sequence
  Synthetic polypeptide
MDLESGLVLESGLYQVTFQ

SEQ ID NO: 18658 - protein, 19 aa, Artificial Sequence
  Synthetic polypeptide
MDLESGLVLESGLYQVTFQ

SEQ ID NO: 18659 - protein, 19 aa, Artificial Sequence
  Synthetic polypeptide
MDLESGLVLESGLYQVTFQ

SEQ ID NO: 18660 - protein, 125 aa, Artificial Sequence
  Synthetic polypeptide
WTWNLAWSWNLGSTRSLFNRMDFEDLGLVVDWDHHLPPPAAKTVVENLPRTVIRGSQAELKCPVCLLEFEEEETAIEMPCHHLFHSSCILPWLSKTNSCPLCRYELPTDDDTYEEHRRDKVGADA

SEQ ID NO: 18661 - protein, 139 aa, Artificial Sequence
  Synthetic polypeptide
WTWNLAWSWNLGSTRSLFNRMDFEDLGLVVDWDHHLPPPAAKTVVENLPRTVIRGSQAELKCPVCLLEFEEEETAIEMPCHHLFHSSCILPWLSKTNSCPLCRYELPTDDDTYEEHRRDKARKQQQQHRLENLHGAMYT

SEQ ID NO: 18662 - protein, 89 aa, Artificial Sequence
  Synthetic polypeptide
WTWNLAWSWNLGSTRSLFNRMDFEDLGLVVDWDHHLPPPAAKTVVENLPRTVIRGSQAVFQVRWGQVSFRSGSLGGRACSSSPDQHSFL

SEQ ID NO: 18663 - protein, 64 aa, Artificial Sequence
  Synthetic polypeptide
WTWNLAWSWNLGSTRSLFNRMDFEDLGLVVDWDHHLPPPAAKTVVENLPRTVIRGSQAGGGDCH

SEQ ID NO: 18664 - protein, 173 aa, Artificial Sequence
  Synthetic polypeptide
WTWNLAWSWNLGSTRSLFNRMDFEDLGLVVDWDHHLPPPAAKTVVENLPRTVIRGSQAALTVPWAQYSSFFLFMDCWGMEEEWQLGAGEGGYQLMKIRPRLEHYSTFLRQIPVPCAAMSCPLMTTLMRSTDEIRLENSSSNTDWRTSMEPCTREEVGAECWPSASSLLTLNPH

SEQ ID NO: 18665 - protein, 20 aa, Artificial Sequence
  Synthetic polypeptide
LLTNPSPRKASKQCQVSTPM

SEQ ID NO: 18666 - protein, 20 aa, Artificial Sequence
  Synthetic polypeptide
LLTNPSPRKASKQCQVSTPM

SEQ ID NO: 18667 - protein, 20 aa, Artificial Sequence
  Synthetic polypeptide
LLTNPSPRKASKQCQVSTPM

SEQ ID NO: 18668 - protein, 20 aa, Artificial Sequence
  Synthetic polypeptide
LLTNPSPRKASKQCQVSTPM

SEQ ID NO: 18669 - protein, 13 aa, Artificial Sequence
  Synthetic polypeptide
LTPVPGRLLSNAK

SEQ ID NO: 18670 - protein, 13 aa, Artificial Sequence
  Synthetic polypeptide
LTPVPGRLLSNAK

SEQ ID NO: 18671 - protein, 13 aa, Artificial Sequence
  Synthetic polypeptide
LTPVPGRLLSNAK

SEQ ID NO: 18672 - protein, 13 aa, Artificial Sequence
  Synthetic polypeptide
LTPVPGRLLSNAK

SEQ ID NO: 18673 - protein, 20 aa, Artificial Sequence
  Synthetic polypeptide
CVSLGLYLAPFTLRIIPTRL

SEQ ID NO: 18674 - protein, 20 aa, Artificial Sequence
  Synthetic polypeptide
CVSLGLYLAPFTLRIIPTRL

SEQ ID NO: 18675 - protein, 20 aa, Artificial Sequence
  Synthetic polypeptide
CVSLGLYLAPFTLRIIPTRL

SEQ ID NO: 18676 - protein, 20 aa, Artificial Sequence
  Synthetic polypeptide
CVSLGLYLAPFTLRIIPTRL

SEQ ID NO: 18677 - protein, 20 aa, Artificial Sequence
  Synthetic polypeptide
CVSLGLYLAPFTLRIIPTRL

SEQ ID NO: 18678 - protein, 45 aa, Artificial Sequence
  Synthetic polypeptide
EGRLCCQAAWVQIPALHLADVSPWAYIWHPLPCVLFLQGCEIKGH

SEQ ID NO: 18679 - protein, 45 aa, Artificial Sequence; identical to SEQ ID NO: 18678
  Synthetic polypeptide

SEQ ID NO: 18680 - protein, 45 aa, Artificial Sequence; identical to SEQ ID NO: 18678
  Synthetic polypeptide

SEQ ID NO: 18681 - protein, 45 aa, Artificial Sequence; identical to SEQ ID NO: 18678
  Synthetic polypeptide

SEQ ID NO: 18682 - protein, 45 aa, Artificial Sequence; identical to SEQ ID NO: 18678
  Synthetic polypeptide

SEQ ID NO: 18683 - protein, 214 aa, Artificial Sequence
  Synthetic polypeptide
KAGSVVRLPGFRSQLCTWLMCLLGLIFGTLYPAYYSYKAVKSKDIKEYVKWMMYWIIFALFTTAETFTDIFLCWFPFYYELKIAFVAWLLSPYTKGSSLLYRKFVHPTLSSKEKEIDDCLVQAKDRSYDALVHFGKRGLNVAATAAVMAASKGQGALSERLRSFSMQDLTTIRGDGAPAPSGPPPPGSGRASGKHGQPKMSRSASESASSSGTA

SEQ ID NO: 18684 - protein, 214 aa, Artificial Sequence; identical to SEQ ID NO: 18683
  Synthetic polypeptide

SEQ ID NO: 18685 - protein, 156 aa, Artificial Sequence
  Synthetic polypeptide
KAGSVVRLPGFRSQLCTWLMCLLGLIFGTLYPAYYSYKAVKSKDIKEYVKWMMYWIIFALFTTAETFTDIFLCWDRVPYRRDCGASACRTSPPSGETAPLLPRAPHHRGLGGPAANTASLRCPGVLLRALAAQAPPRILRSRFRKKSTSSSATETT

SEQ ID NO: 18686 - protein, 133 aa, Artificial Sequence
  Synthetic polypeptide
KAGSVVRLPGFRSQLCTWLMCLLGLIFGTLYPAYYSYKAVKSKDIKEYVKWMMYWIIFALFTTAETFTDIFLCWDRVPYRRDCGASACRTSPPSGETAPLLPRAPHHRGLGGPAANTASLRCPGVLLRALAAQ

SEQ ID NO: 18687 - protein, 196 aa, Artificial Sequence
  Synthetic polypeptide
KAGSVVRLPGFRSQLCTWLMCLLGLIFGTLYPAYYSYKAVKSKDIKEYVKWMMYWIIFALFTTAETFTDIFLCWFPFYYELKIAFVAWLLSPYTKGSSLLYRKFVHPTLSSKEKEIDDCLVQAKDRSYDALVHFGKRGLNVAATAAVMAASKGQGALSERLRSFSMQDLTTIRGDGAPAPSGPPPPGSGRASGKHG

SEQ ID NO: 18688 - protein, 77 aa, Artificial Sequence
  Synthetic polypeptide
SQLLRRLRKENRLNPGGRGCGPLCSPITLGLLVAGVLVLLVSLGVAIHLCCRRRRARLRFMKQLRLHPLEKCSRMDY

SEQ ID NO: 18689 - protein, 47 aa, Artificial Sequence
  Synthetic polypeptide
TQEAEVAAHFVAPSPLACWWLASWFCWFPWEWPSTCAAGGGEPGFVS

SEQ ID NO: 18690 - protein, 47 aa, Artificial Sequence; identical to SEQ ID NO: 18689
  Synthetic polypeptide

SEQ ID NO: 18691 - protein, 47 aa, Artificial Sequence; identical to SEQ ID NO: 18689
  Synthetic polypeptide

SEQ ID NO: 18692 - protein, 28 aa, Artificial Sequence
  Synthetic polypeptide
QMPVIPATKEAEKGESLEPRRQRLRPTL

SEQ ID NO: 18693 - protein, 28 aa, Artificial Sequence
  Synthetic polypeptide
QMPVIPATKEAEKGESLEPRRQRLRPTL

SEQ ID NO: 18694 - protein, 28 aa, Artificial Sequence
  Synthetic polypeptide
QMPVIPATKEAEKGESLEPRRQRLRPTL

SEQ ID NO: 18695 - protein, 99 aa, Artificial Sequence
  Synthetic polypeptide
SQLLRRLRKENRLNPGGRGCGPLCSPITLGLLVAGVLVLLVSLGVAIHLCCRRRRARLRFMKQPQGEGISGTFVPQCLHGYYSNTTTSQKLLNPWILKT

SEQ ID NO: 18696 - protein, 66 aa, Artificial Sequence
  Synthetic polypeptide
SQLLRRLRKENRLNPGGRGCGPLCSPITLGLLVAGVLVLLVSLGVAIHLCCRRRRARLRFMKQFYK

SEQ ID NO: 18697 - protein, 8 aa, Artificial Sequence
  Synthetic polypeptide
PTELTLWI

SEQ ID NO: 18698 - protein, 182 aa, Artificial Sequence
  Synthetic polypeptide
YIDVGLLAYGIDPVDLDIYQSSHMVDYQPYRKHKYSRVTPQEQAKLDAQLRDKEFYRPIPNPNPKLTDGYPAFKRPHMTAKDLGLPGFFPSQEHEATREDERKFTSTCHFTYPASHDLHLAQGDPNQVLQSADFPCLVDPKHQPAAEMAKGYLLLPGCPCLHCHIVKVPILNRWGPLMPFYQ

SEQ ID NO: 18699 - protein, 113 aa, Artificial Sequence
  Synthetic polypeptide
QAVELSRTVAAPSVFIFPPSDEQLKSGTASVVCLLNNFYPREAKVQWKVDNALQSGNSQESVTEQDSKDSTYSLSSTLTLSKADYEKHKVYACEVTHQGLSSPVTKSFNRGEC

SEQ ID NO: 18700 - protein, 18 aa, Artificial Sequence
  Synthetic polypeptide
AELWLHHLSSSSRHLMSS

SEQ ID NO: 18701 - protein, 26 aa, Artificial Sequence
  Synthetic polypeptide
EPSSFLTGGGAEQNCGCTICLHLPAI

SEQ ID NO: 18702 - protein, 21 aa, Artificial Sequence
  Synthetic polypeptide
KETQWQWIWDRFHSHHQLPAV

SEQ ID NO: 18703 - protein, 45 aa, Artificial Sequence
  Synthetic polypeptide
WSLWHPLNKRRLSGSGSGTDFTLTISCLQSEDFATYYCQQYYSYP

SEQ ID NO: 18704 - protein, 37 aa, Artificial Sequence
  Synthetic polypeptide
IKGDSVAVDLGQISLSPSAACSLKILQLITVNSIIVT

SEQ ID NO: 18705 - protein, 21 aa, Artificial Sequence
  Synthetic polypeptide
KETQWQWIWDRFHSHHQQPAA

SEQ ID NO: 18706 - protein, 45 aa, Artificial Sequence
  Synthetic polypeptide
WSLWHPLNKRRLSGSGSGTDFTLTISSLQPEDFATYYCQQFNNYP

SEQ ID NO: 18707 - protein, 37 aa, Artificial Sequence
  Synthetic polypeptide
IKGDSVAVDLGQISLSPSAACSLKILQLITVNSLIIT

SEQ ID NO: 18708 - protein, 36 aa, Artificial Sequence
  Synthetic polypeptide
LIGGAWEMGGGGNLRSLILCSQTTIFSLYLISSSIR

SEQ ID NO: 18709 - protein, 36 aa, Artificial Sequence; identical to SEQ ID NO: 18708
  Synthetic polypeptide

SEQ ID NO: 18710 - protein, 847 aa, Artificial Sequence
  Synthetic polypeptide
RISAVGGTYAVISLGGGDWSWSLKSCVFANILSTFLVISIVAYWRCLGDGGRRKPEKLDSLLSDYDILSLSNIQQHSVRKRDLQTSTHVETLLTFSALKRHFKLYLTSSTERFSQNFKVVVVDGKNESEYTVKWQDFFTGHVVGEPDSRVLAHIRDDDVIIRINTDGAEYNIEPLWRFVNDTKDKRMLVYKSEDIKNVSRLQSPKVCGYLKVDNEELLPKGLVDREPPEELVHRVKRRADPDPMKNTCKLLVVADHRFYRYMGRGEESTTTNYLIELIDRVDDIYRNTSWDNAGFKGYGIQIEQIRILKSPQEVKPGEKHYNMAKSYPNEEKDAWDVKMLLEQFSFDIAEEASKVCLAHLFTYQDFDMGTLGLAYVGSPRANSHGGVCPKAYYSPVGKKNIYLNSGLTSTKNYGKTILTKEADLVTTHELGHNFGAEHDPDGLAECAPNEDQGGKYVMYPIAVSGDHENNKMFSNCSKQSIYKTIESKAQECFQERSNKVCGNSRVDEGEECDPGIMYLNNDTCCNSDCTLKEGVQCSDRNSPCCKNCQFETAQKKCQEAINATCKGVSYCTGNSSECPPPGNAEDDTVCLDLGKCKDGKCIPFCEREQQLESCACNETDNSCKVCCRDLSGRCVPYVDAEQKNLFLRKGKPCTVGFCDMNGKCEKRVQDVIERFWDFIDQLSINTFGKFLADNIVGSVLVFSLIFWIPFSILVHCVDKKLDKQYESLSLFHPSNVEMLSSMDSASVRIIKPFPAPQTPGRLQPAPVIPSAPAAPKLDHQRMDTIQEDPSTDSHMDEDGFEKDPFPNSSTAAKSFEDLTDHPVTRSEKAASFKLQRQNRVDSKETEC

SEQ ID NO: 18711 - protein, 308 aa, Artificial Sequence
  Synthetic polypeptide
RISAVGGTYAVISLGGGDWSWSLKSCVFANILSTFLVISIVAYWRCLGDGGRRKPEKLDSLLSDYDILSLSNIQQHSVRKRDLQTSTHVETLLTFSALKRHFKLYLTSSTERFSQNFKVVVVDGKNESEYTVKWQDFFTGHVVGEPDSRVLAHIRDDDVIIRINTDGAEYNIEPLWRFVNDTKDKRMLVYKSEDIKNVSRLQSPKVCGYLKVDNEELLPKGLVDREPPEELVHRVKRRADPDPMKNTCKLLVVADHRFYRYMGRGEESTTTNYLIELIDRVDDIYRNTSWDNAGFKGYGIQIEQLLFE

SEQ ID NO: 18712 - protein, 620 aa, Artificial Sequence
  Synthetic polypeptide
EGTSEDCRGKPELWRHMVLKRKMQYCKAAPVKGNRKQSTEGDALDPPASPKPAGKQNGIQNPISLEDSPEAGGEREEEQEREEEQAFLVSLYKFMKERHTPIERVPHLGFKQINLWKIYKAVEKLGAYELVTGRRLWKNVYDELGGSPGSTSAATCTRRHYERLVLPYVRHLKGEDDKPLPTSKPRKQYKMAKENRGDDGATERPKKAKEERRMDQMMPGKTKADAADPAPLPSQEPPRNSTEQQGLASGSSVSFVGASGCPEAYKRLLSSFYCKGTHGIMSPLAKKKLLAQVSKVEALQCQEEGCRHGAEPQASPAVHLPESPQSPKGLTENSRHRLTPQEGLQAPGGSLREEAQAGPCPAAPIFKGCFYTHPTEVLKPVSQHPRDFFSRLKDGVLLGPPGKEGLSVKEPQLVWGGDANRPSAFHKGGSRKGILYPKPKACWVSPMAKVPAESPTLPPTFPSSPGLGSKRSLEEEGAAHSGKRLRAVSPFLKEADAKKCGAKPAGSGLVSCLLGPALGPVPPEAYRGTMLHCPLNFTGTPGPLKGQAALPFSPLVIPAFPAHFLATAGPSPMAAGLMHFPPTSFDSALRHRLCPASSAWHAPPVTTYAAPHFFHLNTKL

SEQ ID NO: 18713 - protein, 24 aa, Artificial Sequence
  Synthetic polypeptide
KERCNTVKQPLSKGTGSSPRRVTP

SEQ ID NO: 18714 - protein, 24 aa, Artificial Sequence
  Synthetic polypeptide
KERCNTVKQPLSKGTGSSPRRVTP

SEQ ID NO: 18715 - protein, 84 aa, Artificial Sequence
  Synthetic polypeptide
EGTSEDCRGKPELWRHMVLKRKMQYCKAAPVKGNRKQSTEGDALDPPASPKPAGKQNGIQNPISLELTCGRSTKQWRSWGPMSW

SEQ ID NO: 18716 - protein, 154 aa, Artificial Sequence
  Synthetic polypeptide
TGRRRMQELLDKYLIANATNPESKVFYLKMKGDYFRYLAEVACGDDRKQTIDNSQGAYQEAFDISKKEMQPTHPIRLGLALNFSVFYYEILNNPELACTLAKTAFDEAIAELDTLNEDSYKDSTLIMQLLRDNLTLWTSDSAGEECDAAEGAEN

SEQ ID NO: 18717 - protein, 154 aa, Artificial Sequence; identical to SEQ ID NO: 18716
  Synthetic polypeptide

SEQ ID NO: 18718 - protein, 39 aa, Artificial Sequence
  Synthetic polypeptide
GQEFETSHGETLSQLLGEAEAKESLEPGGEGCRNCWINI

SEQ ID NO: 18719 - protein, 39 aa, Artificial Sequence; identical to SEQ ID NO: 18718
  Synthetic polypeptide

SEQ ID NO: 18720 - protein, 39 aa, Artificial Sequence; identical to SEQ ID NO: 18718
  Synthetic polypeptide

SEQ ID NO: 18721 - protein, 58 aa, Artificial Sequence
  Synthetic polypeptide
WAPWLRPVILALWETEEGGSLEVRSSRPAMVKPYPSYLGRLRPKNRLNREAKDAGIVG

SEQ ID NO: 18722 - protein, 58 aa, Artificial Sequence; identical to SEQ ID NO: 18721
  Synthetic polypeptide

SEQ ID NO: 18723 - protein, 58 aa, Artificial Sequence; identical to SEQ ID NO: 18721
  Synthetic polypeptide

SEQ ID NO: 18724 - protein, 58 aa, Artificial Sequence
  Synthetic polypeptide
TGRRRMQELLDKYLIANATNPESKVFYLKMKGDYFRYLAEVACGDDRKQTIDNSQGAY

SEQ ID NO: 18725 - protein, 140 aa, Artificial Sequence
  Synthetic polypeptide
GSLVDSVRKEMLSSLSRLLGLMRPSSLRQYLDSVPLPPCQEQQPKASAELDHKACYLCHSLLMLAGVVVSCQDITPDQWGELQLLCMQLDRHISTQIRESPQAMHRTMLKDLATQTYIRWQELLTHCQPQAQYFSPWKDI

SEQ ID NO: 18726 - protein, 140 aa, Artificial Sequence; identical to SEQ ID NO: 18725
  Synthetic polypeptide

SEQ ID NO: 18727 - protein, 140 aa, Artificial Sequence; identical to SEQ ID NO: 18725
  Synthetic polypeptide

SEQ ID NO: 18728 - protein, 29 aa, Artificial Sequence
  Synthetic polypeptide
TQVLDDDKEVSLILLGKKCCPRSAGSWAS

SEQ ID NO: 18729 - protein, 29 aa, Artificial Sequence
  Synthetic polypeptide
TQVLDDDKEVSLILLGKKCCPRSAGSWAS

SEQ ID NO: 18730 - protein, 29 aa, Artificial Sequence
  Synthetic polypeptide
TQVLDDDKEVSLILLGKKCCPRSAGSWAS

SEQ ID NO: 18731 - protein, 38 aa, Artificial Sequence
  Synthetic polypeptide
ERNAVLAQPAPGPHEAIISQAIPGLCALATLPGATAKG

SEQ ID NO: 18732 - protein, 38 aa, Artificial Sequence; identical to SEQ ID NO: 18731
  Synthetic polypeptide

SEQ ID NO: 18733 - protein, 38 aa, Artificial Sequence; identical to SEQ ID NO: 18731
  Synthetic polypeptide

SEQ ID NO: 18734 - protein, 4 aa, Artificial Sequence
  Synthetic polypeptide
ALSC

SEQ ID NO: 18735 - protein, 4 aa, Artificial Sequence
  Synthetic polypeptide
ALSC

SEQ ID NO: 18736 - protein, 4 aa, Artificial Sequence
  Synthetic polypeptide
ALSC

SEQ ID NO: 18737 - protein, 350 aa, Artificial Sequence
  Synthetic polypeptide
PELLTWPPETSLGAFGLLWDLIVDGIFLQPDEDKHLWCPSLQEVREAFHSLGAHSPALYPLGPFWHGGRVLPGEAGLNENEEQDAPQEIALDISLGHIYKFLALCAQAQPGAYTDENLMGLIELLCRTSLDVGLRLLPKVDLQQLLLLLLENIREWPGKLQELCCTLSWVSDHHHNLLALVQFFPDMTSRSRRLRSQLSLVVIARMLGQQEMLPLWQEKTQLSSLSRLLGLMRPSSLRQYLDSVPLPPCQEQQPKASAELDHKACYLCHSLLMLAGVVVSCQDITPDQWGELQLLCMQLDRHISTQIRESPQAMHRTMLKDLATQTYIRWQELLTHCQPQAQYFSPWKDI

SEQ ID NO: 18738 - protein, 350 aa, Artificial Sequence; identical to SEQ ID NO: 18737
  Synthetic polypeptide

SEQ ID NO: 18739 - protein, 350 aa, Artificial Sequence; identical to SEQ ID NO: 18737
  Synthetic polypeptide

SEQ ID NO: 18740 - protein, 48 aa, Artificial Sequence
  Synthetic polypeptide
MELTIPGEGKSPRQCLKEGYCNSLKYAFFECKRSVLDNRARFRGRKGY

SEQ ID NO: 18741 - protein, 12 aa, Artificial Sequence
  Synthetic polypeptide
PSRAKENHLGSV

SEQ ID NO: 18742 - protein, 12 aa, Artificial Sequence
  Synthetic polypeptide
PSRAKENHLGSV

SEQ ID NO: 18743 - protein, 28 aa, Artificial Sequence
  Synthetic polypeptide
GVNHPGRRKITSAVFEGRILQLFEVRIF

SEQ ID NO: 18744 - protein, 28 aa, Artificial Sequence
  Synthetic polypeptide
GVNHPGRRKITSAVFEGRILQLFEVRIF

SEQ ID NO: 18745 - protein, 47 aa, Artificial Sequence
  Synthetic polypeptide
MELTIPGEGKSPRQCLKEGYCNSLKYAFFECKRSVMESRSVARAGVQ

SEQ ID NO: 18746 - protein, 45 aa, Artificial Sequence
  Synthetic polypeptide
TTQHIARVVSTRYCGKEVCPESLHTWFLPNFSPCVFSLCCNSMKN

SEQ ID NO: 18747 - protein, 45 aa, Artificial Sequence; identical to SEQ ID NO: 18746
  Synthetic polypeptide

SEQ ID NO: 18748 - protein, 45 aa, Artificial Sequence; identical to SEQ ID NO: 18746
  Synthetic polypeptide

SEQ ID NO: 18749 - protein, 526 aa, Artificial Sequence
  Synthetic polypeptide
VTAYLVSSKLLSVCLFPVLQLNEKLIAYQREFLALKERLRIAEHRISQRSSELNTIVQQFKRVGAETNGSKDALNKFSDNTLKLLKELTSKKSLQVPSIYYHLPHLLKNEGSLQPAVQIGNGRTGVSIVMGIPTVKREVKSYLIETLHSLIDNLYPEEKLDCVIVVFIGETDIDYVHGVVANLEKEFSKEISSGLVEVISPPESYYPDLTNLKETFGDSKERVRWRTKQNLDYCFLMMYAQEKGIYYIQLEDDIIVKQNYFNTIKNFALQLSSEEWMILEFSQLGFIGKMFQAPDLTLIVEFIFMFYKEKPIDWLLDHILWVKVCNPEKDAKHCDRQKANLRIRFRPSLFQHVGLHSSLSGKIQKLTDKDYMKPLLLKIHVNPPAEVSTSLKVYQGHTLEKTYMGEDFFWAITPIAGDYILFKFDKPVNVESYLFHSGNQEHPGDILLNTTVEVLPFKSEGLEISKETKDKRLEDGYFRIGKFENGVAEGMVDPSLNPISAFRLSVIQNSAVWAILNEIHIKKATN

SEQ ID NO: 18750 - protein, 526 aa, Artificial Sequence; identical to SEQ ID NO: 18749
  Synthetic polypeptide

SEQ ID NO: 18751 - protein, 526 aa, Artificial Sequence; identical to SEQ ID NO: 18749
  Synthetic polypeptide

SEQ ID NO: 18752 - protein, 27 aa, Artificial Sequence
  Synthetic polypeptide
IQKVPKIILRDVISEKKFPNTWTERKT

SEQ ID NO: 18753 - protein, 27 aa, Artificial Sequence
  Synthetic polypeptide
IQKVPKIILRDVISEKKFPNTWTERKT

SEQ ID NO: 18754 - protein, 27 aa, Artificial Sequence
  Synthetic polypeptide
IQKVPKIILRDVISEKKFPNTWTERKT

SEQ ID NO: 18755 - protein, 13 aa, Artificial Sequence
  Synthetic polypeptide
HHEEAVKYRRYQR

SEQ ID NO: 18756 - protein, 13 aa, Artificial Sequence
  Synthetic polypeptide
HHEEAVKYRRYQR

SEQ ID NO: 18757 - protein, 13 aa, Artificial Sequence
  Synthetic polypeptide
HHEEAVKYRRYQR

SEQ ID NO: 18758 - protein, 208 aa, Artificial Sequence
  Synthetic polypeptide
TTKKQLNTEGTKDNTKRCNLREKISKYMDRAENIKKYLDQEKEDGKYHKQIKIEENATGFSYESLFREYLNETVTEVWIEDPYIRHTHQLYNFLRFCEMLIKRPCKVKTIHLLTSLDEGIEQVQQSRGLQEIEESLRSHGVLLEVQYSSSIHDREIRFNNGWMIKIGRGLDYFKKPQSRFSLGYCDFDLRPCHETTVDIFHKKHTKNI

SEQ ID NO: 18759 - protein, 208 aa, Artificial Sequence; identical to SEQ ID NO: 18758
  Synthetic polypeptide

SEQ ID NO: 18760 - protein, 156 aa, Artificial Sequence
  Synthetic polypeptide
TTKKQLNTEGTKDNTKRCNLREKISKYMDRAENIKKYLDQEKEDGKYHKQIKIEENATGFSYESLFREYLNETVTEVWIEDPYIRHTHQGIEQVQQSRGLQEIEESLRSHGVLLEVQYSSSIHDREIRFNNGWMIKIGRGLDYFKKPQSRFSLGYC

SEQ ID NO: 18761 - protein, 272 aa, Artificial Sequence
  Synthetic polypeptide
VIPLSVYLLVSHLAALWVRSTVVVSPRLCSGTQPIGSLGSICPNSYGSVKDVCTAKFGSKHFFHLIPNEATICSLLLCNRNDTAWDELKLTCQTALHVLQLTLKEPWALLGGGCTETHLAAYIRHKTHNDPESILKDDECTQTELQLIAEAFCSALESVVGSLEHDGGEILTDMKYGHLWSVQADSPCVANWPDLLSQCGCGLYNSQEELNWSFLRSTRRPFVPQSCLPHEAVGSASNLTLDCLTAKLSGLQVAVETANLILDLSYVIEDKN

SEQ ID NO: 18762 - protein, 272 aa, Artificial Sequence; identical to SEQ ID NO: 18761
  Synthetic polypeptide

SEQ ID NO: 18763 - protein, 24 aa, Artificial Sequence
  Synthetic polypeptide
QHSGLDQLWWYLRAYVQEHSLLDP

SEQ ID NO: 18764 - protein, 24 aa, Artificial Sequence
  Synthetic polypeptide
QHSGLDQLWWYLRAYVQEHSLLDP

SEQ ID NO: 18765 - protein, 24 aa, Artificial Sequence
  Synthetic polypeptide
INCGGISALMFRNTAYWIPRLNMS

SEQ ID NO: 18766 - protein, 24 aa, Artificial Sequence
  Synthetic polypeptide
INCGGISALMFRNTAYWIPRLNMS

SEQ ID NO: 18767 - protein, 23 aa, Artificial Sequence
  Synthetic polypeptide
NTVNRTSCNGRQRGMFCICTVSD

SEQ ID NO: 18768 - protein, 23 aa, Artificial Sequence
  Synthetic polypeptide
NTVNRTSCNGRQRGMFCICTVSD

SEQ ID NO: 18769 - protein, 666 aa, Artificial Sequence
  Synthetic polypeptide
TLSTELPATADRGGCSVSARSVIDSCTVAMASNDTPEGVRYISSNVCGPHGKCKSQSGGKFTCDCNKGFTGTYCHENINDCESNPCRNGGTCIDGVNSYKCICSDGWEGAYCETNINDCSQNPCHNGGTCRDLVNDFYCDCKNGWKGKTCHSRDSQCDEATCNNGGTCYDEGDAFKCMCPGGWEGTTCNIARNSSCLPNPCHNGGTCVVNGESFTCVCKEGWEGPICAQNTNDCSPHPCYNSGTCVDGDNWYRCECAPGFAGPDCRININECQSSPCAFGATCVDEINGYRCVCPPGHSGAKCQEVSGRPCITMGSVIPDGAKWDDDCNTCQCLNGRIACSKVWCGPRPCLLHKGHSECPSGQSCIPILDDQCFVHPCTGVGECRSSSLQPVKTKCTSDSYYQDNCANITFTFNKEMMSPGLTTEHICSELRNLNILKNVSAEYSIYIACEPSPSANNEIHVAISAEDIRDDGNPIKEITDKIIDLVSKRDGNSSLIAAVAEVRVQRRPLKNRTDFLVPLLSSVLTVAWICCLVTAFYWCLRKRRKPGSHTHSASEDNTTNNVREQLNQIKNPIEKHGANTVPIKDYENKNSKMSKIRTHNSEVEEDDMDKHQQKARFAKQPAYTLVDREEKPPNGTPTKHPNWTNKQDNRDLESAQSLNRMEYIV

SEQ ID NO: 18770 - protein, 666 aa, Artificial Sequence; identical to SEQ ID NO: 18769
  Synthetic polypeptide

SEQ ID NO: 18771 - protein, 22 aa, Artificial Sequence
  Synthetic polypeptide
EQLRSTAPSVSRRRRFLHFHLR

SEQ ID NO: 18772 - protein, 34 aa, Artificial Sequence
  Synthetic polypeptide
GRSQDGRIGTAPVYSSQREQKTAISAFPSEVIGM

SEQ ID NO: 18773 - protein, 30 aa, Artificial Sequence
  Synthetic polypeptide
EQLRSTAPSVSRRRRFLHFHLRQRLQEFQQ

SEQ ID NO: 18774 - protein, 67 aa, Artificial Sequence
  Synthetic polypeptide
GRSQDGRIGTAPVYSSQREQKTAISAFPSETKTTRISTVTATTATTTLMMTTASMSSMAPTPVSPTG

SEQ ID NO: 18775 - protein, 295 aa, Artificial Sequence
  Synthetic polypeptide
EMKHTVSEIWLCRFKFQFSYLSLGDNRVTSFRDLIHDQDEDEEEEEGQRFYAGGSERSGQQIVGPPRKKSPNELVDDLFKGAKEHGAVAVERVTKSPGETSKPRVHVVLKLWKSGFSLDNGELRSYQDPSNAQFLESIRRGEVPAELRRLAHGGQVNLDMEDHRDEDFVKPKGAFKAFTGEGQKLGSTAPQVLSTSSPAQQAENEAKASSSILIDESEPTTNIQIRLADGGRLVQKFNHSHRISDIRLFIVDARPAMAATSFILMTTFPNKELADESQTLKEANLLNAVIVQRLT

SEQ ID NO: 18776 - protein, 25 aa, Artificial Sequence
  Synthetic polypeptide
STQSRKSGCAGSNSSSPTYLLVIIE

SEQ ID NO: 18777 - protein, 25 aa, Artificial Sequence
  Synthetic polypeptide
STQSRKSGCAGSNSSSPTYLLVIIE

SEQ ID NO: 18778 - protein, 25 aa, Artificial Sequence
  Synthetic polypeptide
STQSRKSGCAGSNSSSPTYLLVIIE

SEQ ID NO: 18779 - protein, 25 aa, Artificial Sequence
  Synthetic polypeptide
STQSRKSGCAGSNSSSPTYLLVIIE

SEQ ID NO: 18780 - protein, 25 aa, Artificial Sequence
  Synthetic polypeptide
STQSRKSGCAGSNSSSPTYLLVIIE

SEQ ID NO: 18781 - protein, 25 aa, Artificial Sequence
  Synthetic polypeptide
STQSRKSGCAGSNSSSPTYLLVIIE

SEQ ID NO: 18782 - protein, 24 aa, Artificial Sequence
  Synthetic polypeptide
EMKHTVSEIWLCRFKFQFSYLSLG

SEQ ID NO: 18783 - protein, 24 aa, Artificial Sequence
  Synthetic polypeptide
EMKHTVSEIWLCRFKFQFSYLSLG

SEQ ID NO: 18784 - protein, 22 aa, Artificial Sequence
  Synthetic polypeptide
STQSRKSGCAGSNSSSPTYLLV

SEQ ID NO: 18785 - protein, 22 aa, Artificial Sequence
  Synthetic polypeptide
STQSRKSGCAGSNSSSPTYLLV

SEQ ID NO: 18786 - protein, 328 aa, Artificial Sequence
  Synthetic polypeptide
EMKHTVSEIWLCRFKFQFSYLSLGDNRVTSFRDLIHDQDEDEEEEEGQRSRFYAGGSERSGQQIVGPPRKKSPNELVDDLFKGAKEHGAVAVERVTKSPGETSKPRPFAGGGYRLGAAPEEESAYVAGEKRQHSSQDVHVVLKLWKSGFSLDNGELRSYQDPSNAQFLESIRRGEVPAELRRLAHGGQVNLDMEDHRDEDFVKPKGAFKAFTGEGQKLGSTAPQVLSTSSPAQQAENEAKASSSILIDESEPTTNIQIRLADGGRLVQKFNHSHRISDIRLFIVDARPAMAATSFILMTTFPNKELADESQTLKEANLLNAVIVQRLT

SEQ ID NO: 18787 - protein, 326 aa, Artificial Sequence
  Synthetic polypeptide
EMKHTVSEIWLCRFKFQFSYLSLGDNRVTSFRDLIHDQDEDEEEEEGQRFYAGGSERSGQQIVGPPRKKSPNELVDDLFKGAKEHGAVAVERVTKSPGETSKPRPFAGGGYRLGAAPEEESAYVAGEKRQHSSQDVHVVLKLWKSGFSLDNGELRSYQDPSNAQFLESIRRGEVPAELRRLAHGGQVNLDMEDHRDEDFVKPKGAFKAFTGEGQKLGSTAPQVLSTSSPAQQAENEAKASSSILIDESEPTTNIQIRLADGGRLVQKFNHSHRISDIRLFIVDARPAMAATSFILMTTFPNKELADESQTLKEANLLNAVIVQRLT

SEQ ID NO: 18788 - protein, 328 aa, Artificial Sequence
  Synthetic polypeptide
EMKHTVSEIWLCRFKFQFSYLSLGDNRVTSFRDLIHDQDEDEEEEEGQRDRFYAGGSERSGQQIVGPPRKKSPNELVDDLFKGAKEHGAVAVERVTKSPGETSKPRPFAGGGYRLGAAPEEESAYVAGEKRQHSSQDVHVVLKLWKSGFSLDNGELRSYQDPSNAQFLESIRRGEVPAELRRLAHGGQVNLDMEDHRDEDFVKPKGAFKAFTGEGQKLGSTAPQVLSTSSPAQQAENEAKASSSILIDESEPTTNIQIRLADGGRLVQKFNHSHRISDIRLFIVDARPAMAATSFILMTTFPNKELADESQTLKEANLLNAVIVQRLT

SEQ ID NO: 18789 - protein, 230 aa, Artificial Sequence
  Synthetic polypeptide
EMKHTVSEIWLCRFKFQFSYLSLGDNRVTSFRDLIHDQDEDEEEEEGQRFYAGGSERSGQQIVGPPRKKSPNELVDDLFKGAKEHGAVAVERVTKSPGETSKPRPFAGGGYRLGAAPEEESAYVAGEKRQHSSQDVHVVLKLWKSGFSLDNGELRSYQDPSNAQFLESIRRGEVPAELRRLAHGGQVNLDMEDHRDEDFVKPKGAFKAFTGEGQKLGRLSCFPPFKPLFS

SEQ ID NO: 18790 - protein, 61 aa, Artificial Sequence
  Synthetic polypeptide
EMKHTVSEIWLCRFKFQFSYLSLGDNRVTSFRDLIHDQDEDEEEEEGQRGHSVCHMNGKVR

SEQ ID NO: 18791 - protein, 30 aa, Artificial Sequence
  Synthetic polypeptide
ARGIQPSHSKIPGLQKLCHPYCRANSQGPY

SEQ ID NO: 18792 - protein, 30 aa, Artificial Sequence; identical to SEQ ID NO: 18791
  Synthetic polypeptide

SEQ ID NO: 18793 - protein, 313 aa, Artificial Sequence
  Synthetic polypeptide
QLDSNIMKDPEPEASSQATPKFLACRNYVIHTVGPIARGHINGSHKEDLANCYKSSLKLVKENNIRSVAFPCISTGIYGFPNEPAAVIALNTIKEWLAKNHHEVDRIIFCVFLEVDFKIYKKKMNEFFSVDDNNEEEEDVEMKEDSDENGPEEKQSVEEMEEQSQDADGVNTVTVPGPASEEAVEDCKDEDFAKDENITKGGEVTDHSVRDQDHPDGQENDSTKNEIKIETESQSSYMETEELSSNQEDAVIVEQPEVIPLTEDQEEKEGEKAPGEDTPRMPGKSEGSSDLENTPGPDAGAQDEAKEQRNGTK

SEQ ID NO: 18794 - protein, 25 aa, Artificial Sequence
  Synthetic polypeptide
KTLSQRHPAKPLQNSWPAETMSSIL

SEQ ID NO: 18795 - protein, 25 aa, Artificial Sequence
  Synthetic polypeptide
KTLSQRHPAKPLQNSWPAETMSSIL

SEQ ID NO: 18796 - protein, 336 aa, Artificial Sequence
  Synthetic polypeptide
QLDSNIMKDPEPEASSQATPKFLACRNYVIHTVGPIARGHINGSHKEDLANCYKSSLKLVKENNIRSVAFPCISTGIYGFPNEPAAVIALNTIKEWLAKNHHEVDRIIFCVFLEVDFKIYKKKMNEFFSVDDNNEEEEDVEMKEDSDENGPEEKQSVEEMEEQSQDADGVNTVTVPGPASEEAVEDCKDEDFAKDENITKGGEVTDHSVRDQDHPDGQENDSTKNEIKIETESQSSYMETEELSSNQEDAVIVEQPEVIPLTEDQEEKEGEKAPGEDTPRMPGKSEGSSDLENTPGPDVEMNSQVDKVNDPTESQQEDQLIAGAQDEAKEQRNGTK

SEQ ID NO: 18797 - protein, 58 aa, Artificial Sequence
  Synthetic polypeptide
TNTLWNVHMVEYCTAVKMSKLLLRITTWLDLTNMMLNKRSLLPLNFLQRNYLEIRMNV

SEQ ID NO: 18798 - protein, 58 aa, Artificial Sequence; identical to SEQ ID NO: 18797
  Synthetic polypeptide

SEQ ID NO: 18799 - protein, 58 aa, Artificial Sequence; identical to SEQ ID NO: 18797
  Synthetic polypeptide

SEQ ID NO: 18800 - protein, 7 aa, Artificial Sequence
  Synthetic polypeptide
TKGACCP

SEQ ID NO: 18801 - protein, 7 aa, Artificial Sequence
  Synthetic polypeptide
TKGACCP

SEQ ID NO: 18802 - protein, 7 aa, Artificial Sequence
  Synthetic polypeptide
TKGACCP

SEQ ID NO: 18803 - protein, 140 aa, Artificial Sequence
  Synthetic polypeptide
QHNSSNHKLETNKKPNSKIMNKYIMECSHGGILYCSENEQTIATHNNMVGSHKHDAEQKELAALEFPPKKLFGNKDERVIAERRSHLEKYLRDFFSVMLQSATSPLHINKVGLTLSKHTICEFSPFFKKGVFDYSSHGTG

SEQ ID NO: 18804 - protein, 140 aa, Artificial Sequence; identical to SEQ ID NO: 18803
  Synthetic polypeptide

SEQ ID NO: 18805 - protein, 140 aa, Artificial Sequence; identical to SEQ ID NO: 18803
  Synthetic polypeptide

SEQ ID NO: 18806 - protein, 60 aa, Artificial Sequence
  Synthetic polypeptide
FAESFKNKRKCLWHYVDWKKQVPHCIYGMFSTVLKSGRKSARRLTVAASSFLQLMEAYLR

SEQ ID NO: 18807 - protein, 60 aa, Artificial Sequence; identical to SEQ ID NO: 18806
  Synthetic polypeptide

SEQ ID NO: 18808 - protein, 60 aa, Artificial Sequence; identical to SEQ ID NO: 18806
  Synthetic polypeptide

SEQ ID NO: 18809 - protein, 60 aa, Artificial Sequence; identical to SEQ ID NO: 18806
  Synthetic polypeptide

SEQ ID NO: 18810 - protein, 60 aa, Artificial Sequence; identical to SEQ ID NO: 18806
  Synthetic polypeptide

SEQ ID NO: 18811 - protein, 12 aa, Artificial Sequence
  Synthetic polypeptide
LLLVSSSLWRHI

SEQ ID NO: 18812 - protein, 12 aa, Artificial Sequence
  Synthetic polypeptide
LLLVSSSLWRHI

SEQ ID NO: 18813 - protein, 12 aa, Artificial Sequence
  Synthetic polypeptide
LLLVSSSLWRHI

SEQ ID NO: 18814 - protein, 12 aa, Artificial Sequence
  Synthetic polypeptide
LLLVSSSLWRHI

SEQ ID NO: 18815 - protein, 12 aa, Artificial Sequence
  Synthetic polypeptide
LLLVSSSLWRHI

SEQ ID NO: 18816 - protein, 24 aa, Artificial Sequence
  Synthetic polypeptide
CSILSLTLDLNQNLHLNNIPEATW

SEQ ID NO: 18817 - protein, 24 aa, Artificial Sequence
  Synthetic polypeptide
CSILSLTLDLNQNLHLNNIPEATW

SEQ ID NO: 18818 - protein, 24 aa, Artificial Sequence
  Synthetic polypeptide
CSILSLTLDLNQNLHLNNIPEATW

SEQ ID NO: 18819 - protein, 24 aa, Artificial Sequence
  Synthetic polypeptide
CSILSLTLDLNQNLHLNNIPEATW

SEQ ID NO: 18820 - protein, 27 aa, Artificial Sequence
  Synthetic polypeptide
TISQRLHGNGRFFQHFSLQADIPKNLY

SEQ ID NO: 18821 - protein, 27 aa, Artificial Sequence
  Synthetic polypeptide
TISQRLHGNGRFFQHFSLQADIPKNLY

SEQ ID NO: 18822 - protein, 27 aa, Artificial Sequence
  Synthetic polypeptide
TISQRLHGNGRFFQHFSLQADIPKNLY

SEQ ID NO: 18823 - protein, 27 aa, Artificial Sequence
  Synthetic polypeptide
TISQRLHGNGRFFQHFSLQADIPKNLY

SEQ ID NO: 18824 - protein, 417 aa, Artificial Sequence
  Synthetic polypeptide
QHLEPHSRPESEPAFEQYPRGYMVMGDSFNTSLFKQTFQRIFTKDFNGDFRMAFGATLDVKTSRELKIAGAIGPCVSLNVKGPCVSENELGVGGTSQWKICGLDPTSTLGIYFEVVNQHNTPIPQGGRGAIQFVTHYQHSSTQRRIRVTTIARNWADVQSQLRHIEAAFDQEAAAVLMARLGVFRAESEEGPDVLRWLDRQLIRLCQKFGQYNKEDPTSFRLSDSFSLYPQFMFHLRRSPFLQVFNNSPDESSYYRHHFARQDLTQSLIMIQPILYSYSFHGPPEPVLLDSSSILADRILLMDTFFQIVIYLGETIAQWRKAGYQDMPEYENFKHLLQAPLDDAQEILQARFPMPRYINTEHGGSQARFLLSKVNPSQTHNNLYAWGQETGAPILTDDVSLQVFMDHLKKLAVSSAC

SEQ ID NO: 18825 - protein, 417 aa, Artificial Sequence; identical to SEQ ID NO: 18824
  Synthetic polypeptide

SEQ ID NO: 18826 - protein, 417 aa, Artificial Sequence; identical to SEQ ID NO: 18824
  Synthetic polypeptide

SEQ ID NO: 18827 - protein, 417 aa, Artificial Sequence; identical to SEQ ID NO: 18824
  Synthetic polypeptide

SEQ ID NO: 18828 - protein, 14 aa, Artificial Sequence
  Synthetic polypeptide
ARSPRRAVEPRWGK

SEQ ID NO: 18829 - protein, 31 aa, Artificial Sequence
  Synthetic polypeptide
PGVPGVQWSLAGGNDSLDHGRPRSGQARKFL

SEQ ID NO: 18830 - protein, 908 aa, Artificial Sequence
  Synthetic polypeptide
QESPACSGASLGEMTAWTMGARGLDKRGSFFKLIDTIASEIGELKQEMVRTDVNLENGLEPAETHSMVRHKDGGYSEEEDVKTCARDSGYDSLSNRLSILDRLLHTHPIWLQLSLSEEEAAEVLQAQPPGIFLVHKSTKMQKKVLSLRLPCEFGAPLKEFAIKESTYTFSLEGSGISFADLFRLIAFYCISRDVLPFTLKLPYAISTAKSEAQLEELAQMGLNFWSSPADSKPPNLPPPHRPLSSDGVCPASLRQLCLINGVHSIKTRTPSELECSQTNGALCFINPLFLKVHSQDLSGGLKRPSTRTPNANGTERTRSPPPRPPPPAINSLHTSPRLARTETQTSMPETVNHNKHGNVALPGTKPTPIPPPRLKKQASFLEAEGGAKTLSGGRPGAGPELELGTAGSPGGAPPEAAPGDCTRAPPPSSESRPPCHGGRQRLSDMSISTSSSDSLEFDRSMPLFGYEADTNSSLEDYEGESDQETMAPPIKSKKKRSSSFVLPKLVKSQLQKVSGVFSSFMTPEKRMVRRIAELSRDKCTYFGCLVQDYVSFLQENKECHVSSTDMLQTIRQFMTQVKNYLSQSSELDPPIESLIPEDQIDVVLEKAMHKCILKPLKGHVEAMLKDFHMADGSWKQLKENLQLVRQRNPQELGVFAPTPDFVDVEKIKVKFMTMQKMYSPEKKVMLLLRVCKLIYTVMENNSGRMYGADDFLPVLTYVIAQCDMLELDTEIEYMMELLDPSLLHGEGGYYLTSAYGALSLIKNFQEEQAARLLSSETRDTLRQWHKRRTTNRTIPSVDDFQNYLRVAFQEVNSGCTGKTLLVRPYITTEDVCQICAEKFKVGDPEEYSLFLFVDETWQQLAEDTYPQKIKAELHSRPQPHIFHFVYKRIKNDPYGIIFQNGEEDLTTS

SEQ ID NO: 18831 - protein, 79 aa, Artificial Sequence
  Synthetic polypeptide
NENIVGLPGWSLSEDLKIQCRCGAGKSHAQVHLEAPQGARGGHAEGLSHGRWLMEATQGEPAACAAEESAGAGGLRPDP

SEQ ID NO: 18832 - protein, 79 aa, Artificial Sequence; identical to SEQ ID NO: 18831
  Synthetic polypeptide

SEQ ID NO: 18833 - protein, 312 aa, Artificial Sequence
  Synthetic polypeptide
RSSADVVLEKAMHKCILKPLKGHVEAMLKDFHMADGSWKQLKENLQLVRQRNPQELGVFAPTPDFVDVEKIKVKFMTMQKMYSPEKKVMLLLRVCKLIYTVMENNSGRMYGADDFLPVLTYVIAQCDMLELDTEIEYMMELLDPSLLHGEGGYYLTSAYGALSLIKNFQEEQAARLLSSETRDTLRQWHKRRTTNRTIPSVDDFQNYLRVAFQEVNSGCTGKTLLVRPYITTEDVCQICAEKFKVGDPEEYSLFLFVDETWQQLAEDTYPQKIKAELHSRPQPHIFHFVYKRIKNDPYGIIFQNGEEDLTTS

SEQ ID NO: 18834 - protein, 312 aa, Artificial Sequence; identical to SEQ ID NO: 18833
  Synthetic polypeptide

SEQ ID NO: 18835 - protein, 19 aa, Artificial Sequence
  Synthetic polypeptide
GFEDPVQMWCWKKPCTSAS

SEQ ID NO: 18836 - protein, 19 aa, Artificial Sequence
  Synthetic polypeptide
GFEDPVQMWCWKKPCTSAS

SEQ ID NO: 18837 - protein, 23 aa, Artificial Sequence
  Synthetic polypeptide
EHRPCSPAAWGHSTLLATSCDCR

SEQ ID NO: 18838 - protein, 23 aa, Artificial Sequence
  Synthetic polypeptide
EHRPCSPAAWGHSTLLATSCDCR

SEQ ID NO: 18839 - protein, 23 aa, Artificial Sequence
  Synthetic polypeptide
EHRPCSPAAWGHSTLLATSCDCR

SEQ ID NO: 18840 - protein, 267 aa, Artificial Sequence
  Synthetic polypeptide
NIGPAAQLLGGIPLCWPPAVTAGEVKLLLSSETPIEGKNMSFVNDLTVTQDGRKIYFTDSSSKWQRRDYLLLVMEGTDDGRLLEYDTVTREVKVLLDQLRFPNGVQLSPAEDFVLVAETTMARIRRVYVSGLMKGGADLFVENMPGFPDNIRPSSSGGYWVGMSTIRPNPGFSMLDFLSERPWIKRMIFKGSCAGCDLLFSQETVMKFVPRYSLVLELSDSGAFRRSLHDPDGLVATYISEVHEHDGHLYLGSFRSPFLCRLSLQAV

SEQ ID NO: 18841 - protein, 4 aa, Artificial Sequence
  Synthetic polypeptide
LQVK

SEQ ID NO: 18842 - protein, 4 aa, Artificial Sequence
  Synthetic polypeptide
LQVK

SEQ ID NO: 18843 - protein, 4 aa, Artificial Sequence
  Synthetic polypeptide
LQVK

SEQ ID NO: 18844 - protein, 259 aa, Artificial Sequence
  Synthetic polypeptide
NIGPAAQLLGGIPLCWPPAVTAGEVKLLLSSETPIEGKNMSFVNDLTVTQDGRKIYFTDSSSKWQRRDYLLLVMEGTDDGRLLEYDTVTREVKVLLDQLRFPNGVQLSPAEDFVLVAETTMARIRRVYVSGLMKGGADLFVENMPGFPDNIRPSSSGGYWVGMSTIRPNPGFSMLDFLSERPWIKRMIFKLFSQETVMKFVPRYSLVLELSDSGAFRRSLHDPDGLVATYISEVHEHDGHLYLGSFRSPFLCRLSLQAV

SEQ ID NO: 18845 - protein, 132 aa, Artificial Sequence
  Synthetic polypeptide
NIGPAAQLLGGIPLCWPPAVTAGEVKLLLSSETPIEGKNMSFVNDLTVTQDGRKIYFTDSSSKWQRRDYLLLVMEGTDDGRLLEYDTVTREVKVLLDQLRFPNGVQLSPAEDFVLVAETTMARIRSSLVKRR

SEQ ID NO: 18846 - protein, 52 aa, Artificial Sequence
  Synthetic polypeptide
EPAKPIVKWMRNSEPRIGKTPLKNECKLLLLEAPVHWTLQETHRLPRPRGGA

SEQ ID NO: 18847 - protein, 52 aa, Artificial Sequence; identical to SEQ ID NO: 18846
  Synthetic polypeptide

SEQ ID NO: 18848 - protein, 35 aa, Artificial Sequence
  Synthetic polypeptide
RTSANFCSWRLPFTGLCRRHTGSPDPVVVPDDLQL

SEQ ID NO: 18849 - protein, 53 aa, Artificial Sequence
  Synthetic polypeptide
ADCQMDEKLRAKDRENTLKERVQTSAPGGSRSLDFAGDTQAPQTPWWCLMTFS

SEQ ID NO: 18850 - protein, 30 aa, Artificial Sequence
  Synthetic polypeptide
RTSANFCSWRLPFTGLCRRHTGSPDPVVVP

SEQ ID NO: 18851 - protein, 49 aa, Artificial Sequence
  Synthetic polypeptide
ADCQMDEKLRAKDRENTLKERVQTSAPGGSRSLDFAGDTQAPQTPWWCL

SEQ ID NO: 18852 - protein, 742 aa, Artificial Sequence
  Synthetic polypeptide
DQCRKWVISAFPTELGLDLEELEEIEEDAGLGNGGLGRLAACFLDSMATLGLAAYGYGIRYEFGIFNQKIVNGWQVEEADDWLRYGNPWEKARPEYMLPVHFYGRVEHTPDGVKWLDTQVVLAMPYDTPVPGYKNNTVNTMRLWSAKAPNDFKLQDFNVGDYIEAVLDRNLAENISRVLYPNDNFFEGKELRLKQEYFVVAATLQDIIRRFKSSKFGCRDPVRTCFETFPDKVAIQLNDTHPALSIPELMRILVDVEKVDWDKAWEITKKTCAYTNHTVLPEALERWPVSMFEKLLPRHLEIIYAINQRHLDHVAALFPGDVDRLRRMSVIEEGDCKRINMAHLCVIGSHAVNGVARIHSEIVKQSVFKDFYELEPEKFQNKTNGITPRRWLLLCNPGLADTIVEKIGEEFLTDLSQLKKLLPLVSDEVFIRDVAKVKQENKLKFSAFLEKEYKVKINPSSMFDVHVKRIHEYKRQLLNCLHVVTLYNRIKRDPAKAFVPRTVMIGGKAAPGYHMAKLIIKLVTSIGDVVNHDPVVGDRLKVIFLENYRVSLAEKVIPAADLSQQISTAGTEASGTGNMKFMLNGALTIGTMDGANVEMAEEAGAENLFIFGLRVEDVEALDRKGYNAREYYDHLPELKQAVDQISSGFFSPKEPDCFKDIVNMLMHHDRFKVFADYEAYMQCQAQVDQLYRNPKEWTKKVIRNIACSGKFSSDRTITEYAREIWGVEPSDLQIPPPNIPRD

SEQ ID NO: 18853 - protein, 9 aa, Artificial Sequence
  Synthetic polypeptide
FLHFQLSWG

SEQ ID NO: 18854 - protein, 79 aa, Artificial Sequence
  Synthetic polypeptide
PGWRNLRQSPGKAARHPSLRPARTVLVGKWCENFGCGTWRRRNTKWGSALGVVSTADAQQSHCLVHIPEGSLRLSRHRS

SEQ ID NO: 18855 - protein, 79 aa, Artificial Sequence; identical to SEQ ID NO: 18854
  Synthetic polypeptide

SEQ ID NO: 18856 - protein, 168 aa, Artificial Sequence
  Synthetic polypeptide
PLHVVDGNVPRCQDSQRADQDGETLGRVRGKQHGIPASGLPGRCWLGNGARTLDVERGGGGTRSGDLHLGWSALRMPSKVTAWSTSRRGLCASVGIAADGETFGVAEECPQTSEGIRYILHSRVSLPRAIFWGSGKSCSRARAGWLEPLVRRSPGGGSGGPGVASGCE

SEQ ID NO: 18857 - protein, 171 aa, Artificial Sequence
  Synthetic polypeptide
AESGESSTASQPQACPDGVGWEMVRELWMWNVEEEEHEVGICTWGGQHCGCPAKSLPGPHPGGVSAPQSASQLMVKLLVWQKSVHKLRKVSATSSIAVYPCPGQSSGGAESPAPGPGLAGWSHLCGAALAEVQAAPVSQAAVSDASLGPEWSQEGCRPGLTSGQHGGRDGR

SEQ ID NO: 18858 - protein, 143 aa, Artificial Sequence
  Synthetic polypeptide
PLHVVDGNVPRCQDSQRADQDGETLGRVRGKQHGIPASGLPGRCWLGNGARTLDVERGGGGTRSGDLHLGWSALRMPSKVTAWSTSRRGLCASVGIAADGETFGVAEECPQTSEGIRYILHSRVSLPRAIFWGSGKSCSRARA

SEQ ID NO: 18859 - protein, 118 aa, Artificial Sequence
  Synthetic polypeptide
AESGESSTASQPQACPDGVGWEMVRELWMWNVEEEEHEVGICTWGGQHCGCPAKSLPGPHPGGVSAPQSASQLMVKLLVWQKSVHKLRKVSATSSIAVYPCPGQSSGGAESPAPGPGL

SEQ ID NO: 18860 - protein, 35 aa, Artificial Sequence
  Synthetic polypeptide
PGWRNLRQSPGKAARHPSLRPARTVLVGFLLISPA

SEQ ID NO: 18861 - protein, 49 aa, Artificial Sequence
  Synthetic polypeptide
PLHVVDGNVPRCQDSQRADQDGETLGRVRGKQHGIPASGLPGRCWLGFF

SEQ ID NO: 18862 - protein, 126 aa, Artificial Sequence
  Synthetic polypeptide
AESGESSTASQPQACPDGVGWVSFDFSCLEMVRELWMWNVEEEEHEVGICTWGGQHCGCPAKSLPGPHPGGVSAPQSASQLMVKLLVWQKSVHKLRKVSATSSIAVYPCPGQSSGGAESPAPGPGL

SEQ ID NO: 18863 - protein, 76 aa, Artificial Sequence
  Synthetic polypeptide
GNPRQSPGEAARHPSLRLAWTVLVGKWCENFGCGTWRRRNTKWGSALGVVSTADAQQSHCLVHIPEGSLRLSRHRS

SEQ ID NO: 18864 - protein, 76 aa, Artificial Sequence; identical to SEQ ID NO: 18863
  Synthetic polypeptide

SEQ ID NO: 18865 - protein, 168 aa, Artificial Sequence
  Synthetic polypeptide
PLHGVDGNVSGCQELQRADLDEETPGRVLGKQHGIRASGLPGRCWLGNGARTLDVERGGGGTRSGDLHLGWSALRMPSKVTAWSTSRRGLCASVGIAADGETFGVAEECPQTSEGIRYILHSRVSLPRAIFWGSGKSCSRARAGWLEPLVRRSPGGGSGGPGVASGCE

SEQ ID NO: 18866 - protein, 176 aa, Artificial Sequence
  Synthetic polypeptide
MRKPQAESWGSSTASEPQACLDGVGWEMVRELWMWNVEEEEHEVGICTWGGQHCGCPAKSLPGPHPGGVSAPQSASQLMVKLLVWQKSVHKLRKVSATSSIAVYPCPGQSSGGAESPAPGPGLAGWSHLCGAALAEVQAAPVSQAAVSDASLGPEWSQEGCRPGLTSGQHGGRDGR

SEQ ID NO: 18867 - protein, 143 aa, Artificial Sequence
  Synthetic polypeptide
PLHGVDGNVSGCQELQRADLDEETPGRVLGKQHGIRASGLPGRCWLGNGARTLDVERGGGGTRSGDLHLGWSALRMPSKVTAWSTSRRGLCASVGIAADGETFGVAEECPQTSEGIRYILHSRVSLPRAIFWGSGKSCSRARA

SEQ ID NO: 18868 - protein, 123 aa, Artificial Sequence
  Synthetic polypeptide
MRKPQAESWGSSTASEPQACLDGVGWEMVRELWMWNVEEEEHEVGICTWGGQHCGCPAKSLPGPHPGGVSAPQSASQLMVKLLVWQKSVHKLRKVSATSSIAVYPCPGQSSGGAESPAPGPGL

SEQ ID NO: 18869 - protein, 32 aa, Artificial Sequence
  Synthetic polypeptide
GNPRQSPGEAARHPSLRLAWTVLVGFLLISPA

SEQ ID NO: 18870 - protein, 49 aa, Artificial Sequence
  Synthetic polypeptide
PLHGVDGNVSGCQELQRADLDEETPGRVLGKQHGIRASGLPGRCWLGFF

SEQ ID NO: 18871 - protein, 131 aa, Artificial Sequence
  Synthetic polypeptide
MRKPQAESWGSSTASEPQACLDGVGWVSFDFSCLEMVRELWMWNVEEEEHEVGICTWGGQHCGCPAKSLPGPHPGGVSAPQSASQLMVKLLVWQKSVHKLRKVSATSSIAVYPCPGQSSGGAESPAPGPGL

SEQ ID NO: 18872 - protein, 76 aa, Artificial Sequence
  Synthetic polypeptide
GIPRRSPGEAARHPSLRAARTVLVGKWCENFGCGTWRRRNTKWGSALGVVSTADAQQSHCLVHIPEGSLRLSRHRS

SEQ ID NO: 18873 - protein, 76 aa, Artificial Sequence; identical to SEQ ID NO: 18872
  Synthetic polypeptide

SEQ ID NO: 18874 - protein, 168 aa, Artificial Sequence
  Synthetic polypeptide
PLHRVDGNVSGCQETQRADQNEEFPGGVQGRQHGIPASGLPGRCWLGNGARTLDVERGGGGTRSGDLHLGWSALRMPSKVTAWSTSRRGLCASVGIAADGETFGVAEECPQTSEGIRYILHSRVSLPRAIFWGSGKSCSRARAGWLEPLVRRSPGGGSGGPGVASGCE

SEQ ID NO: 18875 - protein, 223 aa, Artificial Sequence
  Synthetic polypeptide
KPVPEAWQSRSPPWQCLCVGALRLRPDLSTGSTGTSLDARRRKGPTRMRNSQAESRGGSTASQPQGCPDGVGWEMVRELWMWNVEEEEHEVGICTWGGQHCGCPAKSLPGPHPGGVSAPQSASQLMVKLLVWQKSVHKLRKVSATSSIAVYPCPGQSSGGAESPAPGPGLAGWSHLCGAALAEVQAAPVSQAAVSDASLGPEWSQEGCRPGLTSGQHGGRDGR

SEQ ID NO: 18876 - protein, 143 aa, Artificial Sequence
  Synthetic polypeptide
PLHRVDGNVSGCQETQRADQNEEFPGGVQGRQHGIPASGLPGRCWLGNGARTLDVERGGGGTRSGDLHLGWSALRMPSKVTAWSTSRRGLCASVGIAADGETFGVAEECPQTSEGIRYILHSRVSLPRAIFWGSGKSCSRARA

SEQ ID NO: 18877 - protein, 170 aa, Artificial Sequence
  Synthetic polypeptide
KPVPEAWQSRSPPWQCLCVGALRLRPDLSTGSTGTSLDARRRKGPTRMRNSQAESRGGSTASQPQGCPDGVGWEMVRELWMWNVEEEEHEVGICTWGGQHCGCPAKSLPGPHPGGVSAPQSASQLMVKLLVWQKSVHKLRKVSATSSIAVYPCPGQSSGGAESPAPGPGL

SEQ ID NO: 18878 - protein, 32 aa, Artificial Sequence
  Synthetic polypeptide
GIPRRSPGEAARHPSLRAARTVLVGFLLISPA

SEQ ID NO: 18879 - protein, 49 aa, Artificial Sequence
  Synthetic polypeptide
PLHRVDGNVSGCQETQRADQNEEFPGGVQGRQHGIPASGLPGRCWLGFF

SEQ ID NO: 18880 - protein, 178 aa, Artificial Sequence
  Synthetic polypeptide
KPVPEAWQSRSPPWQCLCVGALRLRPDLSTGSTGTSLDARRRKGPTRMRNSQAESRGGSTASQPQGCPDGVGWVSFDFSCLEMVRELWMWNVEEEEHEVGICTWGGQHCGCPAKSLPGPHPGGVSAPQSASQLMVKLLVWQKSVHKLRKVSATSSIAVYPCPGQSSGGAESPAPGPGL

SEQ ID NO: 18881 - protein, 76 aa, Artificial Sequence
  Synthetic polypeptide
GNPRRSPGEAARHPSLRAARTVLVGKWCENFGCGTWRRRNTKWGSALGVVSTADAQQSHCLVHIPEGSLRLSRHRS

SEQ ID NO: 18882 - protein, 76 aa, Artificial Sequence; identical to SEQ ID NO: 18881
  Synthetic polypeptide

SEQ ID NO: 18883 - protein, 168 aa, Artificial Sequence
  Synthetic polypeptide
PLLGVDGNVSGCQDSQRADKNEEIPGGVRGRQHGIPASGLPGRCWLGNGARTLDVERGGGGTRSGDLHLGWSALRMPSKVTAWSTSRRGLCASVGIAADGETFGVAEECPQTSEGIRYILHSRVSLPRAIFWGSGKSCSRARAGWLEPLVRRSPGGGSGGPGVASGCE

SEQ ID NO: 18884 - protein, 223 aa, Artificial Sequence
  Synthetic polypeptide
KPVPEAWQSRSPSWQCLCVGALRLRPDLSSGSTGTSPDARTRKGLTRMRKSQAESGGGSTASQPQGCPDGVGWEMVRELWMWNVEEEEHEVGICTWGGQHCGCPAKSLPGPHPGGVSAPQSASQLMVKLLVWQKSVHKLRKVSATSSIAVYPCPGQSSGGAESPAPGPGLAGWSHLCGAALAEVQAAPVSQAAVSDASLGPEWSQEGCRPGLTSGQHGGRDGR

SEQ ID NO: 18885 - protein, 143 aa, Artificial Sequence
  Synthetic polypeptide
PLLGVDGNVSGCQDSQRADKNEEIPGGVRGRQHGIPASGLPGRCWLGNGARTLDVERGGGGTRSGDLHLGWSALRMPSKVTAWSTSRRGLCASVGIAADGETFGVAEECPQTSEGIRYILHSRVSLPRAIFWGSGKSCSRARA

SEQ ID NO: 18886 - protein, 170 aa, Artificial Sequence
  Synthetic polypeptide
KPVPEAWQSRSPSWQCLCVGALRLRPDLSSGSTGTSPDARTRKGLTRMRKSQAESGGGSTASQPQGCPDGVGWEMVRELWMWNVEEEEHEVGICTWGGQHCGCPAKSLPGPHPGGVSAPQSASQLMVKLLVWQKSVHKLRKVSATSSIAVYPCPGQSSGGAESPAPGPGL

SEQ ID NO: 18887 - protein, 32 aa, Artificial Sequence
  Synthetic polypeptide
GNPRRSPGEAARHPSLRAARTVLVGFLLISPA

SEQ ID NO: 18888 - protein, 49 aa, Artificial Sequence
  Synthetic polypeptide
PLLGVDGNVSGCQDSQRADKNEEIPGGVRGRQHGIPASGLPGRCWLGFF

SEQ ID NO: 18889 - protein, 178 aa, Artificial Sequence
  Synthetic polypeptide
KPVPEAWQSRSPSWQCLCVGALRLRPDLSSGSTGTSPDARTRKGLTRMRKSQAESGGGSTASQPQGCPDGVGWVSFDFSCLEMVRELWMWNVEEEEHEVGICTWGGQHCGCPAKSLPGPHPGGVSAPQSASQLMVKLLVWQKSVHKLRKVSATSSIAVYPCPGQSSGGAESPAPGPGL

SEQ ID NO: 18890 - protein, 76 aa, Artificial Sequence; identical to SEQ ID NO: 18881
  Synthetic polypeptide

SEQ ID NO: 18891 - protein, 76 aa, Artificial Sequence; identical to SEQ ID NO: 18881
  Synthetic polypeptide

SEQ ID NO: 18892 - protein, 223 aa, Artificial Sequence
  Synthetic polypeptide
KPVPEAWQSRSAPWQCLCVGALRLRPDLSSGSTGRSPDARTRKGPTRMRKSQAESGGGSTASQPQGCPDGVGWEMVRELWMWNVEEEEHEVGICTWGGQHCGCPAKSLPGPHPGGVSAPQSASQLMVKLLVWQKSVHKLRKVSATSSIAVYPCPGQSSGGAESPAPGPGLAGWSHLCGAALAEVQAAPVSQAAVSDASLGPEWSQEGCRPGLTSGQHGGRDGR

SEQ ID NO: 18893 - protein, 168 aa, Artificial Sequence
  Synthetic polypeptide
PLLGVDGKVSGCQDSQRADQNEEIPGGVRGRQHGIPASGLPGRCWLGNGARTLDVERGGGGTRSGDLHLGWSALRMPSKVTAWSTSRRGLCASVGIAADGETFGVAEECPQTSEGIRYILHSRVSLPRAIFWGSGKSCSRARAGWLEPLVRRSPGGGSGGPGVASGCE

SEQ ID NO: 18894 - protein, 170 aa, Artificial Sequence
  Synthetic polypeptide
KPVPEAWQSRSAPWQCLCVGALRLRPDLSSGSTGRSPDARTRKGPTRMRKSQAESGGGSTASQPQGCPDGVGWEMVRELWMWNVEEEEHEVGICTWGGQHCGCPAKSLPGPHPGGVSAPQSASQLMVKLLVWQKSVHKLRKVSATSSIAVYPCPGQSSGGAESPAPGPGL

SEQ ID NO: 18895 - protein, 143 aa, Artificial Sequence
  Synthetic polypeptide
PLLGVDGKVSGCQDSQRADQNEEIPGGVRGRQHGIPASGLPGRCWLGNGARTLDVERGGGGTRSGDLHLGWSALRMPSKVTAWSTSRRGLCASVGIAADGETFGVAEECPQTSEGIRYILHSRVSLPRAIFWGSGKSCSRARA

SEQ ID NO: 18896 - protein, 32 aa, Artificial Sequence; identical to SEQ ID NO: 18887
  Synthetic polypeptide

SEQ ID NO: 18897 - protein, 178 aa, Artificial Sequence
  Synthetic polypeptide
KPVPEAWQSRSAPWQCLCVGALRLRPDLSSGSTGRSPDARTRKGPTRMRKSQAESGGGSTASQPQGCPDGVGWVSFDFSCLEMVRELWMWNVEEEEHEVGICTWGGQHCGCPAKSLPGPHPGGVSAPQSASQLMVKLLVWQKSVHKLRKVSATSSIAVYPCPGQSSGGAESPAPGPGL

SEQ ID NO: 18898 - protein, 49 aa, Artificial Sequence
  Synthetic polypeptide
PLLGVDGKVSGCQDSQRADQNEEIPGGVRGRQHGIPASGLPGRCWLGFF

SEQ ID NO: 18899 - protein, 54 aa, Artificial Sequence
  Synthetic polypeptide
PGRRPRTIKAEAGMWGPGGGVCAQPGQIPQHRSSGGLLSLCLIPGCLGKCQRRV

SEQ ID NO: 18900 - protein, 54 aa, Artificial Sequence; identical to SEQ ID NO: 18899
  Synthetic polypeptide

SEQ ID NO: 18901 - protein, 580 aa, Artificial Sequence
  Synthetic polypeptide
PDAAPERLKQKLGCGAQVEESVLNLGKFHSIVRLVAFCPFASSQVALENANAVSEGVVHEDLRLLLETHLPSKKKKVLLGVGDPKIGAAIQEELGYNCQTGGVIAEILRGVRLHFHNLVKGLTDLSACKAQLGLGHSYSRAKVKFNVNRVDNMIIQSISLLDQLDKDINTFSMRVREWYGYHFPELVKIINDNATYCRLAQFIGNRRELNEDKLEKLEELTMDGAKAKAILDASRSSMGMDISAIDLINIESFSSRVVSLSEYRQSLHTYLRSKMSQVAPSLSALIGEAVGARLIAHAGSLTNLAKYPASTVQILGAEKALFRALKTRGNTPKYGLIFHSTFIGRAAAKNKGRISRYLANKCSIASRIDCFSEVPTSVFGEKLREQVEERLSFYETGEIPRKNLDVMKEAMVQAEEAAAEITRKLEKQEKKRLKKEKKRLAALALASSENSSSTPEECEEMSEKPKKKKKQKPQEVPQENGMEDPSISFSKPKKKKSFSKEELMSSDLEETAGSTSIPKRKKSTPKEETVNDPEEAGHRSGSKKKRKFSKEEPVSSGPEEAVGKSSSKKKKKFHKASQED

SEQ ID NO: 18902 - protein, 85 aa, Artificial Sequence
  Synthetic polypeptide
SRSWDVGPRWRSLCSTWANSTASFVWWPFVPLPHPRLPWKMPTPCLKGLFMRTSACSWRPTCRPKRRKYSWELGIPRLVPQYRRS

SEQ ID NO: 18903 - protein, 85 aa, Artificial Sequence; identical to SEQ ID NO: 18902
  Synthetic polypeptide

SEQ ID NO: 18904 - protein, 267 aa, Artificial Sequence
  Synthetic polypeptide
PDAAPERLKQKLGCGAQVEESVLNLGKFHSIVRLVAFCPFASSQVALENANAVSEGVVHEDLRLLLETHLPSKKKKVLLGVGDPKIGAAIQEELGYNCQTGGVIAEILRGVRLHFHNLVKGLTDLSACKAQLGLGHSYSRAKVKFNVNRVDNMIIQSISLLDQLDKDINTFSMRVRQSRCGEGKAVALWFLMKQLGQGVTVALCREWYGYHFPELVKIINDNATYCRLAQFIGNRRELNEDKLEKLEELTMDGAKAKAILDASRSSM

SEQ ID NO: 18905 - protein, 18 aa, Artificial Sequence
  Synthetic polypeptide
EHSRPTTLLRCAWALQEW

SEQ ID NO: 18906 - protein, 46 aa, Artificial Sequence
  Synthetic polypeptide
FVNQDFFFFFLPEVVSPRNTVDLPLCSGAHGHCRSGEGQGHGAWDC

SEQ ID NO: 18907 - protein, 120 aa, Artificial Sequence
  Synthetic polypeptide
TYHFAQVRMGIAGVVRDKDTELGIADAVIAVDGINHDVTTAWGGDYWRLLTPGDYMVTASAEGYHSVTRNCRVTFEEGPFPCNFVLTKTPKQRLRELLAAGAKVPPDLRRRLERLRGQKD

SEQ ID NO: 18908 - protein, 15 aa, Artificial Sequence
  Synthetic polypeptide
HNNAKANATSFDAWV

SEQ ID NO: 18909 - protein, 16 aa, Artificial Sequence
  Synthetic polypeptide
NDIIMQRQTPHPSMHG

SEQ ID NO: 18910 - protein, 16 aa, Artificial Sequence
  Synthetic polypeptide
NDIIMQRQTPHPSMHG

SEQ ID NO: 18911 - protein, 12 aa, Artificial Sequence
  Synthetic polypeptide
CKGKRHILRCMG

SEQ ID NO: 18912 - protein, 45 aa, Artificial Sequence
  Synthetic polypeptide
HNNAKANATSFDAWVTVEFVGPLAKRTNSPTSIAEIVSPAASSPT

SEQ ID NO: 18913 - protein, 66 aa, Artificial Sequence
  Synthetic polypeptide
CKGKRHILRCMGNSGICRASCKKNEQPYLYCRNCQSCCLQSYMRISISGKEENTDWSYEKQWPRLP

SEQ ID NO: 18914 - protein, 7 aa, Artificial Sequence
  Synthetic polypeptide
HNNAKLW

SEQ ID NO: 18915 - protein, 30 aa, Artificial Sequence
  Synthetic polypeptide
NDIIMQSSGEDSGMLPGYCQANATSFDAWV

SEQ ID NO: 18916 - protein, 25 aa, Artificial Sequence
  Synthetic polypeptide
CKALVRTVGCCLDTARQTPHPSMHG

SEQ ID NO: 18917 - protein, 62 aa, Artificial Sequence
  Synthetic polypeptide
EVRSPSARQLPRLRSGTQRCWNLYGKCRYRCSKKERVYVYCINNKMCCVKPKYQPKERWWPF

SEQ ID NO: 18918 - protein, 28 aa, Artificial Sequence
  Synthetic polypeptide
EVAPKDAGIFMANAVTDAPRRKESMFTA

SEQ ID NO: 18919 - protein, 56 aa, Artificial Sequence
  Synthetic polypeptide
EVRRPSAQHPPHLRSEEPLRPAAAPSEKWHPKMLESLWQMPLQMLQEGKSLCLLHK

SEQ ID NO: 18920 - protein, 68 aa, Artificial Sequence
  Synthetic polypeptide
VKKLPDPTTLNIQVFSGELSGGTQRCWNLYGKCRYRCSKKERVYVYCINNKMCCVKPKYQPKERWWPF

SEQ ID NO: 18921 - protein, 37 aa, Artificial Sequence
  Synthetic polypeptide
TFKSSQVNSQVAPKDAGIFMANAVTDAPRRKESMFTA

SEQ ID NO: 18922 - protein, 31 aa, Artificial Sequence
  Synthetic polypeptide
TLRWHPKMLESLWQMPLQMLQEGKSLCLLHK

SEQ ID NO: 18923 - protein, 76 aa, Artificial Sequence
  Synthetic polypeptide
GAPLPGRPYWEVRSPSARPPPRLGGRSEFKRCWKGQGACQTYCTRQETYMHLCPDASLCCLSYALKPPPVPKHEYE

SEQ ID NO: 18924 - protein, 52 aa, Artificial Sequence
  Synthetic polypeptide
GAPLPGHHPVWEGEVNSNGAGRVKGPAKLTAQGKKLTCTCARMRPCAVSPMH

SEQ ID NO: 18925 - protein, 59 aa, Artificial Sequence
  Synthetic polypeptide
EVRRPAARPAAPSGREVGGSAPCPSSRPVREVRGASARPPLLGSEEPLCPATTPSGREK

SEQ ID NO: 18926 - protein, 66 aa, Artificial Sequence
  Synthetic polypeptide
EVRSPSARQPPRLGRRSEFKRCWKGQGACQTYCTRQETYMHLCPDASLCCLSYALKPPPVPKHEYE

SEQ ID NO: 18927 - protein, 52 aa, Artificial Sequence
  Synthetic polypeptide
GAPLPGSHPVWEGEVNSNGAGRVKGPAKLTAQGKKLTCTCARMRPCAVSPMH

SEQ ID NO: 18928 - protein, 30 aa, Artificial Sequence
  Synthetic polypeptide
EVRSPSARQLPRLRSEEPLCPAATPSGKEK

SEQ ID NO: 18929 - protein, 41 aa, Artificial Sequence
  Synthetic polypeptide
EGEVNSNGAGRVKGPAKLTAQGKKLTCTCARMRPCAVSPMH

SEQ ID NO: 18930 - protein, 40 aa, Artificial Sequence
  Synthetic polypeptide
GAPLPGCDPVWEVRSVSAQPPRLRSEEPLRPAAAPSEKEK

SEQ ID NO: 18931 - protein, 66 aa, Artificial Sequence
  Synthetic polypeptide
EVRSPSARQLPRLRRRSEFKRCWKGQGACQTYCTRQETYMHLCPDASLCCLSYALKPPPVPKHEYE

SEQ ID NO: 18932 - protein, 89 aa, Artificial Sequence
  Synthetic polypeptide
GASLPGRPSSEMWGAPLPRRPVWDVRSASARLRPRLGGRSEFKRCWKGQGACQTYCTRQETYMHLCPDASLCCLSYALKPPPVPKHEYE

SEQ ID NO: 18933 - protein, 52 aa, Artificial Sequence
  Synthetic polypeptide
GAPLPGCDPVWEGEVNSNGAGRVKGPAKLTAQGKKLTCTCARMRPCAVSPMH

SEQ ID NO: 18934 - protein, 29 aa, Artificial Sequence
  Synthetic polypeptide
DVGSASAPPPRLGCEERLCQAATPSGREK

SEQ ID NO: 18935 - protein, 66 aa, Artificial Sequence
  Synthetic polypeptide
LSHQTPGDLHPAARRTLFNTKDTFVELYGNNAAAESRKGQERFNRWFLTGMTVAGVVLLGSLFSRK

SEQ ID NO: 18936 - protein, 66 aa, Artificial Sequence; identical to SEQ ID NO: 18935
  Synthetic polypeptide

SEQ ID NO: 18937 - protein, 66 aa, Artificial Sequence; identical to SEQ ID NO: 18935
  Synthetic polypeptide

SEQ ID NO: 18938 - protein, 66 aa, Artificial Sequence; identical to SEQ ID NO: 18935
  Synthetic polypeptide

SEQ ID NO: 18939 - protein, 67 aa, Artificial Sequence
  Synthetic polypeptide
LLLTNFPGTIVAKPLSYFPDYLTRPLEISTQQPDGRYLTPRILLWNSMGTMQQPRAERARNASTAGS

SEQ ID NO: 18940 - protein, 67 aa, Artificial Sequence; identical to SEQ ID NO: 18939
  Synthetic polypeptide

SEQ ID NO: 18941 - protein, 67 aa, Artificial Sequence; identical to SEQ ID NO: 18939
  Synthetic polypeptide

SEQ ID NO: 18942 - protein, 67 aa, Artificial Sequence; identical to SEQ ID NO: 18939
  Synthetic polypeptide

SEQ ID NO: 18943 - protein, 48 aa, Artificial Sequence
  Synthetic polypeptide
HQGYFCGTLWEQCSSREPKGPGTLQPLVPDGHDCGRRGSAGLTLQSEM

SEQ ID NO: 18944 - protein, 48 aa, Artificial Sequence; identical to SEQ ID NO: 18943
  Synthetic polypeptide

SEQ ID NO: 18945 - protein, 48 aa, Artificial Sequence; identical to SEQ ID NO: 18943
  Synthetic polypeptide

SEQ ID NO: 18946 - protein, 48 aa, Artificial Sequence; identical to SEQ ID NO: 18943
  Synthetic polypeptide

SEQ ID NO: 18947 - protein, 38 aa, Artificial Sequence
  Synthetic polypeptide
LSHQTPGDLHPAARRTLFNTKDTFVELYGNNAAAESRK

SEQ ID NO: 18948 - protein, 58 aa, Artificial Sequence
  Synthetic polypeptide
LLLTNFPGTIVAKPLSYFPDYLTRPLEISTQQPDGRYLTPRILLWNSMGTMQQPRAER

SEQ ID NO: 18949 - protein, 19 aa, Artificial Sequence
  Synthetic polypeptide
HQGYFCGTLWEQCSSREPK

SEQ ID NO: 18950 - protein, 219 aa, Artificial Sequence
  Synthetic polypeptide
PDGTVGRDSFAGISRSTTIVTAYVMTVTGLGWRDVLEAIKATRPIANPNPGFRQQLEEFGWASSQKGARHRTSKTSGAQCPPMTSATCLLAARVALLSAALVREATGRTAQRCRLSPRAAAERLLGPPPHVAAGWSPDPKYQICLCFGEEDPGPTQHPKEQLIMADVQVQLRPGSSSCTLSASTERPDGSSTPGNPDGITHLQCSCLHPKRAASSSCTR

SEQ ID NO: 18951 - protein, 26 aa, Artificial Sequence
  Synthetic polypeptide
NAEKKADLMGLLGGIALQASLAAPRL

SEQ ID NO: 18952 - protein, 26 aa, Artificial Sequence
  Synthetic polypeptide
NAEKKADLMGLLGGIALQASLAAPRL

SEQ ID NO: 18953 - protein, 26 aa, Artificial Sequence
  Synthetic polypeptide
NAEKKADLMGLLGGIALQASLAAPRL

SEQ ID NO: 18954 - protein, 156 aa, Artificial Sequence
  Synthetic polypeptide
PDGTVGRDSFAGISRSTTIVTAYVMTVTGLGWRDVLEAIKATRPIANPNPGFRQQLEEFGWASSQKLRRQLEERFGESPFRDEEELRALLPLCKRCRQGSATSASSAGPHSAASEGTVQRLVPRTPREAHRPLPLLARVKQTFSCLPRCLSRKGGK

SEQ ID NO: 18955 - protein, 156 aa, Artificial Sequence; identical to SEQ ID NO: 18954
  Synthetic polypeptide

SEQ ID NO: 18956 - protein, 260 aa, Artificial Sequence
  Synthetic polypeptide
TCCVILAKDITYLRIPVADTPEVPIKKHFKECINFIHCCRLNGGNCLVHCFAGISRSTTIVTAYVMTVTGLGWRDVLEAIKATRPIANPNPGFRQQLEEFGWASSQKGARHRTSKTSGAQCPPMTSATCLLAARVALLSAALVREATGRTAQRCRLSPRAAAERLLGPPPHVAAGWSPDPKYQICLCFGEEDPGPTQHPKEQLIMADVQVQLRPGSSSCTLSASTERPDGSSTPGNPDGITHLQCSCLHPKRAASSSCTR

SEQ ID NO: 18957 - protein, 56 aa, Artificial Sequence
  Synthetic polypeptide
SWPRISPTFASRSLIPLRYPSKSTSKNVSTSSTAAALMGGTALCTALQASLAAPRL

SEQ ID NO: 18958 - protein, 56 aa, Artificial Sequence; identical to SEQ ID NO: 18957
  Synthetic polypeptide

SEQ ID NO: 18959 - protein, 56 aa, Artificial Sequence; identical to SEQ ID NO: 18957
  Synthetic polypeptide

SEQ ID NO: 18960 - protein, 24 aa, Artificial Sequence
  Synthetic polypeptide
RPGSAIDLLCDLGQGYHLPSHPGR

SEQ ID NO: 18961 - protein, 24 aa, Artificial Sequence
  Synthetic polypeptide
RPGSAIDLLCDLGQGYHLPSHPGR

SEQ ID NO: 18962 - protein, 24 aa, Artificial Sequence
  Synthetic polypeptide
RPGSAIDLLCDLGQGYHLPSHPGR

SEQ ID NO: 18963 - protein, 24 aa, Artificial Sequence
  Synthetic polypeptide
RPGSAIDLLCDLGQGYHLPSHPGR

SEQ ID NO: 18964 - protein, 197 aa, Artificial Sequence
  Synthetic polypeptide
TCCVILAKDITYLRIPVADTPEVPIKKHFKECINFIHCCRLNGGNCLVHCFAGISRSTTIVTAYVMTVTGLGWRDVLEAIKATRPIANPNPGFRQQLEEFGWASSQKLRRQLEERFGESPFRDEEELRALLPLCKRCRQGSATSASSAGPHSAASEGTVQRLVPRTPREAHRPLPLLARVKQTFSCLPRCLSRKGGK

SEQ ID NO: 18965 - protein, 197 aa, Artificial Sequence; identical to SEQ ID NO: 18964
  Synthetic polypeptide

SEQ ID NO: 18966 - protein, 49 aa, Artificial Sequence
  Synthetic polypeptide
TCCVILAKDITYLRIPVADTPEVPIKKHFKECINFIHCCRLNGGNCLVH

SEQ ID NO: 18967 - protein, 45 aa, Artificial Sequence
  Synthetic polypeptide
SWPRISPTFASRSLIPLRYPSKSTSKNVSTSSTAAALMGGTALCT

SEQ ID NO: 18968 - protein, 300 aa, Artificial Sequence
  Synthetic polypeptide
AVDLSKSTPALSLSLLLSTKDAKDLDQLGRNKITHIISIHESPQPLLQDITYLRIPVADTPEVPIKKHFKECINFIHCCRLNGGNCLVHCFAGISRSTTIVTAYVMTVTGLGWRDVLEAIKATRPIANPNPGFRQQLEEFGWASSQKGARHRTSKTSGAQCPPMTSATCLLAARVALLSAALVREATGRTAQRCRLSPRAAAERLLGPPPHVAAGWSPDPKYQICLCFGEEDPGPTQHPKEQLIMADVQVQLRPGSSSCTLSASTERPDGSSTPGNPDGITHLQCSCLHPKRAASSSCTR

SEQ ID NO: 18969 - protein, 89 aa, Artificial Sequence
  Synthetic polypeptide
ASASSSAQKMPKTWISWAEIRSHTSSLSMSHPSLCCRISPTFASRSLIPLRYPSKSTSKNVSTSSTAAALMGGTALCTALQASLAAPRL

SEQ ID NO: 18970 - protein, 89 aa, Artificial Sequence; identical to SEQ ID NO: 18969
  Synthetic polypeptide

SEQ ID NO: 18971 - protein, 89 aa, Artificial Sequence; identical to SEQ ID NO: 18969
  Synthetic polypeptide

SEQ ID NO: 18972 - protein, 30 aa, Artificial Sequence
  Synthetic polypeptide
CGPEQVYTCAKPQPPPQHKRCQRPGSAGPK

SEQ ID NO: 18973 - protein, 30 aa, Artificial Sequence; identical to SEQ ID NO: 18972
  Synthetic polypeptide

SEQ ID NO: 18974 - protein, 30 aa, Artificial Sequence; identical to SEQ ID NO: 18972
  Synthetic polypeptide

SEQ ID NO: 18975 - protein, 30 aa, Artificial Sequence; identical to SEQ ID NO: 18972
  Synthetic polypeptide

SEQ ID NO: 18976 - protein, 237 aa, Artificial Sequence
  Synthetic polypeptide
AVDLSKSTPALSLSLLLSTKDAKDLDQLGRNKITHIISIHESPQPLLQDITYLRIPVADTPEVPIKKHFKECINFIHCCRLNGGNCLVHCFAGISRSTTIVTAYVMTVTGLGWRDVLEAIKATRPIANPNPGFRQQLEEFGWASSQKLRRQLEERFGESPFRDEEELRALLPLCKRCRQGSATSASSAGPHSAASEGTVQRLVPRTPREAHRPLPLLARVKQTFSCLPRCLSRKGGK

SEQ ID NO: 18977 - protein, 237 aa, Artificial Sequence; identical to SEQ ID NO: 18976
  Synthetic polypeptide

SEQ ID NO: 18978 - protein, 89 aa, Artificial Sequence
  Synthetic polypeptide
AVDLSKSTPALSLSLLLSTKDAKDLDQLGRNKITHIISIHESPQPLLQDITYLRIPVADTPEVPIKKHFKECINFIHCCRLNGGNCLVH

SEQ ID NO: 18979 - protein, 78 aa, Artificial Sequence
  Synthetic polypeptide
ASASSSAQKMPKTWISWAEIRSHTSSLSMSHPSLCCRISPTFASRSLIPLRYPSKSTSKNVSTSSTAAALMGGTALCT

SEQ ID NO: 18980 - protein, 163 aa, Artificial Sequence
  Synthetic polypeptide
RVAERGSGASCLDLNPSCATYQLCDCRKLLFVRARLRPSAGRYRETLQDPDPGQRGLLHIPPKHLQHSAGAGGPLQEGERRALPETVGALHVFQAPEALGERCLGDPSGIPQAGEETWSWAVWGSLDGHLQQAHQGGSEDDEAREHVGGGLPGRGQRDENSAA

SEQ ID NO: 18981 - protein, 163 aa, Artificial Sequence; identical to SEQ ID NO: 18980
  Synthetic polypeptide

SEQ ID NO: 18982 - protein, 163 aa, Artificial Sequence; identical to SEQ ID NO: 18980
  Synthetic polypeptide

SEQ ID NO: 18983 - protein, 163 aa, Artificial Sequence; identical to SEQ ID NO: 18980
  Synthetic polypeptide

SEQ ID NO: 18984 - protein, 163 aa, Artificial Sequence; identical to SEQ ID NO: 18980
  Synthetic polypeptide

SEQ ID NO: 18985 - protein, 163 aa, Artificial Sequence; identical to SEQ ID NO: 18980
  Synthetic polypeptide

SEQ ID NO: 18986 - protein, 361 aa, Artificial Sequence
  Synthetic polypeptide
IPAVPLTSCVTVGSYSLSVRDYDPRQGDTVKHYKIRTLDNGGFYISPRSTFSTLQELVDHYKKGNDGLCQKLSVPCMSSKPQKPWEKDAWEIPRESLKLEKKLGAGQFGEVWMATYNKHTKVAVKTMKPGSMSVEAFLAEANVMKTLQHDKLVKLHAVVTKEPIYIITEFMAKGSLLDFLKSDEGSKQPLPKLIDFSAQIAEGMAFIEQRNYIHRDLRAANILVSASLVCKIADFGLARVIEDNEYTAREGAKFPIKWTAPEAINFGSFTIKSDVWSFGILLMEIVTYGRIPYPGMSNPEVIRALERGYRMPRPENCPEELYNIMMRCWKNRPEERPTFEYIQSVLDDFYTATESQYQQQP

SEQ ID NO: 18987 - protein, 361 aa, Artificial Sequence; identical to SEQ ID NO: 18986
  Synthetic polypeptide

SEQ ID NO: 18988 - protein, 361 aa, Artificial Sequence; identical to SEQ ID NO: 18986
  Synthetic polypeptide

SEQ ID NO: 18989 - protein, 361 aa, Artificial Sequence; identical to SEQ ID NO: 18986
  Synthetic polypeptide

SEQ ID NO: 18990 - protein, 361 aa, Artificial Sequence; identical to SEQ ID NO: 18986
  Synthetic polypeptide

SEQ ID NO: 18991 - protein, 361 aa, Artificial Sequence; identical to SEQ ID NO: 18986
  Synthetic polypeptide

SEQ ID NO: 18992 - protein, 27 aa, Artificial Sequence
  Synthetic polypeptide
AGHDGSTPVIPALWEAETQPNHQQVRE

SEQ ID NO: 18993 - protein, 27 aa, Artificial Sequence
  Synthetic polypeptide
AGHDGSTPVIPALWEAETQPNHQQVRE

SEQ ID NO: 18994 - protein, 69 aa, Artificial Sequence
  Synthetic polypeptide
SQHFGRLRHSQIINKFVNSVINTLKSTVSSLLQKEICPLIRIFIHSLDVNVIQQVVDNPQHKTQLQTLI

SEQ ID NO: 18995 - protein, 69 aa, Artificial Sequence; identical to SEQ ID NO: 18994
  Synthetic polypeptide

SEQ ID NO: 18996 - protein, 411 aa, Artificial Sequence
  Synthetic polypeptide
KHLAQCLAFGGRENKMPILISKIFKGLAADQTEALFVGDAILSVNGEDLSSATHDEAVQVLKKTGKEVVLEVKYMKDVSPYFKNSTGGTSVGWDSPPASPLQRQPSSPGPTPRNFSEAKHMSLKMAYVSKRCTPNDPEPRYLEICSADGQDTLFLRAKDEASARSWATAIQAQVNTLTPRVKDELQALLAATSTAGSQDIKQIGWLTEQLPSGGTAPTLALLTEKELLLYLSLPETREALSRPARTAPLIATRLVHSGPSKGSVPYDAELSFALRTGTRHGVDTHLFSVESPQELAAWTRQLVDGCHRAAEGVQEVSTACTWNGRPCSLSVHIDKGFTLWAAEPGAARAVLLRQPFEKLQMSSDDGASLLFLDFGGAEGEIQLDLHSCPKTIVFIIHSFLSAKVTRLGLLA

SEQ ID NO: 18997 - protein, 40 aa, Artificial Sequence
  Synthetic polypeptide
HSAWHLAAGRTRCLFSFPRSSRDWQLTRQRPFLWGMPSCL

SEQ ID NO: 18998 - protein, 36 aa, Artificial Sequence
  Synthetic polypeptide
RRNESTLKAFSTVLGIWRPGEQDAYSHFQDLQGIGS

SEQ ID NO: 18999 - protein, 9 aa, Artificial Sequence
  Synthetic polypeptide
GLTKRPSRH

SEQ ID NO: 19000 - protein, 9 aa, Artificial Sequence
  Synthetic polypeptide
LSGPPGTEA

SEQ ID NO: 19001 - protein, 4 aa, Artificial Sequence
  Synthetic polypeptide
TPLR

SEQ ID NO: 19002 - protein, 6 aa, Artificial Sequence
  Synthetic polypeptide
PRLDDF

SEQ ID NO: 19003 - protein, 398 aa, Artificial Sequence
  Synthetic polypeptide
QLLIISTATVIFLVWSLLQQSLQLSPCFHPFPSTQHWSEVQWSSCNIFSTQDHAAAAIAKAGIPVYAWKGETDEEYLWCIEQTLYFKDGPLNMILDDGGDLTNLIHTKYPQLLPGIRGISEETTTGVHNLYKMMANGILKVPAINVNDSVTKSKFDNLYGCRESLIDGIKRATDVMIAGKVAVVAGYGDVGKGCAQALRGFGARVIITEIDPINALQAAMEGYEVTTMDEACQEGNIFVTTTGCIDIILGRHFEQMKDDAIVCNIGHFDVEIDVKWLNENAVEKVNIKPQVDRYRLKNGRRIILLAEGRLVNLGCAMGHPSFVMSNSFTNQVMAQIELWTHPDKYPVGVHFLPKKLDEAVAEAHLGKLNVKLTKLTEKQAQYLGMSCDGPFKPDHYRY

SEQ ID NO: 19004 - protein, 398 aa, Artificial Sequence; identical to SEQ ID NO: 19003
  Synthetic polypeptide

SEQ ID NO: 19005 - protein, 147 aa, Artificial Sequence
  Synthetic polypeptide
VNGTSVPAFWVLSIHESGSHLLPSLSSPLPTPFTPTTHPSANPVSAAFRVDPGCDNFSSSPLLLSYFLSGVFSNSLCSCPLASTLSLPHSTGVRCSGPAATSSPPRTMRRLPLPRLAFRCMPGRAKRTRSTCGALSRPCTSRTGPST

SEQ ID NO: 19006 - protein, 147 aa, Artificial Sequence; identical to SEQ ID NO: 19005
  Synthetic polypeptide

SEQ ID NO: 19007 - protein, 32 aa, Artificial Sequence
  Synthetic polypeptide
LHHCTPPWAFPSRAPWTTPPPPSMPASCTASS

SEQ ID NO: 19008 - protein, 32 aa, Artificial Sequence; identical to SEQ ID NO: 19007
  Synthetic polypeptide

SEQ ID NO: 19009 - protein, 32 aa, Artificial Sequence; identical to SEQ ID NO: 19007
  Synthetic polypeptide

SEQ ID NO: 19010 - protein, 50 aa, Artificial Sequence
  Synthetic polypeptide
AQEVKATVSRDCTTALHPGHSHQEHHGQPHHHPVCQPHAQLHPEGTEHRA

SEQ ID NO: 19011 - protein, 50 aa, Artificial Sequence; identical to SEQ ID NO: 19010
  Synthetic polypeptide

SEQ ID NO: 19012 - protein, 50 aa, Artificial Sequence; identical to SEQ ID NO: 19010
  Synthetic polypeptide

SEQ ID NO: 19013 - protein, 80 aa, Artificial Sequence
  Synthetic polypeptide
AVTAPLHSTLGIPIKSTMDNPTTTQYASLMHSFILKARSTVRDIDPQNDLTFLRIRSKKNEIMVAPDKDYFLIVIQNPTE

SEQ ID NO: 19014 - protein, 80 aa, Artificial Sequence; identical to SEQ ID NO: 19013
  Synthetic polypeptide

SEQ ID NO: 19015 - protein, 105 aa, Artificial Sequence
  Synthetic polypeptide
AVTAPLHSTLGIPIKSTMDNPTTTQYASLMHSFILKARSTVRDIDPQNDLTFLRIRSKKNEIMVAPGKGSSTSPCRNRPHGTFSVAHQESWHSGVSRGSKQGPRS

SEQ ID NO: 19016 - protein, 48 aa, Artificial Sequence
  Synthetic polypeptide
TYRMLAHPRAFVLALGAVWNTPQKPAWLTPSFPSDVYSLLPWQRWRRH

SEQ ID NO: 19017 - protein, 48 aa, Artificial Sequence; identical to SEQ ID NO: 19016
  Synthetic polypeptide

SEQ ID NO: 19018 - protein, 48 aa, Artificial Sequence; identical to SEQ ID NO: 19016
  Synthetic polypeptide

SEQ ID NO: 19019 - protein, 48 aa, Artificial Sequence; identical to SEQ ID NO: 19016
  Synthetic polypeptide

SEQ ID NO: 19020 - protein, 70 aa, Artificial Sequence
  Synthetic polypeptide
LPHFLQMSTHYCLGRGGGDTEATAEPEGSAGNHRREHRRHSHQEHHGQPHHHPVCQPHAQLHPEGTEHRA

SEQ ID NO: 19021 - protein, 70 aa, Artificial Sequence; identical to SEQ ID NO: 19020
  Synthetic polypeptide

SEQ ID NO: 19022 - protein, 70 aa, Artificial Sequence; identical to SEQ ID NO: 19020
  Synthetic polypeptide

SEQ ID NO: 19023 - protein, 181 aa, Artificial Sequence
  Synthetic polypeptide
ITPSENQGQHLICQAVCGLVPDPSCCPSPAPCPSATVAPLLFPLNIPDACPPQGFCACSWCCLEHSPETGMANSLISFRCLLTIALAEVEETLKRLQSQKGVQGIIVVNTEGIPIKSTMDNPTTTQYASLMHSFILKARSTVRDIDPQNDLTFLRIRSKKNEIMVAPDKDYFLIVIQNPTE

SEQ ID NO: 19024 - protein, 181 aa, Artificial Sequence; identical to SEQ ID NO: 19023
  Synthetic polypeptide

SEQ ID NO: 19025 - protein, 206 aa, Artificial Sequence
  Synthetic polypeptide
ITPSENQGQHLICQAVCGLVPDPSCCPSPAPCPSATVAPLLFPLNIPDACPPQGFCACSWCCLEHSPETGMANSLISFRCLLTIALAEVEETLKRLQSQKGVQGIIVVNTEGIPIKSTMDNPTTTQYASLMHSFILKARSTVRDIDPQNDLTFLRIRSKKNEIMVAPGKGSSTSPCRNRPHGTFSVAHQESWHSGVSRGSKQGPRS

SEQ ID NO: 19026 - protein, 60 aa, Artificial Sequence
  Synthetic polypeptide
LPHFLQMSTHYCLGRGGGDTEATAEPEGSAGNHRREHRRRLGALGTLWRQEQAPCSGLPL

SEQ ID NO: 19027 - protein, 132 aa, Artificial Sequence
  Synthetic polypeptide
ITPSENQGQHLICQAVCGLVPDPSCCPSPAPCPSATVAPLLFPLNIPDACPPQGFCACSWCCLEHSPETGMANSLISFRCLLTIALAEVEETLKRLQSQKGVQGIIVVNTEGGWEPLGHCGDRSRPPAQGCP

SEQ ID NO: 19028 - protein, 49 aa, Artificial Sequence
  Synthetic polypeptide
HQKQKPSLLTKEHYPPPKFAKRIKSKIDQASGYSCNLQEILKTSGSTYL

SEQ ID NO: 19029 - protein, 49 aa, Artificial Sequence; identical to SEQ ID NO: 19028
  Synthetic polypeptide

SEQ ID NO: 19030 - protein, 49 aa, Artificial Sequence; identical to SEQ ID NO: 19028
  Synthetic polypeptide

SEQ ID NO: 19031 - protein, 49 aa, Artificial Sequence; identical to SEQ ID NO: 19028
  Synthetic polypeptide

SEQ ID NO: 19032 - protein, 75 aa, Artificial Sequence
  Synthetic polypeptide
KQAAVHTCENEEQSLLDLFLGVCHDVCGKPSGNHLPLLLPSQLLGFHPRSLWLYTFCSRSHSKHWSFLVLLCRDV

SEQ ID NO: 19033 - protein, 75 aa, Artificial Sequence; identical to SEQ ID NO: 19032
  Synthetic polypeptide

SEQ ID NO: 19034 - protein, 75 aa, Artificial Sequence; identical to SEQ ID NO: 19032
  Synthetic polypeptide

SEQ ID NO: 19035 - protein, 236 aa, Artificial Sequence
  Synthetic polypeptide
LQFARNTENKRQYIPVKMKSKAFWIFSWEYAMMYVGSLVVIICLSFFLLSSWDFIPAVYGFILSVPDLTPNIGLFWYFFAEMFEHFSLFFVCVFQINVFFYTIPLAIKLKEHPIFFMFIQIAVIAIFKSYPTVGDVALYMAFFPVWNHLYRFLRNIFVLTCIIIVCSLLFPVLWHLWIYAGSANSNFFYAITLTFNVGQILLISDYFYAFLRREYYLTHGLYLTAKDGTEAMLVLK

SEQ ID NO: 19036 - protein, 236 aa, Artificial Sequence; identical to SEQ ID NO: 19035
  Synthetic polypeptide

SEQ ID NO: 19037 - protein, 224 aa, Artificial Sequence
  Synthetic polypeptide
LQFARNTENKRQYIPVKMKSKAFWIFSWEYAMMYVGSLVVIICLSFFLLSSWDFIPAVYGFILSVPDLTPNIGLFWYFFAEMFEHFSLFFVCVFQINVFFYTIPLAIKLKEHPIFFMFIQIAVIAIFKSYPTVGDVALYMAFFPVWNHLYRFLRNIFVLTCIIIVCSLLFPVLWHLWIYAGSANSNFFYAITLTFNVGQMGFCGDRMAGTCPEAIRAAGDRTPS

SEQ ID NO: 19038 - protein, 154 aa, Artificial Sequence
  Synthetic polypeptide
KQAAVHTCENEEQSLLDLFLGVCHDINVFFYTIPLAIKLKEHPIFFMFIQIAVIAIFKSYPTVGDVALYMAFFPVWNHLYRFLRNIFVLTCIIIVCSLLFPVLWHLWIYAGSANSNFFYAITLTFNVGQILLISDYFYAFLRREYYLTHGLYLT

SEQ ID NO: 19039 - protein, 42 aa, Artificial Sequence
  Synthetic polypeptide
LQFARNTENKRQYIPVKMKSKAFWIFSWEYAMISTSSSTPSP

SEQ ID NO: 19040 - protein, 109 aa, Artificial Sequence
  Synthetic polypeptide
LNCSRMYFRKKKIEPKMEEIRSKKEWNNKDEQPCHCYDTPGWKCVIFHDGTRPQSRAAAQDSSPCFSVRCNGSTPLWAPYTAAKSSLRIFSSPTSPNAACLCEQTNEPS

SEQ ID NO: 19041 - protein, 109 aa, Artificial Sequence; identical to SEQ ID NO: 19040
  Synthetic polypeptide

SEQ ID NO: 19042 - protein, 1897 aa, Artificial Sequence
  Synthetic polypeptide
DLRRNGIIRMNNPATVMIPPGGNVSSSMMAPGPNPELQPRTPRPASQSDAMDPLLSGLHIQQQSHPSGSLAPPHHPMQPVSVNRQMNPANFPQLQQQQQQQQQQQQQQQQQQQQQQQQQLQARPPQQHQQQQPQGIRPQFTAPTQVPVPPGWNQLPSGALQPPPAQGSLGTMTANQGWKKAPLPGPMQQQLQARPSLATVQTPSHPPPPYPFGSQQASQAHTNFPQMSNPGQFTAPQMKSLQGGPSRVPTPLQQPHLTNKSPASSPSSFQQGSPASSPTVNQTQQQMGPRPPQNNPLPQGFQQPVSSPGRNPMVQQGNVPPNFMVMQQQPPNQGPQSLHPGLGGMPKRLPPGFSAGQANPNFMQGQVPSTTATTPGNSGAPQLQANQNVQHAGGQGAGPPQNQMQVSHGPPNMMQPSLMGIHGNMNNQQAGTSGVPQVNLSNMQGQPQQGPPSQLMGMHQQIVPSQGQMVQQQGTLNPQNPMILSRAQLMPQGQMMVNPPSQNLGPSPQRMTPPKQMLSQQGPQMMAPHNQMMGPQGQVLLQQNPMIEQIMTNQMQGNKQQFNTQNQSNVMPGPAQIMRGPTPNMQGNMVQFTGQMSGQMLPQQGPVNNSPSQVMGIQGQVLRPPGPSPHMAQQHGDPATTANNDVSLSQMMPDVSIQQTNMVPPHVQAMQGNSASGNHFSGHGMSFNAPFSGAPNGNQMSCGQNPGFPVNKDVTLTSPLLVNLLQSDISAGHFGVNNKQNNTNANKPKKKKPPRKKKNSQQDLNTPDTRPAGLEEADQPPLPGEQGINLDNSGPKLPEFSNRPPGYPSQPVEQRPLQQMPPQLMQHVAPPPQPPQQQPQPQLPQQQQPPPPSQPQSQQQQQQQQQMMMMLMMQQDPKSVRLPVSQNVHPPRGPLNPDSQRMPMQQSGSVPVMVSLQGPASVPPSPDKQRMPMPVNTPLGSNSRKMVYQESPQNPSSSPLAEMASLPEASGSEAPSVPGGPNNMPSHVVLPQNQLMMTGPKPGPSPLSATQGATPQQPPVNSLPSSHGHHFPNVAAPTQTSRPKTPNRASPRPYYPQTPNNRPPSTEPSEISLSPERLNASIAGLFPPQINIPLPPRPNLNRGFDQQGLNPTTLKAIGQAPSNLTMNPSNFATPQTHKLDSVVVNSGKQSNSGATKRASPSNSRRSSPGSSRKTTPSPGRQNSKAPKLTLASQTNAALLQNVELPRNVLVSPTPLANPPVPGSFPNNSGLNPQNSTVSVAAVGGVVEDNKESLNVPQDSDCQNSQSRKEQVNIELKAVPAQEVKMVVPEDQSKKDGQPSDPNKLPSVEENKNLVSPAMREAPTSLSQLLDNSGAPNVTIKPPGLTDLEVTPPVVSGEDLKKASVIPTLQDLSSSKEPSNSLNLPHSNELCSSLVHPELSEVSSNVAPSIPPVMSRPVSSSSISTPLPPNQITVFVTSNPITTSANTSAALPTHLQSALMSTVVTMPNAGSKVMVSEGQSAAQSNARPQFITPVFINSSSIIQVMKGSQPSTIPAAPLTTNSGLMPPSVAVVGPLHIPQNIKFSSAPVPPNALSSSPAPNIQTGRPLVLSSRATPVQLPSPPCTSSPVVPSHPPVQQVKELNPDEASPQVNTSADQNTLPSSQSTTMVSPLLTNSPGSSGNRRSPVSSSKGKGKVDKIGQILLTKACKKVTGSLEKGEEQYGADGETEGQGLDTTAPGLMGTEQLSTELDSKTPTPPAPTLLKMTSSPVGPGTASAGPSLPGGALPTSVRSIVTTLVPSELISAVPTTKSNHGGIASESLAGGLVEEKVGSHPELLPSIAPSQNLVSKETSTTALQASVARPELEVNAAIVSGQSSEPKEIVEKSKIPGRRNSRTEEPTVASESVENGHRKRSSRPASASSSTKDITSAVQSKRRKSK

SEQ ID NO: 19043 - protein, 1897 aa, Artificial Sequence; identical to SEQ ID NO: 19042
  Synthetic polypeptide

SEQ ID NO: 19044 - protein, 4 aa, Artificial Sequence
  Synthetic polypeptide
EGME

SEQ ID NO: 19045 - protein, 4 aa, Artificial Sequence
  Synthetic polypeptide
EGME

SEQ ID NO: 19046 - protein, 356 aa, Artificial Sequence
  Synthetic polypeptide
EAKAGRSLEDITLKIQFLRLLQSFSDHHENKYLLLNNQELNELSAISLKANIPEVEAVLNTDRSLVCDGKRGLLTRLLQVMKKEPAESSFRFWQARAVESFLRGTTSYADQMFLLKRGLLEHILYCIVDSECKSRDVLQSYFDLLGELMKFNVDAFKRFNKYINTDAKFQVFLKQINSSLVDSNMLVRCVTLSLDRFENQVDMKVAEVLSECRLLAYISQVPTQMSFLFRLINIIHVQTLTQENVSCLNTSLVILMLARRKERLPLYLRLLQRMEHSKKYPGFLLNNFHNLLRFWQQHYLHKDKDSTCLENSSCISFSYWKETVSILLNPDRQSPSALVSYIEEPYMDIDRDFTEE

SEQ ID NO: 19047 - protein, 356 aa, Artificial Sequence; identical to SEQ ID NO: 19046
  Synthetic polypeptide

SEQ ID NO: 19048 - protein, 356 aa, Artificial Sequence; identical to SEQ ID NO: 19046
  Synthetic polypeptide

SEQ ID NO: 19049 - protein, 356 aa, Artificial Sequence; identical to SEQ ID NO: 19046
  Synthetic polypeptide

SEQ ID NO: 19050 - protein, 17 aa, Artificial Sequence
  Synthetic polypeptide
SQHFERPRRADHLRTSP

SEQ ID NO: 19051 - protein, 17 aa, Artificial Sequence
  Synthetic polypeptide
SQHFERPRRADHLRTSP

SEQ ID NO: 19052 - protein, 17 aa, Artificial Sequence
  Synthetic polypeptide
SQHFERPRRADHLRTSP

SEQ ID NO: 19053 - protein, 17 aa, Artificial Sequence
  Synthetic polypeptide
SQHFERPRRADHLRTSP

SEQ ID NO: 19054 - protein, 14 aa, Artificial Sequence
  Synthetic polypeptide
TSSSRERPLPGGCA

SEQ ID NO: 19055 - protein, 393 aa, Artificial Sequence
  Synthetic polypeptide
SFKTELQLHLCEAFPEHLPPGNDLFLVAVHELGHALGLEHSSDPSAIMAPFYQYMETHNFKLPQDDLQGIQKIYGPPAEPLEPTRPLPTLPVRRIHSPSERKHERQPRPPRPPLGDRPSTPGTKPNICDGNFNTVALFRGEMFVFKDRWFWRLRNNRVQEGYPMQIEQFWKGLPARIDAAYERADGRFVFFKGDKYWVFKEVTVEPGYPHSLGELGSCLPREGIDTALRWEPVGKTYFFKGERYWRYSEERRATDPGYPKPITVWKGIPQAPQGAFISKEGYYTYFYKGRDYWKFDNQKLSVEPGYPRNILRDWMGCNQKEVERRKERRLPQDDVDIMVTINDVPGSVNAVAVVIPCILSLCILVLVYTIFQFKNKTGPQPVTYYKRPVQEWV

SEQ ID NO: 19056 - protein, 205 aa, Artificial Sequence
  Synthetic polypeptide
LTSDPSRLSFNFTFVKLSLNIFLQGTTSSWWLCMSWATRWDWSTPATPAPSWRPSTSTWRRTTSSCPRTISRASRRSMDPQPSLWSPQGHSLHSPSAGSTHHRRGNTSASPGPLGRPSGTGHPHQAPNPTSVTATSTQWPSSGARCLSLRIAGSGVCAITECRRATPCRSSSSGRACLPASTQPMKGPMGDLSSSKVTSIGCLRR

SEQ ID NO: 19057 - protein, 285 aa, Artificial Sequence
  Synthetic polypeptide
SQHFWRLRQLDHLKSGVQDQPGQHELGKVEVTVFDPDSLDPDRCESCYGAEAEDIKCCNTCEDVREAYRRRGWAFKNPDTIEQCRREGFSQKMQEQKNEGCQVYGFLEVNKVAGNFHFAPGKSFQQSHVHVHDLQSFGLDNINMTHYIQHLSFGEDYPGIVNPLDHTNVTAPQASMMFQYFVKVVPTVYMKVDGEVLRTNQFSVTRHEKVANGLLGDQGLPGVFVLYELSPMMVKLTEKHRSFTHFLTGVCAIIGGMFTVAGLIDSLIYHSARAIQKKIDLGKTT

SEQ ID NO: 19058 - protein, 17 aa, Artificial Sequence
  Synthetic polypeptide
SQEFKTSLANMSLGKSR

SEQ ID NO: 19059 - protein, 17 aa, Artificial Sequence
  Synthetic polypeptide
SQEFKTSLANMSLGKSR

SEQ ID NO: 19060 - protein, 17 aa, Artificial Sequence
  Synthetic polypeptide
SQEFKTSLANMSLGKSR

SEQ ID NO: 19061 - protein, 17 aa, Artificial Sequence
  Synthetic polypeptide
SQEFKTSLANMSLGKSR

SEQ ID NO: 19062 - protein, 17 aa, Artificial Sequence
  Synthetic polypeptide
SQEFKTSLANMSLGKSR

SEQ ID NO: 19063 - protein, 17 aa, Artificial Sequence
  Synthetic polypeptide
SQEFKTSLANMSLGKSR

SEQ ID NO: 19064 - protein, 290 aa, Artificial Sequence
  Synthetic polypeptide
SQHFWRLRQLDHLKSGVQDQPGQHELGKVEVTVFDPDSLDPDRCESCYGAEAEDIKCCNTCEDVREAYRRRGWAFKNPDTIEQCRREGFSQKMQEQKNEGCQVYGFLEVNKVAGNFHFAPGKSFQQSHVHVHAVEIHDLQSFGLDNINMTHYIQHLSFGEDYPGIVNPLDHTNVTAPQASMMFQYFVKVVPTVYMKVDGEVLRTNQFSVTRHEKVANGLLGDQGLPGVFVLYELSPMMVKLTEKHRSFTHFLTGVCAIIGGMFTVAGLIDSLIYHSARAIQKKIDLGKTT

SEQ ID NO: 19065 - protein, 290 aa, Artificial Sequence
  Synthetic polypeptide
SQHFWRLRQLDHLKSGVQDQPGQHELGKVEVTVFDPDSLDPDRCESCYGAEAEDIKCCNTCEDVREAYRRRGWAFKNPDTIEQCRREGFSQKMQEQKNEGCQVYGFLEVNKVAGNFHFAPGKSFQQSHVHVQGEEVHDLQSFGLDNINMTHYIQHLSFGEDYPGIVNPLDHTNVTAPQASMMFQYFVKVVPTVYMKVDGEVLRTNQFSVTRHEKVANGLLGDQGLPGVFVLYELSPMMVKLTEKHRSFTHFLTGVCAIIGGMFTVAGLIDSLIYHSARAIQKKIDLGKTT

SEQ ID NO: 19066 - protein, 300 aa, Artificial Sequence
  Synthetic polypeptide
SQHFWRLRQLDHLKSGVQDQPGQHELGKVEVTVFDPDSLDPDRCESCYGAEAEDIKCCNTCEDVREAYRRRGWAFKNPDTIEQCRREGFSQKMQEQKNEGCQVYGFLEVNKVAGNFHFAPGKSFQQSHVHGCVCRLKMIARSLACVHDLQSFGLDNINMTHYIQHLSFGEDYPGIVNPLDHTNVTAPQASMMFQYFVKVVPTVYMKVDGEVLRTNQFSVTRHEKVANGLLGDQGLPGVFVLYELSPMMVKLTEKHRSFTHFLTGVCAIIGGMFTVAGLIDSLIYHSARAIQKKIDLGKTT

SEQ ID NO: 19067 - protein, 300 aa, Artificial Sequence; identical to SEQ ID NO: 19066
  Synthetic polypeptide

SEQ ID NO: 19068 - protein, 226 aa, Artificial Sequence
  Synthetic polypeptide
SQHFWRLRQLDHLKSGVQDQPGQHELGKVEVTVFDPDSLDPDRCESCYGAEAEDIKCCNTCEDVREAYRRRGWAFKNPDTIEQCRREGFSQKMQEQKNEGCQVYGFLEVNKVAGNFHFAPGKSFQQSHVHVHDLQSFGLDNINMTHYIQHLSFGEDYPGIVNPLDHTNVTAPQASMMFQYFVKVVPTVYMKVDGEVLRTNQFSVTRHEKVANGLLGDQGLPGVFVL

SEQ ID NO: 19069 - protein, 27 aa, Artificial Sequence
  Synthetic polypeptide
TGRQKPRRLLVLVPLLTRPRPPRGQLQ

SEQ ID NO: 19070 - protein, 27 aa, Artificial Sequence
  Synthetic polypeptide
TGRQKPRRLLVLVPLLTRPRPPRGQLQ

SEQ ID NO: 19071 - protein, 27 aa, Artificial Sequence
  Synthetic polypeptide
TGRQKPRRLLVLVPLLTRPRPPRGQLQ

SEQ ID NO: 19072 - protein, 27 aa, Artificial Sequence
  Synthetic polypeptide
TGRQKPRRLLVLVPLLTRPRPPRGQLQ

SEQ ID NO: 19073 - protein, 27 aa, Artificial Sequence
  Synthetic polypeptide
TGRQKPRRLLVLVPLLTRPRPPRGQLQ

SEQ ID NO: 19074 - protein, 27 aa, Artificial Sequence
  Synthetic polypeptide
TGRQKPRRLLVLVPLLTRPRPPRGQLQ

SEQ ID NO: 19075 - protein, 140 aa, Artificial Sequence
  Synthetic polypeptide
SWFHCLLGHGHPEANSNEKHPSQQDTRPAEQSLDMEEKDYSEADGLSERTTPSKAQKSPQKIAKKYKSAICRVTLLDASEYECEVEKHGRGQVLFDLVCEHLNLLEKDYFGLTFCDADSQKNWLDPSKEIKKQIRSSPWN

SEQ ID NO: 19076 - protein, 42 aa, Artificial Sequence
  Synthetic polypeptide
WKAEATQTSSPGSTAYSATATQRPTPMRSIHPSRTRGLLNRA

SEQ ID NO: 19077 - protein, 42 aa, Artificial Sequence; identical to SEQ ID NO: 19076
  Synthetic polypeptide

SEQ ID NO: 19078 - protein, 42 aa, Artificial Sequence; identical to SEQ ID NO: 19076
  Synthetic polypeptide

SEQ ID NO: 19079 - protein, 42 aa, Artificial Sequence; identical to SEQ ID NO: 19076
  Synthetic polypeptide

SEQ ID NO: 19080 - protein, 42 aa, Artificial Sequence; identical to SEQ ID NO: 19076
  Synthetic polypeptide

SEQ ID NO: 19081 - protein, 160 aa, Artificial Sequence
  Synthetic polypeptide
SWFHCLLGHGHPEANSNEKHPSQQDTRPAEQSLDMEEKDYSEADGLSERTTPSKAQKSPQKIAKKYKSAICRVTLLDASEYECEVEKHGRGQVLFDLVCEHLNLLEKDYFGLTFCDADSQKNWLDPSKEIKKQIRSSPWNFAFTVKFYPPDPAQLTEDIT

SEQ ID NO: 19082 - protein, 86 aa, Artificial Sequence
  Synthetic polypeptide
SWFHCLLGHGHPEANSNEKHPSQQDTRPAEQSLDMEEKDYSEADGLSERTTPSKAQKSPQKIAKKYKSAICRVTLLDASEYECEVE

SEQ ID NO: 19083 - protein, 31 aa, Artificial Sequence
  Synthetic polypeptide
SWFHCLLGHGHPEANSNEKHPSQQDTRPAEQ

SEQ ID NO: 19084 - protein, 40 aa, Artificial Sequence
  Synthetic polypeptide
WKAEATQTSSPGSTAYSATATQRPTPMRSIHPSRTRGLLN

SEQ ID NO: 19085 - protein, 853 aa, Artificial Sequence
  Synthetic polypeptide
SWFHCLLGHGHPEANSNEKHPSQQDTRPAEQSLDMEEKDYSEADGLSERTTPSKAQKSPQKIAKKYKSAICRVTLLDASEYECEVEKHGRGQVLFDLVCEHLNLLEKDYFGLTFCDADSQKNWLDPSKEIKKQIRSSPWNFAFTVKFYPPDPAQLTEDITRYYLCLQLRADIITGRLPCSFVTHALLGSYAVQAELGDYDAEEHVGNYVSELRFAPNQTRELEERIMELHKTYRGMTPGEAEIHFLENAKKLSMYGVDLHHAKDSEGIDIMLGVCANGLLIYRDRLRINRFAWPKILKISYKRSNFYIKIRPGEYEQFESTIGFKLPNHRSAKRLWKVCIEHHTFFRLVSPEPPPKGFLVMGSKFRYSGRTQAQTRQASALIDRPAPFFERSSSKRYTMSRSLDGAEFSRPASVSENHDAGPDGDKRDEDGESGGQRSEAEEGEVRTPTKIKELKPEQETTPRHKQEFLDKPEDVLLKHQASINELKRTLKEPNSKLIHRDRDWERERRLPSSPASPSPKGTPEKANERAGLREGSEEKVKPPRPRAPESDTGDEDQDQERDTVFLKDNHLAIERKCSSITVSSTSSLEAEVDFTVIGDYHGSAFEDFSRSLPELDRDKSDSDTEGLLFSRDLNKGAPSQDDESGGIEDSPDRGACSTPDMPQFEPVKTETMTVSSLAIRKKIEPEAVLQTRVSAMDNTQQVDGSASVGREFIATTPSITTETISTTMENSLKSGKGAAAMIPGPQTVATEIRSLSPIIGKDVLTSTYGATAETLSTSTTTHVTKTVKGGFSETRIEKRIIITGDEDVDQDQALALAIKEAKLQHPDMLVTKAVVYRETDPSPEERDKKPQES

SEQ ID NO: 19086 - protein, 852 aa, Artificial Sequence
  Synthetic polypeptide
SWFHCLLGHGHPEANSNEKHPSQQDTRPAEQSLDMEEKDYSEADGLSERTTPSKAQKSPQKIAKKYKSAICRVTLLDASEYECEVEKHGRGQVLFDLVCEHLNLLEKDYFGLTFCDADSQKNWLDPSKEIKKQIRSSPWNFAFTVKFYPPDPAQLTEDITRYYLCLQLRADIITGRLPCSFVTHALLGSYAVQAELGDYDAEEHVGNYVSELRFAPNQTRELEERIMELHKTYRGMTPGEAEIHFLENAKKLSMYGVDLHHAKDSEGIDIMLGVCANGLLIYRDRLRINRFAWPKILKISYKRSNFYIKIRPGEYEQFESTIGFKLPNHRSAKRLWKVCIEHHTFFRLVSPEPPPKGFLVMGSKFRYSGRTQAQTRQASALIDRPAPFFERSSSKRYTMSRSLDGAEFSRPASVSENHDAGPDGDKRDEDGESGGQRSEAEEGEVRTPTKIKELKPEQETTPRHKQEFLDKPEDVLLKHQASINELKRTLKEPNSKLIHRDRDWERERRLPSSPASPSPKGTPEKANERAGLREGSEEKVKPPRPRAPESDTGDEDQDQERDTVFLKDNHLAIERKCSSITVSSTSSLEAEVDFTVIGDYHGSAFEDFSRSLPELDRDKSDSDTEGLLFSRDLNKGAPSQDDESGGIEDSPDRGACSTPDMPQFEPVKTETMTVSSLAIRKKIEPEAVLQTRVSAMDNTQVDGSASVGREFIATTPSITTETISTTMENSLKSGKGAAAMIPGPQTVATEIRSLSPIIGKDVLTSTYGATAETLSTSTTTHVTKTVKGGFSETRIEKRIIITGDEDVDQDQALALAIKEAKLQHPDMLVTKAVVYRETDPSPEERDKKPQES

SEQ ID NO: 19087 - protein, 19 aa, Artificial Sequence
  Synthetic polypeptide
TGRQKPRRLLVLVPLLTRA

SEQ ID NO: 19088 - protein, 19 aa, Artificial Sequence
  Synthetic polypeptide
TGRQKPRRLLVLVPLLTRA

SEQ ID NO: 19089 - protein, 19 aa, Artificial Sequence
  Synthetic polypeptide
TGRQKPRRLLVLVPLLTRA

SEQ ID NO: 19090 - protein, 19 aa, Artificial Sequence
  Synthetic polypeptide
TGRQKPRRLLVLVPLLTRA

SEQ ID NO: 19091 - protein, 19 aa, Artificial Sequence
  Synthetic polypeptide
TGRQKPRRLLVLVPLLTRA

SEQ ID NO: 19092 - protein, 19 aa, Artificial Sequence
  Synthetic polypeptide
TGRQKPRRLLVLVPLLTRA

SEQ ID NO: 19093 - protein, 17 aa, Artificial Sequence
  Synthetic polypeptide
SWFHCLLEPRHGGEGLQ

SEQ ID NO: 19094 - protein, 17 aa, Artificial Sequence
  Synthetic polypeptide
SWFHCLLEPRHGGEGLQ

SEQ ID NO: 19095 - protein, 17 aa, Artificial Sequence
  Synthetic polypeptide
SWFHCLLEPRHGGEGLQ

SEQ ID NO: 19096 - protein, 17 aa, Artificial Sequence
  Synthetic polypeptide
SWFHCLLEPRHGGEGLQ

SEQ ID NO: 19097 - protein, 17 aa, Artificial Sequence
  Synthetic polypeptide
SWFHCLLEPRHGGEGLQ

SEQ ID NO: 19098 - protein, 17 aa, Artificial Sequence
  Synthetic polypeptide
SWFHCLLEPRHGGEGLQ

SEQ ID NO: 19099 - protein, 126 aa, Artificial Sequence
  Synthetic polypeptide
WKAEATQTSSPGSTAYSSLDMEEKDYSEADGLSERTTPSKAQKSPQKIAKKYKSAICRVTLLDASEYECEVEKHGRGQVLFDLVCEHLNLLEKDYFGLTFCDADSQKNWLDPSKEIKKQIRSSPWN

SEQ ID NO: 19100 - protein, 146 aa, Artificial Sequence
  Synthetic polypeptide
WKAEATQTSSPGSTAYSSLDMEEKDYSEADGLSERTTPSKAQKSPQKIAKKYKSAICRVTLLDASEYECEVEKHGRGQVLFDLVCEHLNLLEKDYFGLTFCDADSQKNWLDPSKEIKKQIRSSPWNFAFTVKFYPPDPAQLTEDIT

SEQ ID NO: 19101 - protein, 72 aa, Artificial Sequence
  Synthetic polypeptide
WKAEATQTSSPGSTAYSSLDMEEKDYSEADGLSERTTPSKAQKSPQKIAKKYKSAICRVTLLDASEYECEVE

SEQ ID NO: 19102 - protein, 690 aa, Artificial Sequence
  Synthetic polypeptide
WKAEATQTSSPGSTAYSSLDMEEKDYSEADGLSERTTPSKAQKSPQKIAKKYKSAICRVTLLDASEYECEVEKHGRGQVLFDLVCEHLNLLEKDYFGLTFCDADSQKNWLDPSKEIKKQIRSSPWNFAFTVKFYPPDPAQLTEDITRYYLCLQLRADIITGRLPCSFVTHALLGSYAVQAELGDYDAEEHVGNYVSELRFAPNQTRELEERIMELHKTYRGMTPGEAEIHFLENAKKLSMYGVDLHHAKDSEGIDIMLGVCANGLLIYRDRLRINRFAWPKILKISYKRSNFYIKIRPGEYEQFESTIGFKLPNHRSAKRLWKVCIEHHTFFRLVSPEPPPKGFLVMGSKFRYSGRTQAQTRQASALIDRPAPFFERSSSKRYTMSRSLDGAEFSRPASVSENHDAGPDGDKRDEDGESGGQRSEAEEGEVRTPTKIKELKFLDKPEDVLLKHQASINELKRTLKEPNSKLIHRDRDWERERRLPSSPASPSPKGTPEKANEPVKTETMTVSSLAIRKKIEPEAVLQTRVSAMDNTQQVDGSASVGREFIATTPSITTETISTTMENSLKSGKGAAAMIPGPQTVATEIRSLSPIIGKDVLTSTYGATAETLSTSTTTHVTKTVKGGFSETRIEKRIIITGDEDVDQDQALALAIKEAKLQHPDMLVTKAVVYRETDPSPEERDKKPQES

SEQ ID NO: 19103 - protein, 839 aa, Artificial Sequence
  Synthetic polypeptide
WKAEATQTSSPGSTAYSSLDMEEKDYSEADGLSERTTPSKAQKSPQKIAKKYKSAICRVTLLDASEYECEVEKHGRGQVLFDLVCEHLNLLEKDYFGLTFCDADSQKNWLDPSKEIKKQIRSSPWNFAFTVKFYPPDPAQLTEDITRYYLCLQLRADIITGRLPCSFVTHALLGSYAVQAELGDYDAEEHVGNYVSELRFAPNQTRELEERIMELHKTYRGMTPGEAEIHFLENAKKLSMYGVDLHHAKDSEGIDIMLGVCANGLLIYRDRLRINRFAWPKILKISYKRSNFYIKIRPGEYEQFESTIGFKLPNHRSAKRLWKVCIEHHTFFRLVSPEPPPKGFLVMGSKFRYSGRTQAQTRQASALIDRPAPFFERSSSKRYTMSRSLDGAEFSRPASVSENHDAGPDGDKRDEDGESGGQRSEAEEGEVRTPTKIKELKPEQETTPRHKQEFLDKPEDVLLKHQASINELKRTLKEPNSKLIHRDRDWERERRLPSSPASPSPKGTPEKANERAGLREGSEEKVKPPRPRAPESDTGDEDQDQERDTVFLKDNHLAIERKCSSITVSSTSSLEAEVDFTVIGDYHGSAFEDFSRSLPELDRDKSDSDTEGLLFSRDLNKGAPSQDDESGGIEDSPDRGACSTPDMPQFEPVKTETMTVSSLAIRKKIEPEAVLQTRVSAMDNTQQVDGSASVGREFIATTPSITTETISTTMENSLKSGKGAAAMIPGPQTVATEIRSLSPIIGKDVLTSTYGATAETLSTSTTTHVTKTVKGGFSETRIEKRIIITGDEDVDQDQALALAIKEAKLQHPDMLVTKAVVYRETDPSPEERDKKPQES

SEQ ID NO: 19104 - protein, 838 aa, Artificial Sequence
  Synthetic polypeptide
WKAEATQTSSPGSTAYSSLDMEEKDYSEADGLSERTTPSKAQKSPQKIAKKYKSAICRVTLLDASEYECEVEKHGRGQVLFDLVCEHLNLLEKDYFGLTFCDADSQKNWLDPSKEIKKQIRSSPWNFAFTVKFYPPDPAQLTEDITRYYLCLQLRADIITGRLPCSFVTHALLGSYAVQAELGDYDAEEHVGNYVSELRFAPNQTRELEERIMELHKTYRGMTPGEAEIHFLENAKKLSMYGVDLHHAKDSEGIDIMLGVCANGLLIYRDRLRINRFAWPKILKISYKRSNFYIKIRPGEYEQFESTIGFKLPNHRSAKRLWKVCIEHHTFFRLVSPEPPPKGFLVMGSKFRYSGRTQAQTRQASALIDRPAPFFERSSSKRYTMSRSLDGAEFSRPASVSENHDAGPDGDKRDEDGESGGQRSEAEEGEVRTPTKIKELKPEQETTPRHKQEFLDKPEDVLLKHQASINELKRTLKEPNSKLIHRDRDWERERRLPSSPASPSPKGTPEKANERAGLREGSEEKVKPPRPRAPESDTGDEDQDQERDTVFLKDNHLAIERKCSSITVSSTSSLEAEVDFTVIGDYHGSAFEDFSRSLPELDRDKSDSDTEGLLFSRDLNKGAPSQDDESGGIEDSPDRGACSTPDMPQFEPVKTETMTVSSLAIRKKIEPEAVLQTRVSAMDNTQVDGSASVGREFIATTPSITTETISTTMENSLKSGKGAAAMIPGPQTVATEIRSLSPIIGKDVLTSTYGATAETLSTSTTTHVTKTVKGGFSETRIEKRIIITGDEDVDQDQALALAIKEAKLQHPDMLVTKAVVYRETDPSPEERDKKPQES

SEQ ID NO: 19105 - protein, 78 aa, Artificial Sequence
  Synthetic polypeptide
GAPLPSHPVWEVRSASSWPSSRLGSEERLCLAAHRLGCGERLCPAATLSERFKHCLPVGPDNHSQHLGSDAHSLPHQA

SEQ ID NO: 19106 - protein, 78 aa, Artificial Sequence; identical to SEQ ID NO: 19105
  Synthetic polypeptide

SEQ ID NO: 19107 - protein, 78 aa, Artificial Sequence; identical to SEQ ID NO: 19105
  Synthetic polypeptide

SEQ ID NO: 19108 - protein, 654 aa, Artificial Sequence
  Synthetic polypeptide
EVRSVSAWPPIVWDVGSASARPPPCLRGSSTVFLLALTIIASTWALTPTHYLTKHDVERLKASLDRPFTNLESAFYSIVGLSSLGAQVPDAKKACTYIRSNLDPSNVDSLFYAAQASQALSGCEISISNETKDLLLAAVSEDSSVTQIYHAVAALSGFGLPLASQEALSALTARLSKEETVLATVQALQTASHLSQQADLRSIVEEIEDLVARLDELGGVYLQFEEGLETTALFVAATYKLMDHVGTEPSIKEDQVIQLMNAIFSKKNFESLSEAFSVASAAAVLSHNRYHVPVVVVPEGSASDTHEQAILRLQVTNVLSQPLTQATVKLEHAKSVASRATVLQKTSFTPVGDVFELNFMNVKFSSGYYDFLVEVEGDNRYIANTVELRVKISTEVGITNVDLSTVDKDQSIAPKTTRVTYPAKAKGTFIADSHQNFALFFQLVDVNTGAELTPHQTFVRLHNQKTGQEVVFVAEPDNKNVYKFELDTSERKIEFDSASGTYTLYLIIGDATLKNPILWNVADVVIKFPEEEAPSTVLSQNLFTPKQEIQHLFREPEKRPPTVVSNTFTALILSPLLLLFALWIRIGANVSNFTFAPSTIIFHLGHAAMLGLMYVYWTQLNMFQTLKYLAILGSVTFLAGNRMLAQQAVKRTAH

SEQ ID NO: 19109 - protein, 10 aa, Artificial Sequence
  Synthetic polypeptide
EVQALSSCWP

SEQ ID NO: 19110 - protein, 10 aa, Artificial Sequence
  Synthetic polypeptide
EVQALSSCWP

SEQ ID NO: 19111 - protein, 10 aa, Artificial Sequence
  Synthetic polypeptide
EVQALSSCWP

SEQ ID NO: 19112 - protein, 638 aa, Artificial Sequence
  Synthetic polypeptide
EVRSVSAWPPIVWDVGSASARPPPCLRGSSTVFLLALTIIASTWALTPTHYLTKHDVERLKASLDRPFTNLESAFYSIVGLSSLGAQVPDAKISISNETKDLLLAAVSEDSSVTQIYHAVAALSGFGLPLASQEALSALTARLSKEETVLATVQALQTASHLSQQADLRSIVEEIEDLVARLDELGGVYLQFEEGLETTALFVAATYKLMDHVGTEPSIKEDQVIQLMNAIFSKKNFESLSEAFSVASAAAVLSHNRYHVPVVVVPEGSASDTHEQAILRLQVTNVLSQPLTQATVKLEHAKSVASRATVLQKTSFTPVGDVFELNFMNVKFSSGYYDFLVEVEGDNRYIANTVELRVKISTEVGITNVDLSTVDKDQSIAPKTTRVTYPAKAKGTFIADSHQNFALFFQLVDVNTGAELTPHQTFVRLHNQKTGQEVVFVAEPDNKNVYKFELDTSERKIEFDSASGTYTLYLIIGDATLKNPILWNVADVVIKFPEEEAPSTVLSQNLFTPKQEIQHLFREPEKRPPTVVSNTFTALILSPLLLLFALWIRIGANVSNFTFAPSTIIFHLGHAAMLGLMYVYWTQLNMFQTLKYLAILGSVTFLAGNRMLAQQAVKRIAAEQSSRLAKYRTLRTAH

SEQ ID NO: 19113 - protein, 367 aa, Artificial Sequence
  Synthetic polypeptide
EVRSVSAWPPIVWDVGSASARPPPCLRGSSTVFLLALTIIASTWALTPTHYLTKHDVERLKASLDRPFTNLESAFYSIVGLSSLGAQVPDAKKACTYIRSNLDPSNVDSLFYAAQASQALSGCEISISNETKDLLLAAVSEDSSVTQIYHAVAALSGFGLPLASQEALSALTARLSKEETVLARVWSTVLESRSLFSKRTVQALQTASHLSQQADLRSIVEEIEDLVARLDELGGVYLQFEEGLETTALFVAATYKLMDHVGTEPSIKEDQVIQLMNAIFSKKNFESLSEAFSVASAAAVLSHNRYHVPVVVVPEGSASDTHEQAILRLQVTNVLSQPLTQATVKLEHAKSVASRATVLQKTSFTPV

SEQ ID NO: 19114 - protein, 290 aa, Artificial Sequence
  Synthetic polypeptide
GQVRWLTPVIPALWEAKAGGSPELRVKISTEVGITNVDLSTVDKDQSIAPKTTRVTYPAKAKGTFIADSHQNFALFFQLVDVNTGAELTPHQTFVRLHNQKTGQEVVFVAEPDNKNVYKFELDTSERKIEFDSASGTYTLYLIIGDATLKNPILWNVADVVIKFPEEEAPSTVLSQNLFTPKQEIQHLFREPEKRPPTVVSNTFTALILSPLLLLFALWIRIGANVSNFTFAPSTIIFHLGHAAMLGLMYVYWTQLNMFQTLKYLAILGSVTFLAGNRMLAQQAVKRTAH

SEQ ID NO: 19115 - protein, 45 aa, Artificial Sequence
  Synthetic polypeptide
SQHFGRPRQADHLSSESRSPLKLASQMLIFPPWIRIRALHPKLPG

SEQ ID NO: 19116 - protein, 45 aa, Artificial Sequence; identical to SEQ ID NO: 19115
  Synthetic polypeptide

SEQ ID NO: 19117 - protein, 306 aa, Artificial Sequence
  Synthetic polypeptide
GQVRWLTPVIPALWEAKAGGSPELRVKISTEVGITNVDLSTVDKDQSIAPKTTRVTYPAKAKGTFIADSHQNFALFFQLVDVNTGAELTPHQTFVRLHNQKTGQEVVFVAEPDNKNVYKFELDTSERKIEFDSASGTYTLYLIIGDATLKNPILWNVADVVIKFPEEEAPSTVLSQNLFTPKQEIQHLFREPEKRPPTVVSNTFTALILSPLLLLFALWIRIGANVSNFTFAPSTIIFHLGHAAMLGLMYVYWTQLNMFQTLKYLAILGSVTFLAGNRMLAQQAVKRIAAEQSSRLAKYRTLRTAH

SEQ ID NO: 19118 - protein, 56 aa, Artificial Sequence
  Synthetic polypeptide
ARGLATWLMWSSSSLRKKLPRLSCPRTFSLQNRKFSTCSASLRRGPPPWCPIHSLP

SEQ ID NO: 19119 - protein, 56 aa, Artificial Sequence; identical to SEQ ID NO: 19118
  Synthetic polypeptide

SEQ ID NO: 19120 - protein, 56 aa, Artificial Sequence; identical to SEQ ID NO: 19118
  Synthetic polypeptide

SEQ ID NO: 19121 - protein, 7 aa, Artificial Sequence
  Synthetic polypeptide
HGAWQHG

SEQ ID NO: 19122 - protein, 7 aa, Artificial Sequence
  Synthetic polypeptide
HGAWQHG

SEQ ID NO: 19123 - protein, 7 aa, Artificial Sequence
  Synthetic polypeptide
HGAWQHG

SEQ ID NO: 19124 - protein, 7 aa, Artificial Sequence
  Synthetic polypeptide
HGAWQHG

SEQ ID NO: 19125 - protein, 139 aa, Artificial Sequence
  Synthetic polypeptide
TGLGNMADVVIKFPEEEAPSTVLSQNLFTPKQEIQHLFREPEKRPPTVVSNTFTALILSPLLLLFALWIRIGANVSNFTFAPSTIIFHLGHAAMLGLMYVYWTQLNMFQTLKYLAILGSVTFLAGNRMLAQQAVKRTAH

SEQ ID NO: 19126 - protein, 155 aa, Artificial Sequence
  Synthetic polypeptide
TGLGNMADVVIKFPEEEAPSTVLSQNLFTPKQEIQHLFREPEKRPPTVVSNTFTALILSPLLLLFALWIRIGANVSNFTFAPSTIIFHLGHAAMLGLMYVYWTQLNMFQTLKYLAILGSVTFLAGNRMLAQQAVKRIAAEQSSRLAKYRTLRTAH

SEQ ID NO: 19127 - protein, 79 aa, Artificial Sequence
  Synthetic polypeptide
ARGLATWLMWSSSSLRKKLPRLSCPRTFSLQNRKFSGSGLVPMSPTSLLLLARLYFTWDMLLCWDSCMSTGLSSTCSRP

SEQ ID NO: 19128 - protein, 107 aa, Artificial Sequence
  Synthetic polypeptide
TGLGNMADVVIKFPEEEAPSTVLSQNLFTPKQEIQWIRIGANVSNFTFAPSTIIFHLGHAAMLGLMYVYWTQLNMFQTLKYLAILGSVTFLAGNRMLAQQAVKRTAH

SEQ ID NO: 19129 - protein, 130 aa, Artificial Sequence
  Synthetic polypeptide
TGLGNMADVVIKFPEEEAPSTVLSQNLFTPKQEIQHLFREPEKRPPTVVSNTFTALILSPLLLLFALWIRIGANVSNFTFAPSTIIFHLGHAEQHISSRRKMEILKTECQEKESRTIHSMRRKMEKKNFI

SEQ ID NO: 19130 - protein, 76 aa, Artificial Sequence
  Synthetic polypeptide
KRQGWIRIGANVSNFTFAPSTIIFHLGHAAMLGLMYVYWTQLNMFQTLKYLAILGSVTFLAGNRMLAQQAVKRTAH

SEQ ID NO: 19131 - protein, 76 aa, Artificial Sequence; identical to SEQ ID NO: 19130
  Synthetic polypeptide

SEQ ID NO: 19132 - protein, 63 aa, Artificial Sequence
  Synthetic polypeptide
IYMLIGQDCQDVLLSEKGKGGSGLVPMSPTSLLLLARLYFTWDMLLCWDSCMSTGLSSTCSRP

SEQ ID NO: 19133 - protein, 63 aa, Artificial Sequence; identical to SEQ ID NO: 19132
  Synthetic polypeptide

SEQ ID NO: 19134 - protein, 63 aa, Artificial Sequence; identical to SEQ ID NO: 19132
  Synthetic polypeptide

SEQ ID NO: 19135 - protein, 20 aa, Artificial Sequence
  Synthetic polypeptide
VKKARVDPDWCQCLQLHFCS

SEQ ID NO: 19136 - protein, 20 aa, Artificial Sequence
  Synthetic polypeptide
VKKARVDPDWCQCLQLHFCS

SEQ ID NO: 19137 - protein, 20 aa, Artificial Sequence
  Synthetic polypeptide
VKKARVDPDWCQCLQLHFCS

SEQ ID NO: 19138 - protein, 20 aa, Artificial Sequence
  Synthetic polypeptide
VKKARVDPDWCQCLQLHFCS

SEQ ID NO: 19139 - protein, 92 aa, Artificial Sequence
  Synthetic polypeptide
KRQGWIRIGANVSNFTFAPSTIIFHLGHAAMLGLMYVYWTQLNMFQTLKYLAILGSVTFLAGNRMLAQQAVKRIAAEQSSRLAKYRTLRTAH

SEQ ID NO: 19140 - protein, 67 aa, Artificial Sequence
  Synthetic polypeptide
KRQGWIRIGANVSNFTFAPSTIIFHLGHAEQHISSRRKMEILKTECQEKESRTIHSMRRKMEKKNFI

SEQ ID NO: 19141 - protein, 57 aa, Artificial Sequence
  Synthetic polypeptide
IYMLIGQDCQDVLLSEKGKGGSGLVPMSPTSLLLLARLYFTWDMLNSTLVPEERWKF

SEQ ID NO: 19142 - protein, 16 aa, Artificial Sequence
  Synthetic polypeptide
RRTSTGLGFRWWMGRW

SEQ ID NO: 19143 - protein, 16 aa, Artificial Sequence
  Synthetic polypeptide
RRTSTGLGFRWWMGRW

SEQ ID NO: 19144 - protein, 16 aa, Artificial Sequence
  Synthetic polypeptide
RRTSTGLGFRWWMGRW

SEQ ID NO: 19145 - protein, 16 aa, Artificial Sequence
  Synthetic polypeptide
RRTSTGLGFRWWMGRW

SEQ ID NO: 19146 - protein, 27 aa, Artificial Sequence
  Synthetic polypeptide
GERAQGLVSDGGWAGGSTAGTESGAPG

SEQ ID NO: 19147 - protein, 27 aa, Artificial Sequence
  Synthetic polypeptide
GERAQGLVSDGGWAGGSTAGTESGAPG

SEQ ID NO: 19148 - protein, 27 aa, Artificial Sequence
  Synthetic polypeptide
GERAQGLVSDGGWAGGSTAGTESGAPG

SEQ ID NO: 19149 - protein, 385 aa, Artificial Sequence
  Synthetic polypeptide
ENEHRAWFQMVDGQVVALLVQNLERLDESVKEEADGVHNTLAIVENMAEFRPEMCTEGAQQGLLQWLLKRLKAKMPFDANKLYCSEVLAILLQDNDENRELLGELDGIDVLLQQLSVFKRHNPSTAEEQEMMENLFDSLCSCLMLSSNRERFLKGEGLQLMNLMLREKKISRSSALKVLDHAMIGPEGTDNCHKFVDILGLRTIFPLFMKSPRKIKKVGTTEKEHEEHVCSILASLLRNLRGQQRTRLLNKFTENDSEKVDRLMELHFKYLGAMQVADKKIEGEKHDMVRRGEIIDNDTEEEFYLRRLDAGLFVLQHICYIMAEICNANVPQIRQRVHQILNMRGSSIKIVRHIIKEYAENIGDGRSPEFRENEQKRILGLLENF

SEQ ID NO: 19150 - protein, 385 aa, Artificial Sequence; identical to SEQ ID NO: 19149
  Synthetic polypeptide

SEQ ID NO: 19151 - protein, 385 aa, Artificial Sequence; identical to SEQ ID NO: 19149
  Synthetic polypeptide

SEQ ID NO: 19152 - protein, 15 aa, Artificial Sequence
  Synthetic polypeptide
GERAQGLVSDGGWAG

SEQ ID NO: 19153 - protein, 15 aa, Artificial Sequence
  Synthetic polypeptide
ENEHRAWFQMVDGQV

SEQ ID NO: 19154 - protein, 36 aa, Artificial Sequence
  Synthetic polypeptide
WRGGRMKPEYYFLFLYHGRGSGCDYVSSWPLMCPPP

SEQ ID NO: 19155 - protein, 24 aa, Artificial Sequence
  Synthetic polypeptide
SQSTISSFFTTAEALAVTMSPHGH

SEQ ID NO: 19156 - protein, 103 aa, Artificial Sequence
  Synthetic polypeptide
LCLLMATNVSATLTFNTSKITGFLKPGKVKVELKESKVGLFNAELLEALLNYYILNTFYPKFNDKLAEGFPLPLLKRVQLYDLGLQIHKDFLFLGANVQYMRV

SEQ ID NO: 19157 - protein, 505 aa, Artificial Sequence
  Synthetic polypeptide
GCAVRGAWSERILAHRLPNRVTLIELMNFTPQRPGLCMDSPSPMDPHMAEQTFEQAIQAASRIIRNEQFAIRRFQSMPVRLLGHSPVLRNITNSQAPDGRRKSEAGSGAASSSGEDKENDGFVFKMPWKPTHPSSTHALAEWASRREAFAQRPSSAPDLMCLSPDRKMEVEELSPLALGRFSLTPAEGDTEEDDGFVDILESDLKDDDAVPPGMESLISAPLVKTLEKEEEKDLVMYSKCQRLFRSPSMPCSVIRPILKRLERPQDRDTPVQNKRRRSVTPPEEQQEAEEPKARVLRSKSLCHDEIENLLDSDHRELIGDYSKAFLLQTVDGKHQDLKYISPETMVALLTGKFSNIVDKFVIVDCRYPYEYEGGHIKTAVNLPLERDAESFLLKSPIAPCSLDKRVILIFHCEFSSERGPRMCRFIRERDRAVNDYPSLYYPEMYILKGGYKEFFPQHPNFCEPQDYRPMNHEAFKDELKTFRLKTRSWAGERSRRELCSRLQDQ

SEQ ID NO: 19158 - protein, 505 aa, Artificial Sequence; identical to SEQ ID NO: 19157
  Synthetic polypeptide

SEQ ID NO: 19159 - protein, 505 aa, Artificial Sequence; identical to SEQ ID NO: 19157
  Synthetic polypeptide

SEQ ID NO: 19160 - protein, 51 aa, Artificial Sequence
  Synthetic polypeptide
TSRLSVQVSAWIPPALWTPTWRSRRLNRPSRQPAGSFETSSLPSDASSLCR

SEQ ID NO: 19161 - protein, 51 aa, Artificial Sequence; identical to SEQ ID NO: 19160
  Synthetic polypeptide

SEQ ID NO: 19162 - protein, 51 aa, Artificial Sequence; identical to SEQ ID NO: 19160
  Synthetic polypeptide

SEQ ID NO: 19163 - protein, 51 aa, Artificial Sequence; identical to SEQ ID NO: 19160
  Synthetic polypeptide

SEQ ID NO: 19164 - protein, 28 aa, Artificial Sequence
  Synthetic polypeptide
VNELHASASRSLHGFPQPYGPPHGGADV

SEQ ID NO: 19165 - protein, 28 aa, Artificial Sequence
  Synthetic polypeptide
VNELHASASRSLHGFPQPYGPPHGGADV

SEQ ID NO: 19166 - protein, 28 aa, Artificial Sequence
  Synthetic polypeptide
VNELHASASRSLHGFPQPYGPPHGGADV

SEQ ID NO: 19167 - protein, 28 aa, Artificial Sequence
  Synthetic polypeptide
VNELHASASRSLHGFPQPYGPPHGGADV

SEQ ID NO: 19168 - protein, 28 aa, Artificial Sequence
  Synthetic polypeptide
VNELHASASRSLHGFPQPYGPPHGGADV

SEQ ID NO: 19169 - protein, 478 aa, Artificial Sequence
  Synthetic polypeptide
GCAVRGAWSERILAHRLPNRVTLIELMNFTPQRPGLCMDSPSPMDPHMAEQTFEQAIQAASRIIRNEQFAIRRFQSMPVRLLGHSPVLRNITNSQAPDGRRKSEAGSGAASSSGEDKENDGFVFKMPWKPTHPSSTHALAEWASRREAFAQRPSSAPDLMCLSPDRKMEVEELSPLALGRFSLTPAEGDTEEDDGFVDILESDLKDLVMYSKCQRLFRSPSMPCSVIRPILKRLERPQDRDTPVQNKRRRSVTPPEEQQEAEEPKARVLRSKSLCHDEIENLLDSDHRELIGDYSKAFLLQTVDGKHQDLKYISPETMVALLTGKFSNIVDKFVIVDCRYPYEYEGGHIKTAVNLPLERDAESFLLKSPIAPCSLDKRVILIFHCEFSSERGPRMCRFIRERDRAVNDYPSLYYPEMYILKGGYKEFFPQHPNFCEPQDYRPMNHEAFKDELKTFRLKTRSWAGERSRRELCSRLQDQ

SEQ ID NO: 19170 - protein, 464 aa, Artificial Sequence
  Synthetic polypeptide
GCAVRGAWSERILAHRLPNRVTLIELMNFTPQRPGLCMDSPSPMDPHMAEQTFEQAIQAASRIIRNEQFAIRRFQSMPDGFVFKMPWKPTHPSSTHALAEWASRREAFAQRPSSAPDLMCLSPDRKMEVEELSPLALGRFSLTPAEGDTEEDDGFVDILESDLKDDDAVPPGMESLISAPLVKTLEKEEEKDLVMYSKCQRLFRSPSMPCSVIRPILKRLERPQDRDTPVQNKRRRSVTPPEEQQEAEEPKARVLRSKSLCHDEIENLLDSDHRELIGDYSKAFLLQTVDGKHQDLKYISPETMVALLTGKFSNIVDKFVIVDCRYPYEYEGGHIKTAVNLPLERDAESFLLKSPIAPCSLDKRVILIFHCEFSSERGPRMCRFIRERDRAVNDYPSLYYPEMYILKGGYKEFFPQHPNFCEPQDYRPMNHEAFKDELKTFRLKTRSWAGERSRRELCSRLQDQ

SEQ ID NO: 19171 - protein, 90 aa, Artificial Sequence
  Synthetic polypeptide
TSRLSVQVSAWIPPALWTPTWRSRRLNRPSRQPAGSFETSSLPSDASSLCRMDLSSRCHGSPHIPAPPMLWQSGPAAGKPLPRDPARPPT

SEQ ID NO: 19172 - protein, 99 aa, Artificial Sequence
  Synthetic polypeptide
NGSQSLPCWKPSHAPLCSPNKTQRPWVAHRISVLSHPAMLTLLEPHWLPSVLIQPFFGQGPYSSFHLDHSSPLELDTCSFSSFSRGNGPEPHPSSGGRG

SEQ ID NO: 19173 - protein, 99 aa, Artificial Sequence; identical to SEQ ID NO: 19172
  Synthetic polypeptide

SEQ ID NO: 19174 - protein, 99 aa, Artificial Sequence; identical to SEQ ID NO: 19172
  Synthetic polypeptide

SEQ ID NO: 19175 - protein, 99 aa, Artificial Sequence; identical to SEQ ID NO: 19172
  Synthetic polypeptide

SEQ ID NO: 19176 - protein, 99 aa, Artificial Sequence; identical to SEQ ID NO: 19172
  Synthetic polypeptide

SEQ ID NO: 19177 - protein, 195 aa, Artificial Sequence
  Synthetic polypeptide
CRTEVSHCLAGNPPMPLCVLQTKPRGPGWPTGYLSSVTPPCSLYWSPTGFLRFSSNHFLAKALTLPSTWTTLPHWSLTRAASPPSAEEMALSLTRAVAGGDEQVAMKCAIWLAEQRVPLSVQLKPEVSPTQDIRLWVSVEDAQMHTVTIWLTVRPDMTVASLKDMVFLDYGFPPVLQQWVIGQRLARDQETLHSH

SEQ ID NO: 19178 - protein, 13 aa, Artificial Sequence
  Synthetic polypeptide
HVQLLLLQQRKWP

SEQ ID NO: 19179 - protein, 13 aa, Artificial Sequence
  Synthetic polypeptide
HVQLLLLQQRKWP

SEQ ID NO: 19180 - protein, 13 aa, Artificial Sequence
  Synthetic polypeptide
HVQLLLLQQRKWP

SEQ ID NO: 19181 - protein, 13 aa, Artificial Sequence
  Synthetic polypeptide
HVQLLLLQQRKWP

SEQ ID NO: 19182 - protein, 13 aa, Artificial Sequence
  Synthetic polypeptide
HVQLLLLQQRKWP

SEQ ID NO: 19183 - protein, 414 aa, Artificial Sequence
  Synthetic polypeptide
CRTEVSHCLAGNPPMPLCVLQTKPRGPGWPTGYLSSVTPPCSLYWSPTGFLRFSSNHFLAKALTLPSTWTTLPHWSLTRAASPPSAEEMALSLTRAVAGGDEQVAMKCAIWLAEQRVPLSVQLKPEVSPTQDIRLWVSVEDAQMHTVTIWLTVRPDMTVASLKDMVFLDYGFPPVLQQWVIGQRLARDQETLHSHGVRQNGDSAYLYLLSARNTSLNPQELQRERQLRMLEDLGFKDLTLQPRGPLEPGPPKPGVPQEPGRGQPDAVPEPPPVGWQCPGCTFINKPTRPGCEMCCRARPEAYQVPASYQPDEEERARLAGEEEALRQYQQRKQQQQEGNYLQHVQLDQRSLVLNTEPAECPVCYSVLAPGEAVVLRSACRAPSATARRRRSPAPSLTTPTRARASCWRGRSRRS

SEQ ID NO: 19184 - protein, 588 aa, Artificial Sequence
  Synthetic polypeptide
CRTEVSHCLAGNPPMPLCVLQTKPRGPGWPTGYLSSVTPPCSLYWSPTGFLRFSSNHFLAKALTLPSTWTTLPHWSLTRAASPPSAEEMALSLTRAVAGGDEQVAMKCAIWLAEQRVPLSVQLKPEVSPTQDIRLWVSVEDAQMHTVTIWLTVRPDMTVASLKDMVFLDYGFPPVLQQWVIGQRLARDQETLHSHGVRQNGDSAYLYLLSARNTSLNPQELQRERQLRMLEDLGFKDLTLQPRGPLEPGPPKPGVPQEPGRGQPDAVPEPPPVGWQCPGCTFINKPTRPGCEMCCRARPEAYQVPASYQPDEEERARLAGEEEALRQYQQRKQQQQEGNYLQHVQLDQRSLVLNTEPAECPVCYSVLAPGEAVVLRECLHTFCRECLQGTIRNSQEAEVSCPFIDNTYSCSGKLLEREIKALLTPEDYQRFLDLGISIAENRSAFSYHCKTPDCKGWCFFEDDVNEFTCPVCFHVNCLLCKAIHEQMNCKEYQEDLALRAQNDVAARQTTEMLKVMLQQGEAMRCPQCQIVVQKKDGCDWIRCTVCHTEICWVTKGPRWGPGGPGDTSGGCRCRVNGIPCHPSCQNCH

SEQ ID NO: 19185 - protein, 350 aa, Artificial Sequence
  Synthetic polypeptide
CRTEVSHCLAGNPPMPLCVLQTKPRGPGWPTGYLSSVTPPCSLYWSPTGFLRFSSNHFLAKALTLPSTWTTLPHWSLTRAASPPSAEEMALSLTRAVAGGDEQVAMKCAIWLAEQRVPLSVQLKPEVSPTQDIRLWVSVEDAQMHTVTIWLTVRPDMTVASLKDMVFLDYGFPPVLQQWVIGQRLARDQETLHSHGVRQNGDSAYLYLLSARNTSLNPQELQRERQLRMLEDLGFKDLTLQPRGPLEPGPPKPGVPQEPGRGQPDAVPEPPPVGWQCPGCTFINKPTRPGCEMCCRARPEAYQVPASYQPDEEERARLAGEEEALRQYQQGVPAGHHPQQPGGGGLLPLH

SEQ ID NO: 19186 - protein, 183 aa, Artificial Sequence
  Synthetic polypeptide
CRTEVSHCLAGNPPMPLCVLQTKPRGPGWPTGYLSSVTPPCSLYWSPTGFLRFSSNHFLAKALTLPSTWTTLPHWSLTRAASPPSAEEMALSLTRAVAGGDEQVAMKCAIWLAEQRVPLSVQLKPEVSPTQDIRFLMVQNGHSSSIQPSHHRRKGRKTPLHTLLKSIAQKLYTLLPLIPVDQN

SEQ ID NO: 19187 - protein, 32 aa, Artificial Sequence
  Synthetic polypeptide
RTASKGPRRHQRGLPLQGKWDSLPPKLSELPL

SEQ ID NO: 19188 - protein, 32 aa, Artificial Sequence; identical to SEQ ID NO: 19187
  Synthetic polypeptide

SEQ ID NO: 19189 - protein, 32 aa, Artificial Sequence; identical to SEQ ID NO: 19187
  Synthetic polypeptide

SEQ ID NO: 19190 - protein, 32 aa, Artificial Sequence
  Synthetic polypeptide
RGQQVKGPGDTSGGCRCRVNGIPCHPSCQNCH

SEQ ID NO: 19191 - protein, 32 aa, Artificial Sequence; identical to SEQ ID NO: 19190
  Synthetic polypeptide

SEQ ID NO: 19192 - protein, 32 aa, Artificial Sequence; identical to SEQ ID NO: 19190
  Synthetic polypeptide

SEQ ID NO: 19193 - protein, 31 aa, Artificial Sequence
  Synthetic polypeptide
QWFLTRGDSISSSPEGTCGNLKRHFWLPGEV

SEQ ID NO: 19194 - protein, 31 aa, Artificial Sequence; identical to SEQ ID NO: 19193
  Synthetic polypeptide

SEQ ID NO: 19195 - protein, 394 aa, Artificial Sequence
  Synthetic polypeptide
LGVILFLLLLREHVAISRDIFGCQGKFEILKKYLDTGGDVFVMLGEGGESRFDTNINFLLEEYGIMVNNDAVVRNVYHKYFHPKEALVSSGVLNREISRAAGKAVPGIIDEESSGNNAQALTFVYPFGATLSVMKPAVAVLSTGSVCFPLNRPILAFYHSKNQGGKLAVLGSCHMFSDQYLDKEENSKIMDVVFQWLTTGDIHLNQIDAEDPEISDYMMLPYTATLSKRNRECLQESDEIPRDFTTLFDLSIFQLDTTSFHSVIEAHEQLNVKHEPLQLIQPQFETPLPTLQPAVFPPSFRELPPPPLELFDLDETFSSEKARLAQITNKCTEEDLEFYVRKCGDILGVTSKLPKDQQDAKHILEHVFFQVVEFKKLNQEHDIDTSETAFQNNF

SEQ ID NO: 19196 - protein, 394 aa, Artificial Sequence; identical to SEQ ID NO: 19195
  Synthetic polypeptide

SEQ ID NO: 19197 - protein, 19 aa, Artificial Sequence
  Synthetic polypeptide
GNMWQSQETFLVARGSLKS

SEQ ID NO: 19198 - protein, 19 aa, Artificial Sequence
  Synthetic polypeptide
GNMWQSQETFLVARGSLKS

SEQ ID NO: 19199 - protein, 100 aa, Artificial Sequence
  Synthetic polypeptide
SEEHRLSQPTTAPSNSSSLTLSGIKEDNSLLNQGFLQAKPEKAAVAQKPRSHFTTPAPMSSAWKTVACGGTRDQLFMQEKARQLLGRLKPSHTSRTLILS

SEQ ID NO: 19200 - protein, 100 aa, Artificial Sequence; identical to SEQ ID NO: 19199
  Synthetic polypeptide

SEQ ID NO: 19201 - protein, 81 aa, Artificial Sequence
  Synthetic polypeptide
VSRQLPLQTLPASPCQVSKKTTACSTRASCRPSPRRQQWPRSPEATSRHLPLCPVPGRRWPAGGPGTSFSCRRKPGSSWAA

SEQ ID NO: 19202 - protein, 81 aa, Artificial Sequence; identical to SEQ ID NO: 19201
  Synthetic polypeptide

SEQ ID NO: 19203 - protein, 99 aa, Artificial Sequence
  Synthetic polypeptide
RAQIESADNCPFKLFQPHPVRYQRRQQLAQPGLLAGQAREGSSGPEAPKPLHDTCPYVQCLEDGGLRGDQGPAFHAGESPAAPGPPEAQPHISDPHLVL

SEQ ID NO: 19204 - protein, 99 aa, Artificial Sequence; identical to SEQ ID NO: 19203
  Synthetic polypeptide

SEQ ID NO: 19205 - protein, 128 aa, Artificial Sequence
  Synthetic polypeptide
VVPGRQQLGVMGQATPRPKLRQRNRPPWLPTRSPTLLALWPGSWLRTSTSQVRNIRSAGCCRRSWRTRRACWSPPTGAPAQRASHSRPARARSCTSVRPLGPRVAPRHRPGRPRSPSGPGPGCPRTAC

SEQ ID NO: 19206 - protein, 19 aa, Artificial Sequence
  Synthetic polypeptide
WYQEGSSLVSWDKPRQGQS

SEQ ID NO: 19207 - protein, 317 aa, Artificial Sequence
  Synthetic polypeptide
GTRKAAAWCHGTSHAKAKAEAAEQAALAANQESNIARTLARELAPDFYQPGPEYQKRRLLQEILENSESLLEPPDRGAGAAGLPQPPRESPQLHERETPRPEGGSPSPAGTPPQPKRPRPGVSKDGLLSPGAWNGEPSGEGSRSVTPSEGAGRRSPARPATERMAIEALQAPPAPSREPEVALYQGYHSYAVRTTPPEPPPFEDQPEPEVSGSESAPSSPATAPLQAPTLRGPEPARETPAKLEPKPIIPKAEPRAKARKTEARGLTKAGAKKKARKEAALAAEAEVEVEEVPNTILICMVILLNIGLAILFVHLLT

SEQ ID NO: 19208 - protein, 210 aa, Artificial Sequence
  Synthetic polypeptide
VLLETPDWSPKVVELCKKYQQQTVVAIDLAGDETIPGSSLLPGHVQAYQEAVKSGIHRTVHAGEVGSAEVVKEAVDILKTERLGHGYHTLEDQALYNRLRQENMHFEICPWSSYLTGAWKPDTEHAVIRLKNDQANYSLNTDDPLIFKSTLDTDYQMTKRDMGFTEEEFKRLNINAAKSSFLPEDEKRELLDLLYKAYGMPPSASAGQNL

SEQ ID NO: 19209 - protein, 28 aa, Artificial Sequence
  Synthetic polypeptide
AYHECCWKHQTGPPRWWSCVRSTSSRPW

SEQ ID NO: 19210 - protein, 28 aa, Artificial Sequence
  Synthetic polypeptide
AYHECCWKHQTGPPRWWSCVRSTSSRPW

SEQ ID NO: 19211 - protein, 28 aa, Artificial Sequence
  Synthetic polypeptide
AYHECCWKHQTGPPRWWSCVRSTSSRPW

SEQ ID NO: 19212 - protein, 29 aa, Artificial Sequence
  Synthetic polypeptide
SVSSSAHGNKPTMSVVGNTRLVPQGGGAV

SEQ ID NO: 19213 - protein, 29 aa, Artificial Sequence
  Synthetic polypeptide
SVSSSAHGNKPTMSVVGNTRLVPQGGGAV

SEQ ID NO: 19214 - protein, 29 aa, Artificial Sequence
  Synthetic polypeptide
SVSSSAHGNKPTMSVVGNTRLVPQGGGAV

SEQ ID NO: 19215 - protein, 110 aa, Artificial Sequence
  Synthetic polypeptide
VLLETPDWSPKVVELCKKYQQQTVVAIDLAGDETIPGSSLLPGHVQAYQEAVKSGIHRTVHAGEVGSAEVVKEAVDILKTERLGHGYHTLEDQALYNRLRQENMHFEAQK

SEQ ID NO: 19216 - protein, 186 aa, Artificial Sequence
  Synthetic polypeptide
VLLETPDWSPKVVELCKKYQQQTVVAIDLAGDETIPGSSLLPGHVQAYQAVDILKTERLGHGYHTLEDQALYNRLRQENMHFEICPWSSYLTGAWKPDTEHAVIRLKNDQANYSLNTDDPLIFKSTLDTDYQMTKRDMGFTEEEFKRLNINAAKSSFLPEDEKRELLDLLYKAYGMPPSASAGQNL

SEQ ID NO: 19217 - protein, 78 aa, Artificial Sequence
  Synthetic polypeptide
ETWLCHFPRCLNGPATSCASAPPGPHQQCQAGLHPGATHGASYPESSQHWYSDHRTQWGRMLYTRPAAPAVQMFLSST

SEQ ID NO: 19218 - protein, 78 aa, Artificial Sequence; identical to SEQ ID NO: 19217
  Synthetic polypeptide

SEQ ID NO: 19219 - protein, 179 aa, Artificial Sequence
  Synthetic polypeptide
KPGSATSQGASMVRPPVVPRRPPAHISSVRQASTQVPRTVPHTQRVANIGTQTTGPSGVGCCTPGRPLLPCKCSSAAHSTYRVQEPAVHIPGQEPLTASMLAAAPLHEQKQMIGERLYPLIHDVHTQLAGKITGMLLEIDNSELLLMLESPESLHAKIDEAVAVLQAHQAMEQPKAYMH

SEQ ID NO: 19220 - protein, 179 aa, Artificial Sequence; identical to SEQ ID NO: 19219
  Synthetic polypeptide

SEQ ID NO: 19221 - protein, 45 aa, Artificial Sequence
  Synthetic polypeptide
NLALPLPKVPQWSGHQLCLGAPRPTSAVSGRPPPRCHARCLIPRE

SEQ ID NO: 19222 - protein, 45 aa, Artificial Sequence; identical to SEQ ID NO: 19221
  Synthetic polypeptide

SEQ ID NO: 19223 - protein, 40 aa, Artificial Sequence
  Synthetic polypeptide
ETWLCHFPSQHWYSDHRTQWGRMLYTRPAAPAVQMFLSST

SEQ ID NO: 19224 - protein, 40 aa, Artificial Sequence; identical to SEQ ID NO: 19223
  Synthetic polypeptide

SEQ ID NO: 19225 - protein, 40 aa, Artificial Sequence; identical to SEQ ID NO: 19223
  Synthetic polypeptide

SEQ ID NO: 19226 - protein, 40 aa, Artificial Sequence; identical to SEQ ID NO: 19223
  Synthetic polypeptide

SEQ ID NO: 19227 - protein, 40 aa, Artificial Sequence; identical to SEQ ID NO: 19223
  Synthetic polypeptide

SEQ ID NO: 19228 - protein, 40 aa, Artificial Sequence; identical to SEQ ID NO: 19223
  Synthetic polypeptide

SEQ ID NO: 19229 - protein, 40 aa, Artificial Sequence; identical to SEQ ID NO: 19223
  Synthetic polypeptide

SEQ ID NO: 19230 - protein, 141 aa, Artificial Sequence
  Synthetic polypeptide
KPGSATSQANIGTQTTGPSGVGCCTPGRPLLPCKCSSAAHSTYRVQEPAVHIPGQEPLTASMLAAAPLHEQKQMIGERLYPLIHDVHTQLAGKITGMLLEIDNSELLLMLESPESLHAKIDEAVAVLQAHQAMEQPKAYMH

SEQ ID NO: 19231 - protein, 141 aa, Artificial Sequence; identical to SEQ ID NO: 19230
  Synthetic polypeptide

SEQ ID NO: 19232 - protein, 141 aa, Artificial Sequence; identical to SEQ ID NO: 19230
  Synthetic polypeptide

SEQ ID NO: 19233 - protein, 20 aa, Artificial Sequence
  Synthetic polypeptide
NLALPLPKPTLVLRPQDPVG

SEQ ID NO: 19234 - protein, 20 aa, Artificial Sequence
  Synthetic polypeptide
NLALPLPKPTLVLRPQDPVG

SEQ ID NO: 19235 - protein, 20 aa, Artificial Sequence
  Synthetic polypeptide
NLALPLPKPTLVLRPQDPVG

SEQ ID NO: 19236 - protein, 20 aa, Artificial Sequence
  Synthetic polypeptide
NLALPLPKPTLVLRPQDPVG

SEQ ID NO: 19237 - protein, 20 aa, Artificial Sequence
  Synthetic polypeptide
NLALPLPKPTLVLRPQDPVG

SEQ ID NO: 19238 - protein, 20 aa, Artificial Sequence
  Synthetic polypeptide
NLALPLPKPTLVLRPQDPVG

SEQ ID NO: 19239 - protein, 20 aa, Artificial Sequence
  Synthetic polypeptide
NLALPLPKPTLVLRPQDPVG

SEQ ID NO: 19240 - protein, 122 aa, Artificial Sequence
  Synthetic polypeptide
KPGSATSQANIGTQTTGPSGVGCCTPGRPLLPCKCSSAAHSTYRVQEPAVHIPGQEPLTASMLAAAPLHEQKQMIGERLYPLIHDVHTQLAGKITGMLLEIDNSELLLMLESPESLHAKISA

SEQ ID NO: 19241 - protein, 144 aa, Artificial Sequence
  Synthetic polypeptide
KPGSATSQANIGTQTTGPSGVGCCTPGRPLLPCKCSSAAHSTYRVQEPAVHIPGQEPLTASMLAAAPLHEQKQMIGERLYPLIHDVHTQLAGKITGMLLEIDNSELLLMLESPESLHAKKRKSSLPWLPKGQCFWLSALRPCKL

SEQ ID NO: 19242 - protein, 147 aa, Artificial Sequence
  Synthetic polypeptide
KPGSATSQANIGTQTTGPSGVGCCTPGRPLLPCKCSSAAHSTYRVQEPAVHIPGQEPLTASMLAAAPLHEQKQMIGTCYLVLKRWSDWMVLSFLPLLLSCDFEGSVSTPLSMMSTPSWLARSRACCWRLTTQSCCSCWSLQNPSMPR

SEQ ID NO: 19243 - protein, 143 aa, Artificial Sequence
  Synthetic polypeptide
KPGSATSQANIGTQTTGPSGVGCCTPGRPLLPCKCSSAAHSTYRVQEPAVHIPGQEPLTASMLAAAPLHEQKQMIGERLYPLIHDVHTQLAGKITGMLLEIDNSELLLMLESPESLHAKAQRRKVQRLVKYILALKELSTQNL

SEQ ID NO: 19244 - protein, 22 aa, Artificial Sequence
  Synthetic polypeptide
QRPSSFCQLISSTWPRDGKYKD

SEQ ID NO: 19245 - protein, 20 aa, Artificial Sequence
  Synthetic polypeptide
SPAPGPETESTKTSKIHPCP

SEQ ID NO: 19246 - protein, 37 aa, Artificial Sequence
  Synthetic polypeptide
ETKFILSTDLQHLAQRRKVQRLVKYILALKELSTQNL

SEQ ID NO: 19247 - protein, 115 aa, Artificial Sequence
  Synthetic polypeptide
PGFEDQPCYLPAFKAGVCPPKKSAQCLRYKKPECQSDWQCPGKKRCCPDTCGIKCLDPVDTPNPTRRKPGKCPVTYGQCLMLNPPNFCEMDGQCKRDLKCCMGMCGKSCVSPVKA

SEQ ID NO: 19248 - protein, 73 aa, Artificial Sequence
  Synthetic polypeptide
MDLKTSPATYQPSKLESVLLRNLPSALDTRNLSARVTGSVQGRRDVVLTLVASNAWILLTPQTQQGGSLGSAQ

SEQ ID NO: 19249 - protein, 16 aa, Artificial Sequence
  Synthetic polypeptide
RPALLLTSLQSWSLSS

SEQ ID NO: 19250 - protein, 56 aa, Artificial Sequence
  Synthetic polypeptide
HHGSPAWVTGVHILRLKGLPLQPPALSDGLHTLPLCGGWGLCGQCTTVGCLHAPPG

SEQ ID NO: 19251 - protein, 56 aa, Artificial Sequence; identical to SEQ ID NO: 19250
  Synthetic polypeptide

SEQ ID NO: 19252 - protein, 56 aa, Artificial Sequence; identical to SEQ ID NO: 19250
  Synthetic polypeptide

SEQ ID NO: 19253 - protein, 266 aa, Artificial Sequence
  Synthetic polypeptide
QVCISSGSKVSLFNRLRSQTVSTRYLSVEDGAFVASARQWAAFTLHLADGHSAQGDFPPREGYVRYGSLVQLVCTVTGITLPPMIIRKVAKQCALLDVDEPISQLHKCAFQFPGSPPGGGGTYLCLATEKVVQFQASPCPKEANRALLNDSSCWTIIGTESVEFSFSTSLACTLEPVTPVPLISTLELSGGGDVATLELHGENFHAGLKVWFGDVEAETMYRYGVEPAVPGVRGAGRGGLLQRLALAARSHHNPHEPGARRRALLP

SEQ ID NO: 19254 - protein, 95 aa, Artificial Sequence
  Synthetic polypeptide
AVIAPRQSSLGDRCAYPPAQRSPSSTACALRRSPHATSLWRMGPLWPVHDSGLPSRSTWLMGTLPKETSHRERATFAMAPWCSSSARSPASHYLP

SEQ ID NO: 19255 - protein, 95 aa, Artificial Sequence; identical to SEQ ID NO: 19254
  Synthetic polypeptide

SEQ ID NO: 19256 - protein, 95 aa, Artificial Sequence; identical to SEQ ID NO: 19254
  Synthetic polypeptide

SEQ ID NO: 19257 - protein, 311 aa, Artificial Sequence
  Synthetic polypeptide
QVCISSGSKVSLFNRLRSQTVSTRYLSVEDGAFVASARQWAAFTLHLADGHSAQGDFPPREGYVRYGSLVQLVCTVTGITLPPMIIRKVAKQCALLDVDEPISQLHKCAFQFPGSPPGGGGTYLCLATEKVVQFQASPCPKEANRALLNDSSCWTIIGTESVEFSFSTSLACTLEPVTPVPLISTLELSGGGDVATLELHGENFHAGLKVWFGDVEAETMYSPRSLVCVVPDVAAFCSDWRWLRAPITIPMSLVRADGLFYPSAFSFTYTPEYSVRPGHPGVPEPATDADALLESIHQEFTRTNFHLFIQT

SEQ ID NO: 19258 - protein, 312 aa, Artificial Sequence
  Synthetic polypeptide
QVCISSGSKVSLFNRLRSQTVSTRYLSVEDGAFVASARQWAAFTLHLADGHSAQGDFPPREGYVRYGSLVQLVCTVTGITLPPMIIRKVAKQCALLDVDEPISQLHKCAFQFPGSPPGGGGTYLCLATEKVVQFQASPCPKEANRALLNDSSCWTIIGTESVEFSFSTSLACTLEPVTPVPLISTLELSGGGDVATLELHGENFHAGLKVWFGDVEAETMYRSPRSLVCVVPDVAAFCSDWRWLRAPITIPMSLVRADGLFYPSAFSFTYTPEYSVRPGHPGVPEPATDADALLESIHQEFTRTNFHLFIQT

SEQ ID NO: 19259 - protein, 10 aa, Artificial Sequence
  Synthetic polypeptide
PHFNYITNRS

SEQ ID NO: 19260 - protein, 10 aa, Artificial Sequence
  Synthetic polypeptide
PHFNYITNRS

SEQ ID NO: 19261 - protein, 10 aa, Artificial Sequence
  Synthetic polypeptide
PHFNYITNRS

SEQ ID NO: 19262 - protein, 10 aa, Artificial Sequence
  Synthetic polypeptide
PHFNYITNRS

SEQ ID NO: 19263 - protein, 10 aa, Artificial Sequence
  Synthetic polypeptide
PHFNYITNRS

SEQ ID NO: 19264 - protein, 66 aa, Artificial Sequence
  Synthetic polypeptide
FGIRALSQPAIFIIVFELHGGRRYSLQFLLCKDLFLGLTHHHDDCCHSLLILIQHDLTLITSPIGA

SEQ ID NO: 19265 - protein, 66 aa, Artificial Sequence; identical to SEQ ID NO: 19264
  Synthetic polypeptide

SEQ ID NO: 19266 - protein, 9 aa, Artificial Sequence
  Synthetic polypeptide
PHFNYITNR

SEQ ID NO: 19267 - protein, 65 aa, Artificial Sequence
  Synthetic polypeptide
FGIRALSQPAIFIIVFELHGGRRYSLQFLLCKDLFLGLTHHHDDCCHSLLILIQHDLTLITSPIG

SEQ ID NO: 19268 - protein, 228 aa, Artificial Sequence
  Synthetic polypeptide
FGIRALSQPAIFIIVFELHGGRRYSLQFLLCKDLFLGLTHHHDDCCHSLLILIQHDLTLITSPIGADMDPNPRAALERQQLRLRERQKFFEDILQPETEFVFPLSHLHLESQRPPIGSISSMEVNVDTLEQVELIDLGDPDAADVFLPCEDPPPTPQSSGMDNHLEELSLPVPTSDRTTSRTSSSSSSDSSTNLHSPNPSDDGADTPLAQSDEEEERGDGGAEPGACS

SEQ ID NO: 19269 - protein, 228 aa, Artificial Sequence; identical to SEQ ID NO: 19268
  Synthetic polypeptide

SEQ ID NO: 19270 - protein, 179 aa, Artificial Sequence
  Synthetic polypeptide
FGIRALSQPAIFIIVFELHGGRRYSLQFLLCKDLFLGLTHHHDDCCHSLLILIQHDLTLITSPIGADMDPNPRAALERQQLRLRERQKFFEDILQPETEFVFPLSHLHLESQRPPIGSISSMEVNVDTLEQVELIDLGDPDAADVFLPCEDPPPTPQSSGMPLCFGDFSASQPEPDVRL

SEQ ID NO: 19271 - protein, 71 aa, Artificial Sequence
  Synthetic polypeptide
SQISGRGGDCPKVLVGLCIVGCVMDENCQAGEKCCKSGCGRFCVPPVLPPKLTMNPNWTVRSDSELEIPVP

SEQ ID NO: 19272 - protein, 71 aa, Artificial Sequence; identical to SEQ ID NO: 19271
  Synthetic polypeptide

SEQ ID NO: 19273 - protein, 71 aa, Artificial Sequence; identical to SEQ ID NO: 19271
  Synthetic polypeptide

SEQ ID NO: 19274 - protein, 71 aa, Artificial Sequence; identical to SEQ ID NO: 19271
  Synthetic polypeptide

SEQ ID NO: 19275 - protein, 22 aa, Artificial Sequence
  Synthetic polypeptide
ARFQGGAVIVQKFWWACALLAV

SEQ ID NO: 19276 - protein, 22 aa, Artificial Sequence
  Synthetic polypeptide
ARFQGGAVIVQKFWWACALLAV

SEQ ID NO: 19277 - protein, 22 aa, Artificial Sequence
  Synthetic polypeptide
ARFQGGAVIVQKFWWACALLAV

SEQ ID NO: 19278 - protein, 22 aa, Artificial Sequence
  Synthetic polypeptide
ARFQGGAVIVQKFWWACALLAV

SEQ ID NO: 19279 - protein, 7 aa, Artificial Sequence
  Synthetic polypeptide
PDFRAGR

SEQ ID NO: 19280 - protein, 7 aa, Artificial Sequence
  Synthetic polypeptide
PDFRAGR

SEQ ID NO: 19281 - protein, 7 aa, Artificial Sequence
  Synthetic polypeptide
PDFRAGR

SEQ ID NO: 19282 - protein, 7 aa, Artificial Sequence
  Synthetic polypeptide
PDFRAGR

SEQ ID NO: 19283 - protein, 72 aa, Artificial Sequence
  Synthetic polypeptide
ITEPGRRGGDCPKVLVGLCIVGCVMDENCQAGEKCCKSGCGRFCVPPVLPPKLTMNPNWTVRSDSELEIPVP

SEQ ID NO: 19284 - protein, 72 aa, Artificial Sequence; identical to SEQ ID NO: 19283
  Synthetic polypeptide

SEQ ID NO: 19285 - protein, 72 aa, Artificial Sequence; identical to SEQ ID NO: 19283
  Synthetic polypeptide

SEQ ID NO: 19286 - protein, 72 aa, Artificial Sequence; identical to SEQ ID NO: 19283
  Synthetic polypeptide

SEQ ID NO: 19287 - protein, 61 aa, Artificial Sequence
  Synthetic polypeptide
KSAPDFLWTFPFDDFSLYPFAVINHSHGYDYTLSPANESLNLEGGAVIVQKFWWACALLAV

SEQ ID NO: 19288 - protein, 61 aa, Artificial Sequence; identical to SEQ ID NO: 19287
  Synthetic polypeptide

SEQ ID NO: 19289 - protein, 61 aa, Artificial Sequence; identical to SEQ ID NO: 19287
  Synthetic polypeptide

SEQ ID NO: 19290 - protein, 61 aa, Artificial Sequence; identical to SEQ ID NO: 19287
  Synthetic polypeptide

SEQ ID NO: 19291 - protein, 6 aa, Artificial Sequence
  Synthetic polypeptide
TWKAGR

SEQ ID NO: 19292 - protein, 6 aa, Artificial Sequence
  Synthetic polypeptide
TWKAGR

SEQ ID NO: 19293 - protein, 6 aa, Artificial Sequence
  Synthetic polypeptide
TWKAGR

SEQ ID NO: 19294 - protein, 6 aa, Artificial Sequence
  Synthetic polypeptide
TWKAGR

SEQ ID NO: 19295 - protein, 296 aa, Artificial Sequence
  Synthetic polypeptide
PSNPWNIMIKHRQVQRRGRRSQMTTSFTDPAISMDLLRAVLQPSINEEIQTVFNKYMKFFQKAALNVRDNVGEEVDAEQLIQEACRSCLEQAKLLFSDGEKVIPRLTHELPGIKRGRQAEEECAHRGSPLPKKRKGRPPGHILSSDRAAAGMVWKPKSCEPIRREGPKWDPARLNESTTFVLGSRANKALGMGGTRGRIYIKHPHLFKYAADPQDKHWLAEQHHMRATGGKMAYLLIEEDIRDLAASDDYRGCLDLKLEELKSFVLPSWMVEKMRKYMETLRTENEHRAVEAPPQT

SEQ ID NO: 19296 - protein, 10 aa, Artificial Sequence
  Synthetic polypeptide
HRVDPRTLGT

SEQ ID NO: 19297 - protein, 10 aa, Artificial Sequence
  Synthetic polypeptide
HRVDPRTLGT

SEQ ID NO: 19298 - protein, 10 aa, Artificial Sequence
  Synthetic polypeptide
HRVDPRTLGT

SEQ ID NO: 19299 - protein, 114 aa, Artificial Sequence
  Synthetic polypeptide
NLLWDGKIKAGTTPRTSPDTELTLEPLEHNDKAPAGAAEGPPLTDDNKFHRSCHLHGSPPSCPAAQHQRGDPDCLQQVHEVLPEGSTERARQCWGGGGRRAADPGSLSELPGAG

SEQ ID NO: 19300 - protein, 122 aa, Artificial Sequence
  Synthetic polypeptide
PSNPWNIMIKHRQVQRRGRRSQMTTSFTDPAISMDLLRAVLQPSINEEIQTVFNKYMKFFQKAALNVRDNVGEEVDAEQLIQEACRSCLEQVRGGSSYHGPIWYHGDEHPAASLPLWCGQEA

SEQ ID NO: 19301 - protein, 129 aa, Artificial Sequence
  Synthetic polypeptide
NLLWDGKIKAGTTPRTSPDTELTLEPLEHNDKAPAGAAEGPPLTDDNKFHRSCHLHGSPPSCPAAQHQRGDPDCLQQVHEVLPEGSTERARQCWGGGGRRAADPGSLSELPGAGAWWIKLSWPHLVSWG

SEQ ID NO: 19302 - protein, 263 aa, Artificial Sequence
  Synthetic polypeptide
PSNPWNIMIKHRQVQRRGRRSQMTTSFTDPAISMDLLRAVLQPSINEEIQTVFNKYMKAKLLFSDGEKVIPRLTHELPGIKRGRQAEEECAHRGSPLPKKRKGRPPGHILSSDRAAAGMVWKPKSCEPIRREGPKWDPARLNESTTFVLGSRANKALGMGGTRGRIYIKHPHLFKYAADPQDKHWLAEQHHMRATGGKMAYLLIEEDIRDLAASDDYRGCLDLKLEELKSFVLPSWMVEKMRKYMETLRTENEHRAVEAPPQT

SEQ ID NO: 19303 - protein, 81 aa, Artificial Sequence
  Synthetic polypeptide
NLLWDGKIKAGTTPRTSPDTELTLEPLEHNDKAPAGAAEGPPLTDDNKFHRSCHLHGSPPSCPAAQHQRGDPDCLQQVHEG

SEQ ID NO: 19304 - protein, 143 aa, Artificial Sequence
  Synthetic polypeptide
TVETEVAMSGDKGISAFPESDNLFKWVGTIHGAAGTVYEDLRYKLSLEFPSGYPYNAPTVKFLTPCYHPNVDTQGNICLDILKEKWSALYDVRTILLSIQSLLGEPNIDSPLNTHAAELWKNPTAFKKYLQETYSKQVTSQEP

SEQ ID NO: 19305 - protein, 143 aa, Artificial Sequence; identical to SEQ ID NO: 19304
  Synthetic polypeptide

SEQ ID NO: 19306 - protein, 143 aa, Artificial Sequence; identical to SEQ ID NO: 19304
  Synthetic polypeptide

SEQ ID NO: 19307 - protein, 94 aa, Artificial Sequence
  Synthetic polypeptide
AGRGSSHLIIPTLWGAKVGGSLEVRSSRPAWPTLQNPVSTKNTKIIQAWWCMPVISATREAEAQESFEPWRQRLRCLAIKGFLPSLNQTTFSNG

SEQ ID NO: 19308 - protein, 94 aa, Artificial Sequence; identical to SEQ ID NO: 19307
  Synthetic polypeptide

SEQ ID NO: 19309 - protein, 94 aa, Artificial Sequence; identical to SEQ ID NO: 19307
  Synthetic polypeptide

SEQ ID NO: 19310 - protein, 94 aa, Artificial Sequence; identical to SEQ ID NO: 19307
  Synthetic polypeptide

SEQ ID NO: 19311 - protein, 24 aa, Artificial Sequence
  Synthetic polypeptide
FQLLGRLRHKNHLNRGDRGCDVWR

SEQ ID NO: 19312 - protein, 24 aa, Artificial Sequence
  Synthetic polypeptide
FQLLGRLRHKNHLNRGDRGCDVWR

SEQ ID NO: 19313 - protein, 24 aa, Artificial Sequence
  Synthetic polypeptide
FQLLGRLRHKNHLNRGDRGCDVWR

SEQ ID NO: 19314 - protein, 24 aa, Artificial Sequence
  Synthetic polypeptide
FQLLGRLRHKNHLNRGDRGCDVWR

SEQ ID NO: 19315 - protein, 125 aa, Artificial Sequence
  Synthetic polypeptide
TVETEVAMSGDKGISAFPESDNLFKWVGTIHGAAGTAVGSIRTSSTVCLLSGPRETQDSSKPLVWGLGWDMRLLLELTLQLFLQMPEPNIDSPLNTHAAELWKNPTAFKKYLQETYSKQVTSQEP

SEQ ID NO: 19316 - protein, 34 aa, Artificial Sequence
  Synthetic polypeptide
HFGRPRWQDHLNPGVQNQPGRTSRLRPGPTSAKR

SEQ ID NO: 19317 - protein, 13 aa, Artificial Sequence
  Synthetic polypeptide
TQEFKTSLDGPAG

SEQ ID NO: 19318 - protein, 189 aa, Artificial Sequence
  Synthetic polypeptide
WAQWLKPVILALWEAEVAGSLEPRSSKPAWTDQQAEARSYLSEEMIAEFKAAFDMFDADGGGDISVKELGTVMRMLGQTPTKEELDAIIEEVDEDGSGTIDFEEFLVMMVRQMKEDAKGKSEEELAECFRIFDRNADGYIDPEELAEIFRASGEHVTDEEIESLMKDGDKNNDGRIDFDEFLKMMEGVQ

SEQ ID NO: 19319 - protein, 55 aa, Artificial Sequence
  Synthetic polypeptide
SQHFGRPRWADHLRAWPLPGPARWCHPGVQPLFLESDCQCVIPGVPSWGGLLLLR

SEQ ID NO: 19320 - protein, 55 aa, Artificial Sequence; identical to SEQ ID NO: 19319
  Synthetic polypeptide

SEQ ID NO: 19321 - protein, 55 aa, Artificial Sequence; identical to SEQ ID NO: 19319
  Synthetic polypeptide

SEQ ID NO: 19322 - protein, 55 aa, Artificial Sequence; identical to SEQ ID NO: 19319
  Synthetic polypeptide

SEQ ID NO: 19323 - protein, 44 aa, Artificial Sequence
  Synthetic polypeptide
RAQLLTPVIPALWEAEVGGSSESMAPSWSSQMVSPWSTTPILGI

SEQ ID NO: 19324 - protein, 44 aa, Artificial Sequence; identical to SEQ ID NO: 19323
  Synthetic polypeptide

SEQ ID NO: 19325 - protein, 44 aa, Artificial Sequence; identical to SEQ ID NO: 19323
  Synthetic polypeptide

SEQ ID NO: 19326 - protein, 44 aa, Artificial Sequence; identical to SEQ ID NO: 19323
  Synthetic polypeptide

SEQ ID NO: 19327 - protein, 38 aa, Artificial Sequence
  Synthetic polypeptide
SQHFGRPRWADHLRAWPLPDCQCVIPGVPSWGGLLLLR

SEQ ID NO: 19328 - protein, 27 aa, Artificial Sequence
  Synthetic polypeptide
RAQLLTPVIPALWEAEVGGSSESMAPS

SEQ ID NO: 19329 - protein, 27 aa, Artificial Sequence
  Synthetic polypeptide
SQHFGRPRWADHLRAWPLPGPARWCHP

SEQ ID NO: 19330 - protein, 35 aa, Artificial Sequence
  Synthetic polypeptide
RAQLLTPVIPALWEAEVGGSSESMAPSWSSQMVSP

SEQ ID NO: 19331 - protein, 528 aa, Artificial Sequence
  Synthetic polypeptide
ASRIASLSLSFHICHMEARLLVPSSPKSYLEGPLAMALFGALFLALLAGAHAEFPGCKIRVTSKALELVKQEGLRFLEQELETITIPDLRGKEGHFYYNISEVKVTELQLTSSELDFQPQQELMLQITNASLGLRFRRQLLYWFFYDGGYINASAEGVSIRTGLELSRDPAGRMKVSNVSCQASVSRMHAAFGGTFKKVYDFLSTFITSGMRFLLNQQICPVLYHAGTVLLNSLLDTVPVRSSVDELVGIDYSLMKDPVASTSNLDMDFRGAFFPLTERNWSLPNRAVEPQLQEEERMVYVAFSEFFFDSAMESYFRAGALQLLLVGDKVPHDLDMLLRATYFGSIVLLSPAVIDSPLKLELRVLAPPRCTIKPSGTTISVTASVTIALVPPDQPEVQLSSMTMDARLSAKMALRGKALRTQLDLRRFRIYSNHSALESLALIPLQAPLKTMLQIGVMPMLNERTWRGVQIPLPEGINFVHEVVTNHAGFLTIGADLHFAKGLREVIEKNRPADVRASTAPTPSTAAV

SEQ ID NO: 19332 - protein, 36 aa, Artificial Sequence
  Synthetic polypeptide
ASVSTSAIWRQDYWFQVPRRVIWRARSPWPSSGPSS

SEQ ID NO: 19333 - protein, 100 aa, Artificial Sequence
  Synthetic polypeptide
KSHRLSEPQFPHLPYGGKIIGSKFPEELSGGPARHGPLRGPLPSAAGRRTCRVPRLQDPRHLQGAGAGEAGGAALSGARAGDYHHSGPAGQRRPLLLQHL

SEQ ID NO: 19334 - protein, 59 aa, Artificial Sequence
  Synthetic polypeptide
GQARWLLPVISALWMPRRVDHLRSGVQDQPAQHAVRPKTWLCNRQAQTRLMLSVVPRIG

SEQ ID NO: 19335 - protein, 59 aa, Artificial Sequence; identical to SEQ ID NO: 19334
  Synthetic polypeptide

SEQ ID NO: 19336 - protein, 12 aa, Artificial Sequence
  Synthetic polypeptide
GQEFKTSQHNML

SEQ ID NO: 19337 - protein, 12 aa, Artificial Sequence
  Synthetic polypeptide
GQEFKTSQHNML

SEQ ID NO: 19338 - protein, 144 aa, Artificial Sequence
  Synthetic polypeptide
PGAVALACNLSTLDAKAGGSLEVRSSRPASTTCCETKDLVVQQAGTNKTDVVCGPQDRLRALVVIPIIFGILFAILLVLVFIKKVAKKPTNKAPHPKQEPQEINFPDDLPGSNTAAPVQETLHGCQPVTQEDGKESRISVQERQ

SEQ ID NO: 19339 - protein, 59 aa, Artificial Sequence
  Synthetic polypeptide
PGAVALACNLSTLDAKAGGSLEVRSSRPASTTCCETKDLVVQQAGTNKTDVVCGPQDRL

SEQ ID NO: 19340 - protein, 19 aa, Artificial Sequence
  Synthetic polypeptide
TLNEGKWKMRRRYQFHSRT

SEQ ID NO: 19341 - protein, 19 aa, Artificial Sequence
  Synthetic polypeptide
TLNEGKWKMRRRYQFHSRT

SEQ ID NO: 19342 - protein, 693 aa, Artificial Sequence
  Synthetic polypeptide
EGDTSFIPGPDCELHPRGMAATGPCSEAPVQGCDAGELQQLGLCGVSDVQRSWSKFCNFPLTGYHVSKPDVIFKLEQGEEPWIVEEFSNQNYPDIDDALEKNKEIQDKHLTQTVFFSNKTLITERENVFGKTLNLGMNSVPSRKMPYKCNPGGNSLKTNSEVIVAKKSKENRKIPDGYSGFGKHEKSHLGMKKYRYNPMRKASNQNENLILHQNIQILKQPFDYNKCGKTFFKRAILITQKGRQTERKPNECNECRKTFSKRSTLIVHQRIHTGEKPYVCSDCRKTFRVKTSLTRHRRIHTGERPYECSECRKTFIDKSALIVHQKIHGGEKSYECNECGKTFFRKSALAEHFRSHTGEKPYECKECGNAFSKKSYLVVHQRTHRGEKPNECKECGKTFFCQSALTAHQRIHTGEKPYECSECEKTFFCQSALNVHRRSHTGEKPYECSQCGKFLCTKSALIAHQITHRGKKSYECNECGKFFCHKSTLTIHQRTHTGEKHGVFNKCGRISIVKSNCSQCKRMNTKENLYECSEHGHAVSKNSHLIVHQRTIWERPYECNECGRTYCRKSALTHHQRTHTGQRPYECNECGKTFCQKFSFVEHQRTHTGEKPYECNECGKSFCHKSAFRVHRRIHTGEKPYECNQCGKTYRRLWTLTEHQKIHTGEKPYECNKCEKTFRHKSNFLLHQKSHKE

SEQ ID NO: 19343 - protein, 66 aa, Artificial Sequence
  Synthetic polypeptide
REMENEKEIPVSFQDLTVNFTQEEWQQLDPAQRLLYRDVMLENYSNLVSVESLMSKDLGPSSVISH

SEQ ID NO: 19344 - protein, 48 aa, Artificial Sequence
  Synthetic polypeptide
EGDTSFIPGPDCELHPRGMAATGPCSEAPVQGCDAGELQQLGLCGVSC

SEQ ID NO: 19345 - protein, 681 aa, Artificial Sequence
  Synthetic polypeptide
REMENEKEIPVSFQDLTVNFTQEEWQQLDPAQRLLYRDVMLENYSNLVSVGYHVSKPDVIFKLEQGEEPWIVEEFSNQNYPDIDDALEKNKEIQDKHLTQTVFFSNKTLITERENVFGKTLNLGMNSVPSRKMPYKCNPGGNSLKTNSEVIVAKKSKENRKIPDGYSGFGKHEKSHLGMKKYRYNPMRKASNQNENLILHQNIQILKQPFDYNKCGKTFFKRAILITQKGRQTERKPNECNECRKTFSKRSTLIVHQRIHTGEKPYVCSDCRKTFRVKTSLTRHRRIHTGERPYECSECRKTFIDKSALIVHQKIHGGEKSYECNECGKTFFRKSALAEHFRSHTGEKPYECKECGNAFSKKSYLVVHQRTHRGEKPNECKECGKTFFCQSALTAHQRIHTGEKPYECSECEKTFFCQSALNVHRRSHTGEKPYECSQCGKFLCTKSALIAHQITHRGKKSYECNECGKFFCHKSTLTIHQRTHTGEKHGVFNKCGRISIVKSNCSQCKRMNTKENLYECSEHGHAVSKNSHLIVHQRTIWERPYECNECGRTYCRKSALTHHQRTHTGQRPYECNECGKTFCQKFSFVEHQRTHTGEKPYECNECGKSFCHKSAFRVHRRIHTGEKPYECNQCGKTYRRLWTLTEHQKIHTGEKPYECNKCEKTFRHKSNFLLHQKSHKE

SEQ ID NO: 19346 - protein, 65 aa, Artificial Sequence
  Synthetic polypeptide
GLPSHAELNRGCLYGLVGSCTPWRMCPPPWLCCSSLWSSPSSLSLPATRRPSSSSCRSWQSWPSA

SEQ ID NO: 19347 - protein, 65 aa, Artificial Sequence; identical to SEQ ID NO: 19346
  Synthetic polypeptide

SEQ ID NO: 19348 - protein, 65 aa, Artificial Sequence; identical to SEQ ID NO: 19346
  Synthetic polypeptide

SEQ ID NO: 19349 - protein, 65 aa, Artificial Sequence; identical to SEQ ID NO: 19346
  Synthetic polypeptide

SEQ ID NO: 19350 - protein, 65 aa, Artificial Sequence; identical to SEQ ID NO: 19346
  Synthetic polypeptide

SEQ ID NO: 19351 - protein, 65 aa, Artificial Sequence; identical to SEQ ID NO: 19346
  Synthetic polypeptide

SEQ ID NO: 19352 - protein, 65 aa, Artificial Sequence; identical to SEQ ID NO: 19346
  Synthetic polypeptide

SEQ ID NO: 19353 - protein, 159 aa, Artificial Sequence
  Synthetic polypeptide
IESGLSVWIGGQLHPLENVPPALAVLLITVVIAFFTEFASNTATIIIFLPVLAELAIRLRVHPLYLMIPGTVGCSFAFMLPVSTPPNSIAFASGHLLVKDMVRTGLLMNLMGVLLLSLAMNTWAQTIFQLGTFPDWADMYSVNVTALPPTLANDTFRTL

SEQ ID NO: 19354 - protein, 159 aa, Artificial Sequence; identical to SEQ ID NO: 19353
  Synthetic polypeptide

SEQ ID NO: 19355 - protein, 159 aa, Artificial Sequence; identical to SEQ ID NO: 19353
  Synthetic polypeptide

SEQ ID NO: 19356 - protein, 159 aa, Artificial Sequence; identical to SEQ ID NO: 19353
  Synthetic polypeptide

SEQ ID NO: 19357 - protein, 159 aa, Artificial Sequence; identical to SEQ ID NO: 19353
  Synthetic polypeptide

SEQ ID NO: 19358 - protein, 159 aa, Artificial Sequence; identical to SEQ ID NO: 19353
  Synthetic polypeptide

SEQ ID NO: 19359 - protein, 159 aa, Artificial Sequence; identical to SEQ ID NO: 19353
  Synthetic polypeptide

SEQ ID NO: 19360 - protein, 19 aa, Artificial Sequence
  Synthetic polypeptide
GLPSHAELNRGCLYGLVGS

SEQ ID NO: 19361 - protein, 12 aa, Artificial Sequence
  Synthetic polypeptide
IESGLSVWIGGQ

SEQ ID NO: 19362 - protein, 212 aa, Artificial Sequence
  Synthetic polypeptide
FNRGGGYPYAVLVTMSEFSRDLMIFCKGLFPLLLGTSCCHHVKKDVFASTSTMIESGLSVWIGGQLHPLENVPPALAVLLITVVIAFFTEFASNTATIIIFLPVLAELAIRLRVHPLYLMIPGTVGCSFAFMLPVSTPPNSIAFASGHLLVKDMVRTGLLMNLMGVLLLSLAMNTWAQTIFQLGTFPDWADMYSVNVTALPPTLANDTFRTL

SEQ ID NO: 19363 - protein, 212 aa, Artificial Sequence; identical to SEQ ID NO: 19362
  Synthetic polypeptide

SEQ ID NO: 19364 - protein, 212 aa, Artificial Sequence; identical to SEQ ID NO: 19362
  Synthetic polypeptide

SEQ ID NO: 19365 - protein, 212 aa, Artificial Sequence; identical to SEQ ID NO: 19362
  Synthetic polypeptide

SEQ ID NO: 19366 - protein, 212 aa, Artificial Sequence; identical to SEQ ID NO: 19362
  Synthetic polypeptide

SEQ ID NO: 19367 - protein, 212 aa, Artificial Sequence; identical to SEQ ID NO: 19362
  Synthetic polypeptide

SEQ ID NO: 19368 - protein, 212 aa, Artificial Sequence; identical to SEQ ID NO: 19362
  Synthetic polypeptide

SEQ ID NO: 19369 - protein, 65 aa, Artificial Sequence
  Synthetic polypeptide
FNRGGGYPYAVLVTMSEFSRDLMIFCKGLFPLLLGTSCCHHVKKDVFASTSTMIESGLSVWIGGQ

SEQ ID NO: 19370 - protein, 69 aa, Artificial Sequence
  Synthetic polypeptide
CPQPTPFLNPRLIANCPPISTWMPAEHLKCHTAKTELWISFPSHKLPLFQSATPHLSCLCVPLCLCWVA

SEQ ID NO: 19371 - protein, 60 aa, Artificial Sequence
  Synthetic polypeptide
PTAHLFPRGCLLSTSNVTQPRQNSGSPFPATSCPSSSLPLPTCPAFVCLCVFAGWPDLWL

SEQ ID NO: 19372 - protein, 565 aa, Artificial Sequence
  Synthetic polypeptide
APQMSHSQDRTLDLLSQPQAAPLPVCHSPPVLPLCASVSLLGGLTFGYELAVISGALLPLQLDFGLSCLEQEFLVGSLLLGALLASLVGGFLIDCYGRKQAILGSNLVLLAGSLTLGLAGSLAWLVLGRAVVGFAISLSSMACCIYVSELVGPRQRGVLVSLYEAGITVGILLSYALNYALAGTPWGWRHMFGWATAPAVLQSLSLLFLPAGTDETATHKDLIPLQGGEAPKLGPGRPRYSFLDLFRARDNMRGRTTVGLGLVLFQQLTGQPNVLCYASTIFSSVGFHGGSSAVLASVGLGAVKVAATLTAMGLVDRAGRRALLLAGCALMALSVSGIGLVSFAVPMDSGPSCLAVPNATGQTGLPGDSGLLQDSSLPPIPRTNEDQREPILSTAKKTKPHPRSGDPSAPPRLALSSALPGPPLPARGHALLRWTALLCLMVFVSAFSFGFGPVTWLVLSEIYPVEIRGRAFAFCNSFNWAANLFISLSFLDLIGTIGLSWTFLLYGLTAVLGLGFIYLFVPETKGQSLAEIDQQFQKRRFTLSFGHRQNSTGIPYSRIEISAAS

SEQ ID NO: 19373 - protein, 16 aa, Artificial Sequence
  Synthetic polypeptide
LWEDEVERIPNIILLT

SEQ ID NO: 19374 - protein, 14 aa, Artificial Sequence
  Synthetic polypeptide
SGRMKLREYLILSS

SEQ ID NO: 19375 - protein, 32 aa, Artificial Sequence
  Synthetic polypeptide
ERRTQSEHLPLHDASPRHSDPGQRENNRCSGL

SEQ ID NO: 19376 - protein, 360 aa, Artificial Sequence
  Synthetic polypeptide
SMKVKSGGHRVNTYLFMMQAQGILIRDNVRTIGAQVYEQVLRSAYAKRNSSVNDSDYPLDLNHSETFLQTTTFLPEDFTYFANHTCPERLPSMKGPIDINMSEIGMDYIHELFSKDPTIKLGGHWKPSDCMPRWKVAILIPFRNRHEHLPVLFRHLLPMLQRQRLQFAFYVVEQVGTQPFNRAMLFNVGFQEAMKDLDWDCLIFHDVDHIPESDRNYYGCGQMPRHFATKLDKYMYLLPYTEFFGGVSGLTVEQFRKINGFPNAFWGWGGEDDDLWNRVQNAGYSVSRPEGDTGKYKSIPHHHRGEVQFLGRYALLRKSKERQGLDGLNNLNYFANITYDALYKNITVNLTPELAQVNEY

SEQ ID NO: 19377 - protein, 340 aa, Artificial Sequence
  Synthetic polypeptide
QMGNPVLPSQGKRLQEWCSVILCFSLIAHNLVHLLLLARWEDTPLVILGVVAGALIADFLSGLVHWGADTWGSVELPIVGKAFIRPFREHHIDPTAITRHDFIETNGDNCLVTLLPLLNMAYKFRTHSPEALEQLYPWECFVFCLIIFGTFTNQIHKWSHTYFGLPRWVTLLQDWHVILPRKHHRIHHVSPHETYFCITTGVKVPRNFRLLEELEEGQKGVGDGTVSWGLEDDEDMTLTRWTGMIIGPPRTIYENRIYSLKIECGPKYPEAPPFVRFVTKINMNGVNSSNGVVDPRAISVLAKWQNSYSIKVVLQELRRLMMSKENMKLPQPPEGQCYSN

SEQ ID NO: 19378 - protein, 340 aa, Artificial Sequence; identical to SEQ ID NO: 19377
  Synthetic polypeptide

SEQ ID NO: 19379 - protein, 40 aa, Artificial Sequence
  Synthetic polypeptide
MLLCDLEKAFSLPEPQFPYHDKWGTQYFLPKASASRSGAL

SEQ ID NO: 19380 - protein, 40 aa, Artificial Sequence; identical to SEQ ID NO: 19379
  Synthetic polypeptide

SEQ ID NO: 19381 - protein, 40 aa, Artificial Sequence; identical to SEQ ID NO: 19379
  Synthetic polypeptide

SEQ ID NO: 19382 - protein, 40 aa, Artificial Sequence; identical to SEQ ID NO: 19379
  Synthetic polypeptide

SEQ ID NO: 19383 - protein, 40 aa, Artificial Sequence; identical to SEQ ID NO: 19379
  Synthetic polypeptide

SEQ ID NO: 19384 - protein, 77 aa, Artificial Sequence
  Synthetic polypeptide
CCCVTWRRPSLSLSLSFPIMTNGEPSTSFPRQAPPGVVLCDPVLQPHRPQPGPSPAAGPLGGHTPRHTRCCCRGSHC

SEQ ID NO: 19385 - protein, 77 aa, Artificial Sequence; identical to SEQ ID NO: 19384
  Synthetic polypeptide

SEQ ID NO: 19386 - protein, 77 aa, Artificial Sequence; identical to SEQ ID NO: 19384
  Synthetic polypeptide

SEQ ID NO: 19387 - protein, 77 aa, Artificial Sequence; identical to SEQ ID NO: 19384
  Synthetic polypeptide

SEQ ID NO: 19388 - protein, 237 aa, Artificial Sequence
  Synthetic polypeptide
QMGNPVLPSQGKRLQEWCSVILCFSLIAHNLVHLLLLARWEDTPLVILGVVAGALIADFLSGLVHWGADTWGSVELPIAFIRPFREHHIDPTAITRHDFIETNGDNCLVTLLPLLNMAYKFRTHSPEALEQLYPWECFVFCLIIFGTFTNQIHKWSHTYFGLPRWVTLLQDWHVILPRKHHRIHHVSPHETYFCITTGWLNYPLEKIGFWRRLEDLIQGLTGEKPRADDMKWAQKIK

SEQ ID NO: 19389 - protein, 240 aa, Artificial Sequence
  Synthetic polypeptide
QMGNPVLPSQGKRLQEWCSVILCFSLIAHNLVHLLLLARWEDTPLVILGVVAGALIADFLSGLVHWGADTWGSVELPIVGKAFIRPFREHHIDPTAITRHDFIETNGDNCLVTLLPLLNMAYKFRTHSPEALEQLYPWECFVFCLIIFGTFTNQIHKWSHTYFGLPRWVTLLQDWHVILPRKHHRIHHVSPHETYFCITTGWLNYPLEKIGFWRRLEDLIQGLTGEKPRADDMKWAQKIK

SEQ ID NO: 19390 - protein, 61 aa, Artificial Sequence
  Synthetic polypeptide
QMGNPVLPSQGKRLQEWCSVILCFSLIAHNLVHLLLLARWEDTPLVILGVGFHPTLPGAPH

SEQ ID NO: 19391 - protein, 82 aa, Artificial Sequence
  Synthetic polypeptide
CCCVTWRRPSLSLSLSFPIMTNGEPSTSFPRQAPPGVVLCDPVLQPHRPQPGPSPAAGPLGGHTPRHTRCWLSSDPSGSTTL

SEQ ID NO: 19392 - protein, 70 aa, Artificial Sequence
  Synthetic polypeptide
VFIRAGCEVVDSIWIRILAPLFVNCVILSRLPHLSEPPCPHLYNVEDTGEGGGGDHRGHAPQAGRVLQPG

SEQ ID NO: 19393 - protein, 70 aa, Artificial Sequence; identical to SEQ ID NO: 19392
  Synthetic polypeptide

SEQ ID NO: 19394 - protein, 70 aa, Artificial Sequence; identical to SEQ ID NO: 19392
  Synthetic polypeptide

SEQ ID NO: 19395 - protein, 70 aa, Artificial Sequence; identical to SEQ ID NO: 19392
  Synthetic polypeptide

SEQ ID NO: 19396 - protein, 70 aa, Artificial Sequence; identical to SEQ ID NO: 19392
  Synthetic polypeptide

SEQ ID NO: 19397 - protein, 70 aa, Artificial Sequence; identical to SEQ ID NO: 19392
  Synthetic polypeptide

SEQ ID NO: 19398 - protein, 171 aa, Artificial Sequence
  Synthetic polypeptide
AGYPTSLSLRVLICTTWRIRAKEVEETIEGMLLRLEEFCSLADLIRSDTSQILEENIPVLKAKLTEMRGIYAKVDRLEAFVKMVGHHVAFLEADVLQAERDHGAFPQALRRWLGSAGLPSFRNVECSGTIPARCNLRLPGSSDSPASASQVAGITEVTCTGARDVRAAHTV

SEQ ID NO: 19399 - protein, 171 aa, Artificial Sequence; identical to SEQ ID NO: 19398
  Synthetic polypeptide

SEQ ID NO: 19400 - protein, 36 aa, Artificial Sequence
  Synthetic polypeptide
ASVSSSVQRGGYGRRRWRRPSRACSSGWKSFAAWLT

SEQ ID NO: 19401 - protein, 36 aa, Artificial Sequence; identical to SEQ ID NO: 19400
  Synthetic polypeptide

SEQ ID NO: 19402 - protein, 36 aa, Artificial Sequence; identical to SEQ ID NO: 19400
  Synthetic polypeptide

SEQ ID NO: 19403 - protein, 36 aa, Artificial Sequence; identical to SEQ ID NO: 19400
  Synthetic polypeptide

SEQ ID NO: 19404 - protein, 36 aa, Artificial Sequence; identical to SEQ ID NO: 19400
  Synthetic polypeptide

SEQ ID NO: 19405 - protein, 36 aa, Artificial Sequence; identical to SEQ ID NO: 19400
  Synthetic polypeptide

SEQ ID NO: 19406 - protein, 118 aa, Artificial Sequence
  Synthetic polypeptide
AGYPTSLSLRVLICTTWRIRAKEVEETIEGMLLRLEEFCSLADLIRSDTSQILEENIPVLKAKLTEMRGIYAKVDRLEKSPAPVPVTYELPTLYRTEDYFPVDAGEAQHHPRTCPRPL

SEQ ID NO: 19407 - protein, 163 aa, Artificial Sequence
  Synthetic polypeptide
AGYPTSLSLRVLICTTWRIRAKEVEETIEGMLLRLEEFCSLADLIRSDTSQILEENIPVLKAKLTEMRGIYAKVDRLEAFVKMVGHHVAFLEADVLQAERDHGAFPQALRRWLGSAGLPSFRNKSPAPVPVTYELPTLYRTEDYFPVDAGEAQHHPRTCPRPL

SEQ ID NO: 19408 - protein, 107 aa, Artificial Sequence
  Synthetic polypeptide
AGYPTSLSLRVLICTTWRIRAKEVEETIEGMLLRLEEFCSLADLIRSDTSQILEENIPVLKAKLTEMRGIYAKVDRLEKSPAPVPVTYELPTLYRTEDYFPVDAGEA

SEQ ID NO: 19409 - protein, 79 aa, Artificial Sequence
  Synthetic polypeptide
AGYPTSLSLRVLICTTWRIRAKEVEETIEGMLLRLEEFCSLADLIRSDTSQILEENIPVLKAKLTEMRGIYAKVDRLES

SEQ ID NO: 19410 - protein, 35 aa, Artificial Sequence
  Synthetic polypeptide
DQPGQRGEILSTKNTKISQIIPKRSSREINRKMCF

SEQ ID NO: 19411 - protein, 35 aa, Artificial Sequence; identical to SEQ ID NO: 19410
  Synthetic polypeptide

SEQ ID NO: 19412 - protein, 35 aa, Artificial Sequence; identical to SEQ ID NO: 19410
  Synthetic polypeptide

SEQ ID NO: 19413 - protein, 35 aa, Artificial Sequence; identical to SEQ ID NO: 19410
  Synthetic polypeptide

SEQ ID NO: 19414 - protein, 35 aa, Artificial Sequence; identical to SEQ ID NO: 19410
  Synthetic polypeptide

SEQ ID NO: 19415 - protein, 116 aa, Artificial Sequence
  Synthetic polypeptide
QWLAPIIPALWEAEACGSLEVRSFKTSLGNVAKSCLLKIQKLARLYRKEVLEKLIEKCVSKGYVFQMEMIVRARQLNYTIGEVPISFVDRVYGESKLGGNEIVSFLKGLLTLFATT

SEQ ID NO: 19416 - protein, 116 aa, Artificial Sequence; identical to SEQ ID NO: 19415
  Synthetic polypeptide

SEQ ID NO: 19417 - protein, 116 aa, Artificial Sequence; identical to SEQ ID NO: 19415
  Synthetic polypeptide

SEQ ID NO: 19418 - protein, 116 aa, Artificial Sequence; identical to SEQ ID NO: 19415
  Synthetic polypeptide

SEQ ID NO: 19419 - protein, 8 aa, Artificial Sequence
  Synthetic polypeptide
PDYTEKKF

SEQ ID NO: 19420 - protein, 8 aa, Artificial Sequence
  Synthetic polypeptide
PDYTEKKF

SEQ ID NO: 19421 - protein, 8 aa, Artificial Sequence
  Synthetic polypeptide
PDYTEKKF

SEQ ID NO: 19422 - protein, 8 aa, Artificial Sequence
  Synthetic polypeptide
PDYTEKKF

SEQ ID NO: 19423 - protein, 8 aa, Artificial Sequence
  Synthetic polypeptide
PDYTEKKF

SEQ ID NO: 19424 - protein, 82 aa, Artificial Sequence
  Synthetic polypeptide
QWLAPIIPALWEAEACGSLEVRSFKTSLGNVAKSCLLKIQKLARLYRKEVLEKLIEKCVSKGYVFQMEMIVRARQLNYTIGE

SEQ ID NO: 19425 - protein, 134 aa, Artificial Sequence
  Synthetic polypeptide
EFKTSPATMLCQRVMMPSRTNLATGIPSSKVKYSRLSSTDDGYIDLQFKKTPPKIPYKAIALATVLFLIGAFLIIIGSLLLSGYISKGGADRAVPVLIIGILVFLPGFYHLRIAYYASKGYRGYSYDDIPDFDD

SEQ ID NO: 19426 - protein, 14 aa, Artificial Sequence
  Synthetic polypeptide
SSRPARPPCCVSVL

SEQ ID NO: 19427 - protein, 27 aa, Artificial Sequence
  Synthetic polypeptide
VQDQPGHHAVSACYDAVPYQPGYWNPQ

SEQ ID NO: 19428 - protein, 378 aa, Artificial Sequence
  Synthetic polypeptide
ITQNQDIVDGKEKEGQELGTADCSVPGDPEGLETAKDDSQAAAIAENNNSIMSFFKTLVSPNKAETKKDPEDTASKAESVCDGQAGQKTSEIQARGTKKKHLDSPRLGLAFRKFFRHKGAEKSPTTSADLKSDKANFTSQETQGAGKNSKGCNPSGHTQSVTTPEPAKEGTKEKSGPTSLPLGKLFWKKVVCESPVEIIKSKEVESALQTVDLNEGDAAPEPTEAKLKREESKPRTSLMAFLRQMTSDSTEKTITPPEPEPTGAPQKGKEGSSKDKKSAAEMNKQKSNKQEAKEPAQCTEQATVDTNSLQNGDKLQKRPEKRQQSLGGFFKGLGPKRMLDAQVQTDPVSIGPVGKSKYTGKCVFSHVKKKWPFQEWSY

SEQ ID NO: 19429 - protein, 378 aa, Artificial Sequence; identical to SEQ ID NO: 19428
  Synthetic polypeptide

SEQ ID NO: 19430 - protein, 15 aa, Artificial Sequence
  Synthetic polypeptide
ANETSFLYKLPRIRT

SEQ ID NO: 19431 - protein, 15 aa, Artificial Sequence
  Synthetic polypeptide
ANETSFLYKLPRIRT

SEQ ID NO: 19432 - protein, 15 aa, Artificial Sequence
  Synthetic polypeptide
ANETSFLYKLPRIRT

SEQ ID NO: 19433 - protein, 15 aa, Artificial Sequence
  Synthetic polypeptide
ANETSFLYKLPRIRT

SEQ ID NO: 19434 - protein, 22 aa, Artificial Sequence
  Synthetic polypeptide
RLQNCEPMKPLFFINYPESGHS

SEQ ID NO: 19435 - protein, 22 aa, Artificial Sequence
  Synthetic polypeptide
RLQNCEPMKPLFFINYPESGHS

SEQ ID NO: 19436 - protein, 22 aa, Artificial Sequence
  Synthetic polypeptide
RLQNCEPMKPLFFINYPESGHS

SEQ ID NO: 19437 - protein, 22 aa, Artificial Sequence
  Synthetic polypeptide
RLQNCEPMKPLFFINYPESGHS

SEQ ID NO: 19438 - protein, 270 aa, Artificial Sequence
  Synthetic polypeptide
ITQNQDIVDGKEKEGQELGTADCSVPGDPEGLETAKDDSQAAAIAENNNSIMSFFKTLVSPNKAETKKDPEDTGAEKSPTTSADLKSDKANFTSQETQGAGKNSKGCNPSGHTQSVTTPEPAKEGTKEKSGPTSLPLGKLFWKKSVKEDSVPTGAEENTSDSTEKTITPPEPEPTGAPQKGKEGSSKDKKSAAEMNKQKSNKQEAKEPAQCTEQATVDTNSLQNGDKLQKRPEKRQQSLGGFFKGLGPKRMLDAQVQTDPVSIGPVGKSK

SEQ ID NO: 19439 - protein, 348 aa, Artificial Sequence
  Synthetic polypeptide
ITQNQDIVDGKEKEGQELGTADCSVPGDPEGLETAKDDSQAAAIAENNNSIMSFFKTLVSPNKAETKKDPEDTGAEKSPTTSADLKSDKANFTSQETQGAGKNSKGCNPSGHTQSVTTPEPAKEGTKEKSGPTSLPLGKLFWKKSVKEDSVPTGAEENVVCESPVEIIKSKEVESALQTVDLNEGDAAPEPTEAKLKREESKPRTSLMAFLRQMSVKGDGGITHSEEINGKDSSCQTSDSTEKTITPPEPEPTGAPQKGKEGSSKDKKSAAEMNKQKSNKQEAKEPAQCTEQATVDTNSLQNGDKLQKRPEKRQQSLGGFFKGLGPKRMLDAQVQTDPVSIGPVGKSK

SEQ ID NO: 19440 - protein, 310 aa, Artificial Sequence
  Synthetic polypeptide
EVPFTSCHDSEASPAMWNLEHDKEFFHPRYHHREFRFDLSKIPEGEAVTAAEFRIYKDYIRERFDNETFRISVYQVLQEHLGRESDLFLLDSRTLWASEEGWLVFDITATSNHWVVNPRHNLGLQLSVETLDGQSINPKLAGLIGRHGPQNKQPFMVAFFKATEVHFRSIRSTGSKQRSQNRSKTPKNQEALRMANVAENSSSDQRQACKKHELYVSFRDLGWQDWIIAPEGYAAYYCEGECAFPLNSYMNATNHAIVQTLVHFINPETVPKPCCAPTQLNAISVLYFDDSSNVILKKYRNMVVRACGCH

SEQ ID NO: 19441 - protein, 163 aa, Artificial Sequence
  Synthetic polypeptide
WFDQGFPLLHLPHFLLLLSCKKCLSPLAMILRPLQPCGTWNMTRNSSTHATTIESSGLIFPRSQKGKLSRQPNSGSTRTTSGNASTMRRSGSAFIRCSRSTWAGNRISSCSTAVPSGPRRRAGWCLTSQPPATTGWSIRGTTWACSSRWRRWMGRASTPSWRA

SEQ ID NO: 19442 - protein, 163 aa, Artificial Sequence; identical to SEQ ID NO: 19441
  Synthetic polypeptide

SEQ ID NO: 19443 - protein, 10 aa, Artificial Sequence
  Synthetic polypeptide
GLSSHVELGT

SEQ ID NO: 19444 - protein, 10 aa, Artificial Sequence
  Synthetic polypeptide
GLSSHVELGT

SEQ ID NO: 19445 - protein, 10 aa, Artificial Sequence
  Synthetic polypeptide
GLSSHVELGT

SEQ ID NO: 19446 - protein, 10 aa, Artificial Sequence
  Synthetic polypeptide
GLSSHVELGT

SEQ ID NO: 19447 - protein, 244 aa, Artificial Sequence
  Synthetic polypeptide
EVPFTSCHDSEASPAMWNLEHDKEFFHPRYHHREFRFDLSKIPEGEAVTAAEFRIYKDYIRERFDNETFRISVYQVLQEHLGRESDLFLLDSRTLWASEEGWLVFDITATSNHWVVNPRHNLGLQLSVETLDENSSSDQRQACKKHELYVSFRDLGWQDWIIAPEGYAAYYCEGECAFPLNSYMNATNHAIVQTLVHFINPETVPKPCCAPTQLNAISVLYFDDSSNVILKKYRNMVVRACGCH

SEQ ID NO: 19448 - protein, 200 aa, Artificial Sequence
  Synthetic polypeptide
WFDQGFPLLHLPHFLLLLSCKKCLSPLAMILRPLQPCGTWNMTRNSSTHATTIESSGLIFPRSQKGKLSRQPNSGSTRTTSGNASTMRRSGSAFIRCSRSTWAGNRISSCSTAVPSGPRRRAGWCLTSQPPATTGWSIRGTTWACSSRWRRWMRTAAATRGRPVRSTSCMSASETWAGRTGSSRLKATPPTTVRGSVPSL

SEQ ID NO: 19449 - protein, 291 aa, Artificial Sequence
  Synthetic polypeptide
EVPFTSCHDSEASPAMWNLEHDKEFFHPRYHHREFRFDLSKIPEGEAVTAAEFRIYKDYIRERFDNETFRISVYQVLQEHLGRESDLFLLDSRTLWASEEGWLVFDITATSNHWVVNPRHNLGLQLSVETLDGQSINPKLAGLIGRHGPQNKQPFMVAFFKATEVHFRSIRSTGSKQRSQNRSKTPKNQEALRMANVAENSSSDQRQACKKHELYVSFRDLGWQDWIIAPEGYAAYYCEGECAFPLNSYMNATNHAIVQTLVGVTPSWGVVTWAGQAAGPPDPAASKLGPE

SEQ ID NO: 19450 - protein, 290 aa, Artificial Sequence
  Synthetic polypeptide
EVPFTSCHDSEASPAMWNLEHDKEFFHPRYHHREFRFDLSKIPEGEAVTAAEFRIYKDYIRERFDNETFRISVYQVLQEHLGSTGTCCMPCLRASTRTNQTRVPALWKLTFQQRRGHGRESDLFLLDSRTLWASEEGWLVFDITATSNHWVVNPRHNLGLQLSVETLDGQSINPKLAGLIGRHGPQNKQPFMVAFFKATEVHFRSIRSTGSKQRSQNRSKTPKNQEALRMANVAENSSSDQRQACKKHELYVSFRDLGWQDWIIAPEGYAAYYCEGECAFPLNSYMNATN

SEQ ID NO: 19451 - protein, 112 aa, Artificial Sequence
  Synthetic polypeptide
WFDQGFPLLHLPHFLLLLSCKKCLSPLAMILRPLQPCGTWNMTRNSSTHATTIESSGLIFPRSQKGKLSRQPNSGSTRTTSGNASTMRRSGSAFIRCSRSTWAAQVPAACHA

SEQ ID NO: 19452 - protein, 40 aa, Artificial Sequence
  Synthetic polypeptide
SAWPLGPAEADPALHLPTSHRAAQRGDPSRPCPVAVLALH

SEQ ID NO: 19453 - protein, 40 aa, Artificial Sequence; identical to SEQ ID NO: 19452
  Synthetic polypeptide

SEQ ID NO: 19454 - protein, 109 aa, Artificial Sequence
  Synthetic polypeptide
VLGLWGLQRLTPHYIYPPAIVQPSVVIPAAPVPSLSSPYIEYTPASPAYAQYPPATYDQYPYAASPATAASFVGYSYPAAVPQALSAAAPAGTTFVQYQAPQLQPDRMQ

SEQ ID NO: 19455 - protein, 109 aa, Artificial Sequence; identical to SEQ ID NO: 19454
  Synthetic polypeptide

SEQ ID NO: 19456 - protein, 9 aa, Artificial Sequence
  Synthetic polypeptide
CLASGACRG

SEQ ID NO: 19457 - protein, 9 aa, Artificial Sequence
  Synthetic polypeptide
CLASGACRG

SEQ ID NO: 19458 - protein, 9 aa, Artificial Sequence
  Synthetic polypeptide
CLASGACRG

SEQ ID NO: 19459 - protein, 10 aa, Artificial Sequence
  Synthetic polypeptide
SAWPLGPAEA

SEQ ID NO: 19460 - protein, 10 aa, Artificial Sequence
  Synthetic polypeptide
VLGLWGLQRL

SEQ ID NO: 19461 - protein, 268 aa, Artificial Sequence
  Synthetic polypeptide
GEECIGCWEKLSKCLAHTELEFVQIIIIVVVMMVMVVVITCLLSHYKLSARSFISRHSQGRRREDALSSEGCLWPSESTVSGNGIPEPQVYAPPRPTDRLAVPPFAQRERFHRFQPTYPYLQHEIDLPPTISLSDGEEPPPYQGPCTLQLRDPEQQLELNRESVRAPPNRTIFDSDLMDSARLGGPCPPSSNSGISATCYGSGGRMEGPPPTYSEVIGHYPGSSFQHQQSSGPPSLLEGTRLHHTHIAPLESAAIWSKEKDKQKGHPL

SEQ ID NO: 19462 - protein, 268 aa, Artificial Sequence; identical to SEQ ID NO: 19461
  Synthetic polypeptide

SEQ ID NO: 19463 - protein, 40 aa, Artificial Sequence
  Synthetic polypeptide
HRQFLARGAEVRSASGVGRSSANASHTRSWSLFRSSSSWW

SEQ ID NO: 19464 - protein, 40 aa, Artificial Sequence; identical to SEQ ID NO: 19463
  Synthetic polypeptide

SEQ ID NO: 19465 - protein, 40 aa, Artificial Sequence; identical to SEQ ID NO: 19463
  Synthetic polypeptide

SEQ ID NO: 19466 - protein, 40 aa, Artificial Sequence; identical to SEQ ID NO: 19463
  Synthetic polypeptide

SEQ ID NO: 19467 - protein, 173 aa, Artificial Sequence
  Synthetic polypeptide
GVHRVLGEAQQMPRTHGAGVCSDHHHRGGDDGDGGGDHVPAEPLQAVCTVLHQPAQPGAEERRCPVLRRMPVALGEHSVRQRNPRAAGLRPASAHRPPGRAALRPAGALPPLPAHLSVPAARDRPATHHLAVRRGGAPTLPGPLHPPASGPRAAAGTEPGVGARTPKQNHLRQ

SEQ ID NO: 19468 - protein, 173 aa, Artificial Sequence; identical to SEQ ID NO: 19467
  Synthetic polypeptide

SEQ ID NO: 19469 - protein, 173 aa, Artificial Sequence; identical to SEQ ID NO: 19467
  Synthetic polypeptide

SEQ ID NO: 19470 - protein, 217 aa, Artificial Sequence
  Synthetic polypeptide
GEECIGCWEKLSKCLAHTELEFVQIIIIVVVMMVMVVVITCLLSHYKLSARSFISRHSQGRRREDALSSEGCLWPSESTVSGNGIPEPQVYAPPRPTDRLAVPPFAQRERFHRFQPTYPYLQHEIDLPPTISLSDGEEPPPYQGPCTLQLRDPEQQLELNRESVRAPPNRTIFDSDLMDSARLGGPCPPSSNSGISATCYGSGGRMEGPPPTYSEVI

SEQ ID NO: 19471 - protein, 151 aa, Artificial Sequence
  Synthetic polypeptide
GEECIGCWEKLSKCLAHTELEFVQIIIIVVVMMVMVVVITCLLSHYKLSARSFISRHSQGRRREDALSSEGCLWPSESTVSGNGIPEPQVYAPPRPTDRLAVPPFAQRERFHRFQPTYPYLQHEIDLPPTISLSDGEEPPPYQGPCTLQLR

SEQ ID NO: 19472 - protein, 149 aa, Artificial Sequence
  Synthetic polypeptide
GVHRVLGEAQQMPRTHGAGVCSDHHHRGGDDGDGGGDHVPAEPLQAVCTVLHQPAQPGAEERRCPVLRRMPVALGEHSVRQRNPRAAGLRPASAHRPPGRAALRPAGALPPLPAHLSVPAARDRPATHHLAVRRGGAPTLPGPLHPPAS

SEQ ID NO: 19473 - protein, 420 aa, Artificial Sequence
  Synthetic polypeptide
NTKISRAWWLAPVVLAIREAEAGELLEPGRRRPDRSSQGGSLPSEEKGHPQEESEESNVSMASLGEKRDHHSTHYRASEEEPEYGEEIKGYPGVQAPEDLEWERYRGRGSEEYRAPRPQSEESWDEEDKRNYPSLELDKMAHGYGEESEEERGLEPGKGRHHRGRGGEPRAYFMSDTREEKRFLGEGHHRVQENQMDKARRHPQGAWKELDRNYLNYGEEGAPGKWQQQGDLQDTKENREEARFQDKQYSSHHTAEKRKRLGELFNPYYDPLQWKSSHFERRDNMNDNFLEGEEENELTLNEKNFFPEYNYDWWEKKPFSEDVNWGYEKRNLARVPKLDLKRQYDRVAQLDQLLHYRKKSAEFPDFYDSEEPVSTHQEAENEKDRADQTVLTEDEKKELENLAAMDLELQKIAEKFSQRG

SEQ ID NO: 19474 - protein, 50 aa, Artificial Sequence
  Synthetic polypeptide
SWLSGRLRQENCLSPGGGGPTGPLKEGVFPLRKRDTPRRNLRSQTSAWPV

SEQ ID NO: 19475 - protein, 17 aa, Artificial Sequence
  Synthetic polypeptide
AREEEARQVLSRRESSL

SEQ ID NO: 19476 - protein, 17 aa, Artificial Sequence
  Synthetic polypeptide
AREEEARQVLSRRESSL

SEQ ID NO: 19477 - protein, 52 aa, Artificial Sequence
  Synthetic polypeptide
NTKISRAWWLAPVVLAIREAEAGELLEPGRRRPDRSSQGGSLPSEEKGHPQE

SEQ ID NO: 19478 - protein, 39 aa, Artificial Sequence
  Synthetic polypeptide
SWLSGRLRQENCLSPGGGGPTGPLKEGVFPLRKRDTPRR

SEQ ID NO: 19479 - protein, 67 aa, Artificial Sequence
  Synthetic polypeptide
ARGDPRVTRAKYFIRDEFLRISTASGDGRHYCYPHFTCAVDTENIRRVFNDCRDIIQRMHLRQYELL

SEQ ID NO: 19480 - protein, 67 aa, Artificial Sequence; identical to SEQ ID NO: 19479
  Synthetic polypeptide

SEQ ID NO: 19481 - protein, 67 aa, Artificial Sequence; identical to SEQ ID NO: 19479
  Synthetic polypeptide

SEQ ID NO: 19482 - protein, 67 aa, Artificial Sequence; identical to SEQ ID NO: 19479
  Synthetic polypeptide

SEQ ID NO: 19483 - protein, 67 aa, Artificial Sequence; identical to SEQ ID NO: 19479
  Synthetic polypeptide

SEQ ID NO: 19484 - protein, 67 aa, Artificial Sequence; identical to SEQ ID NO: 19479
  Synthetic polypeptide

SEQ ID NO: 19485 - protein, 67 aa, Artificial Sequence; identical to SEQ ID NO: 19479
  Synthetic polypeptide

SEQ ID NO: 19486 - protein, 6 aa, Artificial Sequence
  Synthetic polypeptide
PGGTHA

SEQ ID NO: 19487 - protein, 6 aa, Artificial Sequence
  Synthetic polypeptide
PGGTHA

SEQ ID NO: 19488 - protein, 6 aa, Artificial Sequence
  Synthetic polypeptide
PGGTHA

SEQ ID NO: 19489 - protein, 6 aa, Artificial Sequence
  Synthetic polypeptide
PGGTHA

SEQ ID NO: 19490 - protein, 6 aa, Artificial Sequence
  Synthetic polypeptide
PGGTHA

SEQ ID NO: 19491 - protein, 6 aa, Artificial Sequence
  Synthetic polypeptide
PGGTHA

SEQ ID NO: 19492 - protein, 6 aa, Artificial Sequence
  Synthetic polypeptide
PGGTHA

SEQ ID NO: 19493 - protein, 15 aa, Artificial Sequence
  Synthetic polypeptide
PGGPTRDPGQVLHSR

SEQ ID NO: 19494 - protein, 15 aa, Artificial Sequence
  Synthetic polypeptide
PGGPTRDPGQVLHSR

SEQ ID NO: 19495 - protein, 15 aa, Artificial Sequence
  Synthetic polypeptide
PGGPTRDPGQVLHSR

SEQ ID NO: 19496 - protein, 15 aa, Artificial Sequence
  Synthetic polypeptide
PGGPTRDPGQVLHSR

SEQ ID NO: 19497 - protein, 15 aa, Artificial Sequence
  Synthetic polypeptide
PGGPTRDPGQVLHSR

SEQ ID NO: 19498 - protein, 15 aa, Artificial Sequence
  Synthetic polypeptide
PGGPTRDPGQVLHSR

SEQ ID NO: 19499 - protein, 15 aa, Artificial Sequence
  Synthetic polypeptide
PGGPTRDPGQVLHSR

SEQ ID NO: 19500 - protein, 32 aa, Artificial Sequence
  Synthetic polypeptide
PSPSRPNSMSMPRLCGRMKECVPATNAPTSTS

SEQ ID NO: 19501 - protein, 32 aa, Artificial Sequence; identical to SEQ ID NO: 19500
  Synthetic polypeptide

SEQ ID NO: 19502 - protein, 32 aa, Artificial Sequence; identical to SEQ ID NO: 19500
  Synthetic polypeptide

SEQ ID NO: 19503 - protein, 32 aa, Artificial Sequence; identical to SEQ ID NO: 19500
  Synthetic polypeptide

SEQ ID NO: 19504 - protein, 32 aa, Artificial Sequence; identical to SEQ ID NO: 19500
  Synthetic polypeptide

SEQ ID NO: 19505 - protein, 32 aa, Artificial Sequence; identical to SEQ ID NO: 19500
  Synthetic polypeptide

SEQ ID NO: 19506 - protein, 32 aa, Artificial Sequence; identical to SEQ ID NO: 19500
  Synthetic polypeptide

SEQ ID NO: 19507 - protein, 32 aa, Artificial Sequence; identical to SEQ ID NO: 19500
  Synthetic polypeptide

SEQ ID NO: 19508 - protein, 32 aa, Artificial Sequence; identical to SEQ ID NO: 19500
  Synthetic polypeptide

SEQ ID NO: 19509 - protein, 32 aa, Artificial Sequence; identical to SEQ ID NO: 19500
  Synthetic polypeptide

SEQ ID NO: 19510 - protein, 32 aa, Artificial Sequence; identical to SEQ ID NO: 19500
  Synthetic polypeptide

SEQ ID NO: 19511 - protein, 8 aa, Artificial Sequence
  Synthetic polypeptide
PPLPARIL

SEQ ID NO: 19512 - protein, 8 aa, Artificial Sequence
  Synthetic polypeptide
PPLPARIL

SEQ ID NO: 19513 - protein, 8 aa, Artificial Sequence
  Synthetic polypeptide
PPLPARIL

SEQ ID NO: 19514 - protein, 8 aa, Artificial Sequence
  Synthetic polypeptide
PPLPARIL

SEQ ID NO: 19515 - protein, 8 aa, Artificial Sequence
  Synthetic polypeptide
PPLPARIL

SEQ ID NO: 19516 - protein, 8 aa, Artificial Sequence
  Synthetic polypeptide
PPLPARIL

SEQ ID NO: 19517 - protein, 8 aa, Artificial Sequence
  Synthetic polypeptide
PPLPARIL

SEQ ID NO: 19518 - protein, 8 aa, Artificial Sequence
  Synthetic polypeptide
PPLPARIL

SEQ ID NO: 19519 - protein, 8 aa, Artificial Sequence
  Synthetic polypeptide
PPLPARIL

SEQ ID NO: 19520 - protein, 8 aa, Artificial Sequence
  Synthetic polypeptide
PPLPARIL

SEQ ID NO: 19521 - protein, 8 aa, Artificial Sequence
  Synthetic polypeptide
PPLPARIL

SEQ ID NO: 19522 - protein, 255 aa, Artificial Sequence
  Synthetic polypeptide
LPFPPEFYEHAKALWEDEGVRACYERSNEYQLIDCAQYFLDKIDVIKQADYVPSDQDLLRCRVLTSGIFETKFQVDKVNFHMFDVGGQRDERRKWIQCFNDVTAIIFVVASSSYNMVIREDNQTNRLQEALNLFKSIWNNRWLRTISVILFLNKQDLLAEKVLAGKSKIEDYFPEFARYTTPEDATPEPGEDPRVTRAKYFIRDEFLRISTASGDGRHYCYPHFTCAVDTENIRRVFNDCRDIIQRMHLRQYELL

SEQ ID NO: 19523 - protein, 255 aa, Artificial Sequence; identical to SEQ ID NO: 19522
  Synthetic polypeptide

SEQ ID NO: 19524 - protein, 255 aa, Artificial Sequence; identical to SEQ ID NO: 19522
  Synthetic polypeptide

SEQ ID NO: 19525 - protein, 255 aa, Artificial Sequence; identical to SEQ ID NO: 19522
  Synthetic polypeptide

SEQ ID NO: 19526 - protein, 255 aa, Artificial Sequence; identical to SEQ ID NO: 19522
  Synthetic polypeptide

SEQ ID NO: 19527 - protein, 255 aa, Artificial Sequence; identical to SEQ ID NO: 19522
  Synthetic polypeptide

SEQ ID NO: 19528 - protein, 255 aa, Artificial Sequence; identical to SEQ ID NO: 19522
  Synthetic polypeptide

SEQ ID NO: 19529 - protein, 45 aa, Artificial Sequence
  Synthetic polypeptide
LPFPPEFYEHAKALWEDEGVRACYERSNEYQLIDCAQYFLDKIDV

SEQ ID NO: 19530 - protein, 37 aa, Artificial Sequence
  Synthetic polypeptide
LPFPPEFYEHAKALWEDEGVRACYERSNEYQLIDCAQ

SEQ ID NO: 19531 - protein, 80 aa, Artificial Sequence
  Synthetic polypeptide
LPFPPEFYEHAKALWEDEGVRACYERSNEYQLIDCAQYFLDKIDVIKQADYVPSDQDLLRCRVLTSGIFETKFQVDKVNF

SEQ ID NO: 19532 - protein, 40 aa, Artificial Sequence
  Synthetic polypeptide
LPFPPEFYEHAKALWEDEGVRACYERSNEYQLIDCAQYFL

SEQ ID NO: 19533 - protein, 81 aa, Artificial Sequence
  Synthetic polypeptide
AFWKLRAALWIVTATGAPAVFSGWSREAGVLQPWGTPLAMKTGPPFHLTSECPWDTHESPKPVYDDLSLIPSALWTHTGDG

SEQ ID NO: 19534 - protein, 81 aa, Artificial Sequence; identical to SEQ ID NO: 19533
  Synthetic polypeptide

SEQ ID NO: 19535 - protein, 81 aa, Artificial Sequence; identical to SEQ ID NO: 19533
  Synthetic polypeptide

SEQ ID NO: 19536 - protein, 81 aa, Artificial Sequence; identical to SEQ ID NO: 19533
  Synthetic polypeptide

SEQ ID NO: 19537 - protein, 81 aa, Artificial Sequence; identical to SEQ ID NO: 19533
  Synthetic polypeptide

SEQ ID NO: 19538 - protein, 81 aa, Artificial Sequence; identical to SEQ ID NO: 19533
  Synthetic polypeptide

SEQ ID NO: 19539 - protein, 81 aa, Artificial Sequence; identical to SEQ ID NO: 19533
  Synthetic polypeptide

SEQ ID NO: 19540 - protein, 33 aa, Artificial Sequence
  Synthetic polypeptide
ASSQVHCGHTQETAEPKTCRGRAGEKKYLETKE

SEQ ID NO: 19541 - protein, 33 aa, Artificial Sequence; identical to SEQ ID NO: 19540
  Synthetic polypeptide

SEQ ID NO: 19542 - protein, 33 aa, Artificial Sequence; identical to SEQ ID NO: 19540
  Synthetic polypeptide

SEQ ID NO: 19543 - protein, 33 aa, Artificial Sequence; identical to SEQ ID NO: 19540
  Synthetic polypeptide

SEQ ID NO: 19544 - protein, 33 aa, Artificial Sequence; identical to SEQ ID NO: 19540
  Synthetic polypeptide

SEQ ID NO: 19545 - protein, 33 aa, Artificial Sequence; identical to SEQ ID NO: 19540
  Synthetic polypeptide

SEQ ID NO: 19546 - protein, 33 aa, Artificial Sequence; identical to SEQ ID NO: 19540
  Synthetic polypeptide

SEQ ID NO: 19547 - protein, 130 aa, Artificial Sequence
  Synthetic polypeptide
PEPHPKCIVDTHRRRLSQRPAVEELERRNILKQRNDQTEQEERREIKQRLTRKLNQRPTVDELRDRKILIRFSDYVEVAKAQDYDRRADKPWTRLSAADKAAIRKELNEYKSNEMEVHASSKHLTRFHRP

SEQ ID NO: 19548 - protein, 130 aa, Artificial Sequence; identical to SEQ ID NO: 19547
  Synthetic polypeptide

SEQ ID NO: 19549 - protein, 130 aa, Artificial Sequence; identical to SEQ ID NO: 19547
  Synthetic polypeptide

SEQ ID NO: 19550 - protein, 130 aa, Artificial Sequence; identical to SEQ ID NO: 19547
  Synthetic polypeptide

SEQ ID NO: 19551 - protein, 130 aa, Artificial Sequence; identical to SEQ ID NO: 19547
  Synthetic polypeptide

SEQ ID NO: 19552 - protein, 130 aa, Artificial Sequence; identical to SEQ ID NO: 19547
  Synthetic polypeptide

SEQ ID NO: 19553 - protein, 130 aa, Artificial Sequence; identical to SEQ ID NO: 19547
  Synthetic polypeptide

SEQ ID NO: 19554 - protein, 47 aa, Artificial Sequence
  Synthetic polypeptide
AEEGMRRRRERTIKKGSEGKIAVKRNTLKSQERHKTLFSMKESRLQL

SEQ ID NO: 19555 - protein, 47 aa, Artificial Sequence; identical to SEQ ID NO: 19554
  Synthetic polypeptide

SEQ ID NO: 19556 - protein, 516 aa, Artificial Sequence
  Synthetic polypeptide
RGRNEEEEGENYQKGERGEDSSEEKHLEEPGETQNAFLNERKQASAIKKEELVARSETHAAGHSQEKTHSREKSSQESGEETGSQENHPQESKGQPRSQEESEEGEEDATSEVDKRRTRPRHHHGRSRPDRSSQGGSLPSEEKGHPQEESEESNVSMASLGEKRDHHSTHYRASEEEPEYGEEIKGYPGVQAPEDLEWERYRGRGSEEYRAPRPQSEESWDEEDKRNYPSLELDKMAHGYGEESEEERGLEPGKGRHHRGRGGEPRAYFMSDTREEKRFLGEGHHRVQENQMDKARRHPQGAWKELDRNYLNYGEEGAPGKWQQQGDLQDTKENREEARFQDKQYSSHHTAEKRKRLGELFNPYYDPLQWKSSHFERRDNMNDNFLEGEEENELTLNEKNFFPEYNYDWWEKKPFSEDVNWGYEKRNLARVPKLDLKRQYDRVAQLDQLLHYRKKSAEFPDFYDSEEPVSTHQEAENEKDRADQTVLTEDEKKELENLAAMDLELQKIAEKFSQRG

SEQ ID NO: 19557 - protein, 148 aa, Artificial Sequence
  Synthetic polypeptide
RGRNEEEEGENYQKGERGEDSSEEKHLEEPGETQNAFLNERKQASAIKKEELVARSETHAAGHSQEKTHSREKSSQESGEETGSQENHPQESKGQPRSQEESEEGEEDATSEVDKRRTRPRHHHGRSRPDRSSQGGSLPSEEKGHPQE

SEQ ID NO: 19558 - protein, 13 aa, Artificial Sequence
  Synthetic polypeptide
AEEGMSQTSAWPV

SEQ ID NO: 19559 - protein, 369 aa, Artificial Sequence
  Synthetic polypeptide
RGRNESNVSMASLGEKRDHHSTHYRASEEEPEYGEEIKGYPGVQAPEDLEWERYRGRGSEEYRAPRPQSEESWDEEDKRNYPSLELDKMAHGYGEESEEERGLEPGKGRHHRGRGGEPRAYFMSDTREEKRFLGEGHHRVQENQMDKARRHPQGAWKELDRNYLNYGEEGAPGKWQQQGDLQDTKENREEARFQDKQYSSHHTAEKRKRLGELFNPYYDPLQWKSSHFERRDNMNDNFLEGEEENELTLNEKNFFPEYNYDWWEKKPFSEDVNWGYEKRNLARVPKLDLKRQYDRVAQLDQLLHYRKKSAEFPDFYDSEEPVSTHQEAENEKDRADQTVLTEDEKKELENLAAMDLELQKIAEKFSQRG

SEQ ID NO: 19560 - protein, 41 aa, Artificial Sequence
  Synthetic polypeptide
AEEGMTWSGSAIGAEEVKNTGLQDLRVRRVGMRRTRETTPA

SEQ ID NO: 19561 - protein, 326 aa, Artificial Sequence
  Synthetic polypeptide
RGRNDLEWERYRGRGSEEYRAPRPQSEESWDEEDKRNYPSLELDKMAHGYGEESEEERGLEPGKGRHHRGRGGEPRAYFMSDTREEKRFLGEGHHRVQENQMDKARRHPQGAWKELDRNYLNYGEEGAPGKWQQQGDLQDTKENREEARFQDKQYSSHHTAEKRKRLGELFNPYYDPLQWKSSHFERRDNMNDNFLEGEEENELTLNEKNFFPEYNYDWWEKKPFSEDVNWGYEKRNLARVPKLDLKRQYDRVAQLDQLLHYRKKSAEFPDFYDSEEPVSTHQEAENEKDRADQTVLTEDEKKELENLAAMDLELQKIAEKFSQRG

SEQ ID NO: 19562 - protein, 33 aa, Artificial Sequence
  Synthetic polypeptide
ECGREAADGRLAYSLLLEGQDVRERGRRLDHLP

SEQ ID NO: 19563 - protein, 363 aa, Artificial Sequence
  Synthetic polypeptide
SVGARQQTDDSLIHFCWKDRTSGNVEDDLIIFPDDCEFKRVPQCPSGRVYVLKFKAGSKRLFFWMQEPKTDQDEEHCRKVNEYLNNPPMPGALGASGSSGHELSALGGEGGLQSLLGNMSHSQLMQLIGPAGLGGLGGLGALTGPGLASLLGSSGPPGSSSSSSSRSQSAAVTPSSTTSSTRATPAPSAPAAASATSPSPAPSSGNGASTAASPTQPIQLSDLQSILATMNVPAGPAGGQQVDLASVLTPEIMAPILANADVQERLLPYLPSGESLPQTADEIQNTLTSPQFQQALGMFSAALASGQLGPLMCQFGLPAEAVEAANKGDVEAFAKAMQNNAKPEQKEGDTKDKKDEEEDMSLD

SEQ ID NO: 19564 - protein, 28 aa, Artificial Sequence
  Synthetic polypeptide
VWARGSRRTTRLFTSAGRTGRPGTWKTT

SEQ ID NO: 19565 - protein, 32 aa, Artificial Sequence
  Synthetic polypeptide
ECGREADGRLAYSLLLEGQDVRERGRRLDHLP

SEQ ID NO: 19566 - protein, 362 aa, Artificial Sequence
  Synthetic polypeptide
SVGARQTDDSLIHFCWKDRTSGNVEDDLIIFPDDCEFKRVPQCPSGRVYVLKFKAGSKRLFFWMQEPKTDQDEEHCRKVNEYLNNPPMPGALGASGSSGHELSALGGEGGLQSLLGNMSHSQLMQLIGPAGLGGLGGLGALTGPGLASLLGSSGPPGSSSSSSSRSQSAAVTPSSTTSSTRATPAPSAPAAASATSPSPAPSSGNGASTAASPTQPIQLSDLQSILATMNVPAGPAGGQQVDLASVLTPEIMAPILANADVQERLLPYLPSGESLPQTADEIQNTLTSPQFQQALGMFSAALASGQLGPLMCQFGLPAEAVEAANKGDVEAFAKAMQNNAKPEQKEGDTKDKKDEEEDMSLD

SEQ ID NO: 19567 - protein, 27 aa, Artificial Sequence
  Synthetic polypeptide
VWARGRRTTRLFTSAGRTGRPGTWKTT

SEQ ID NO: 19568 - protein, 68 aa, Artificial Sequence
  Synthetic polypeptide
ECGREAAERPPEHPGHDERTSRASRRPASGPGQCADAGDNGSHPRQRGCPGAPASLLAIWGVAAADRG

SEQ ID NO: 19569 - protein, 150 aa, Artificial Sequence
  Synthetic polypeptide
SVGARQLSDLQSILATMNVPAGPAGGQQVDLASVLTPEIMAPILANADVQERLLPYLPSGESLPQTADEIQNTLTSPQFQQALGMFSAALASGQLGPLMCQFGLPAEAVEAANKGDVEAFAKAMQNNAKPEQKEGDTKDKKDEEEDMSLD

SEQ ID NO: 19570 - protein, 6 aa, Artificial Sequence
  Synthetic polypeptide
VWARGS

SEQ ID NO: 19571 - protein, 68 aa, Artificial Sequence
  Synthetic polypeptide
IGNSRSKQFITFKARAVLHSLVLGVLFFAIACFLYKPLSESSDGLETCLPSQSSAPDSATDSQLQSSV

SEQ ID NO: 19572 - protein, 68 aa, Artificial Sequence; identical to SEQ ID NO: 19571
  Synthetic polypeptide

SEQ ID NO: 19573 - protein, 68 aa, Artificial Sequence; identical to SEQ ID NO: 19571
  Synthetic polypeptide

SEQ ID NO: 19574 - protein, 19 aa, Artificial Sequence
  Synthetic polypeptide
PLKHAPFCTVWCWASSSLP

SEQ ID NO: 19575 - protein, 19 aa, Artificial Sequence
  Synthetic polypeptide
PLKHAPFCTVWCWASSSLP

SEQ ID NO: 19576 - protein, 19 aa, Artificial Sequence
  Synthetic polypeptide
PLKHAPFCTVWCWASSSLP

SEQ ID NO: 19577 - protein, 43 aa, Artificial Sequence
  Synthetic polypeptide
STRRSAQSGAGRPLLCHSLLLIQAPVGVFRWPGNLSAQPVLSP

SEQ ID NO: 19578 - protein, 43 aa, Artificial Sequence; identical to SEQ ID NO: 19577
  Synthetic polypeptide

SEQ ID NO: 19579 - protein, 43 aa, Artificial Sequence; identical to SEQ ID NO: 19577
  Synthetic polypeptide

SEQ ID NO: 19580 - protein, 13 aa, Artificial Sequence
  Synthetic polypeptide
SRQIQRDRKWTGI

SEQ ID NO: 19581 - protein, 70 aa, Artificial Sequence
  Synthetic polypeptide
NKPVTTGHTLRDSVNKAPRAVRFRETESGLEFESVFCGKTGRRLKLTRPDSLVTCPAQGSLQSSPSMEIK

SEQ ID NO: 19582 - protein, 29 aa, Artificial Sequence
  Synthetic polypeptide
TRHLEPSDSERQKVDWNLRAYFAVKLAEG

SEQ ID NO: 19583 - protein, 516 aa, Artificial Sequence
  Synthetic polypeptide
TSGSAWRFYATNLSRTDLHSTWQYYERTVTVPMYSSQTQTYGASRLIPPLNQLELLRNLKSKSGLAFRKDPPPEPSPSQKVSLKDRVFSSPRGVAAKGKGSPQAQTVRRSPSADQSLEDSPSKVPKSWSFGDRSRARQAFRIKGAASRQNSEEASLPGEDIVDDKSCPCEFVTEDLTPGLKVSIRAVCVMRFLVSKRKFKESLRPYDVMDVIEQYSAGHLDMLSRIKSLQSRVDQIVGRGPAITDKDRTKGPAEAELPEDPSMMGRLGKVEKQVLSMEKKLDFLVNIYMQRMGIPPTETEAYFGAKEPEPAPPYHSPEDSREHVDRHGCIVKIVRSSSSTGQKNFSAPPAAPPVQCPPSTSWQPQSHPRQGHGTSPVGDHGSLVRIPPPPAHERSLSAYGGGNRASMEFLRQEDTPGCRPPEGNLRDSDTSISIPSVDHEELERSFSGFSISQSKENLDALNSCYAAVAPCAKVRPYIAEGESDTDSDLCTPCGPPPRSATGEGPFGDVGWAGPRK

SEQ ID NO: 19584 - protein, 124 aa, Artificial Sequence
  Synthetic polypeptide
FIHTILLSGGAGAAPCYDADGPRGRHAQWREPDGEGRAACDALGRKCPGRGSPWSPVHPGGGQGLGDQEPGAPAERRGRPGDSTPPTSRAQTCTPRGSTTSERSPCPCTVRKLKPTGPPDLSPR

SEQ ID NO: 19585 - protein, 124 aa, Artificial Sequence; identical to SEQ ID NO: 19584
  Synthetic polypeptide

SEQ ID NO: 19586 - protein, 124 aa, Artificial Sequence; identical to SEQ ID NO: 19584
  Synthetic polypeptide

SEQ ID NO: 19587 - protein, 124 aa, Artificial Sequence; identical to SEQ ID NO: 19584
  Synthetic polypeptide

SEQ ID NO: 19588 - protein, 139 aa, Artificial Sequence
  Synthetic polypeptide
TECDLSIRSSYQEERALPLATTRMGRGDVTLSGGSQTGKAVQLAMPLAGNARGGEVRGAPYTLAVARAWGTRNQERLLNVGVGLEILRHQPLAHRPALHVAVLRANGHRAHVQFANSNLRGLQTYPPAEPAGAAEEPQE

SEQ ID NO: 19589 - protein, 139 aa, Artificial Sequence; identical to SEQ ID NO: 19588
  Synthetic polypeptide

SEQ ID NO: 19590 - protein, 139 aa, Artificial Sequence; identical to SEQ ID NO: 19588
  Synthetic polypeptide

SEQ ID NO: 19591 - protein, 139 aa, Artificial Sequence; identical to SEQ ID NO: 19588
  Synthetic polypeptide

SEQ ID NO: 19592 - protein, 534 aa, Artificial Sequence
  Synthetic polypeptide
TSGSAWRFYATNLSRTDLHSTWQYYERTVTVPMYSSQTQTYGASRLIPPLNQLELLRNLKSKSGLAFRKDPPPEPSPSKGSPCRGPLCGCCPGRSSQKVSLKDRVFSSPRGVAAKGKGSPQAQTVRRSPSADQSLEDSPSKVPKSWSFGDRSRARQAFRIKGAASRQNSEEASLPGEDIVDDKSCPCEFVTEDLTPGLKVSIRAVCVMRFLVSKRKFKESLRPYDVMDVIEQYSAGHLDMLSRIKSLQSRVDQIVGRGPAITDKDRTKGPAEAELPEDPSMMGRLGKVEKQVLSMEKKLDFLVNIYMQRMGIPPTETEAYFGAKEPEPAPPYHSPEDSREHVDRHGCIVKIVRSSSSTGQKNFSAPPAAPPVQCPPSTSWQPQSHPRQGHGTSPVGDHGSLVRIPPPPAHERSLSAYGGGNRASMEFLRQEDTPGCRPPEGNLRDSDTSISIPSVDHEELERSFSGFSISQSKENLDALNSCYAAVAPCAKVRPYIAEGESDTDSDLCTPCGPPPRSATGEGPFGDVGWAGPRK

SEQ ID NO: 19593 - protein, 542 aa, Artificial Sequence
  Synthetic polypeptide
TSGSAWRFYATNLSRTDLHSTWQYYERTVTVPMYRLIPPLNQLELLRNLKSKSGLAFRKDPPPEPSPSQKVSLKDRVFSSPRGVAAKGKGSPQAQTVRRSPSADQSLEDSPSKVPKSWSFGDRSRARQAFRIKGAASRQNSEEASLPGEDIVDDKSCPCEFVTEDLTPGLKVSIRAVCVMRFLVSKRKFKESLRPYDVMDVIEQYSAGHLDMLSRIKSLQTGIDMIVGPPPPSTPRHKKYPTKGPTAPPRESPQYSPRVDQIVGRGPAITDKDRTKGPAEAELPEDPSMMGRLGKVEKQVLSMEKKLDFLVNIYMQRMGIPPTETEAYFGAKEPEPAPPYHSPEDSREHVDRHGCIVKIVRSSSSTGQKNFSAPPAAPPVQCPPSTSWQPQSHPRQGHGTSPVGDHGSLVRIPPPPAHERSLSAYGGGNRASMEFLRQEDTPGCRPPEGNLRDSDTSISIPSVDHEELERSFSGFSISQSKENLDALNSCYAAVAPCAKVRPYIAEGESDTDSDLCTPCGPPPRSATGEGPFGDVGWAGPRK

SEQ ID NO: 19594 - protein, 114 aa, Artificial Sequence
  Synthetic polypeptide
FIHTILLSGGAGAAPCYDADGPRGRHAQWREPDGEGRAACDALGRKCPGRGSPWSPVHPGGGQGLGDQEPGAPAERRGRPGDSTPPTSRAQTCTPRGSTTSERSPCPCTDLSPR

SEQ ID NO: 19595 - protein, 114 aa, Artificial Sequence; identical to SEQ ID NO: 19594
  Synthetic polypeptide

SEQ ID NO: 19596 - protein, 114 aa, Artificial Sequence; identical to SEQ ID NO: 19594
  Synthetic polypeptide

SEQ ID NO: 19597 - protein, 129 aa, Artificial Sequence
  Synthetic polypeptide
TECDLSIRSSYQEERALPLATTRMGRGDVTLSGGSQTGKAVQLAMPLAGNARGGEVRGAPYTLAVARAWGTRNQERLLNVGVGLEILRHQPLAHRPALHVAVLRANGHRAHVQTYPPAEPAGAAEEPQE

SEQ ID NO: 19598 - protein, 129 aa, Artificial Sequence; identical to SEQ ID NO: 19597
  Synthetic polypeptide

SEQ ID NO: 19599 - protein, 129 aa, Artificial Sequence; identical to SEQ ID NO: 19597
  Synthetic polypeptide

SEQ ID NO: 19600 - protein, 534 aa, Artificial Sequence
  Synthetic polypeptide
TSGSAWRFYATNLSRTDLHSTWQYYERTVTVPMYSSQTQTYGASRLIPPLNQLELLRNLKSKSGLAFRKDPPPEPSPSKGSPCRGPLCGCCPGRSSQKVSLKDRVFSSPRGVAAKGKGSPQAQTVRRSPSADQSLEDSPSKVPKSWSFGDRSRARQAFRIKGAASRQNSEEASLPGEDIVDDKSCPCEFVTEDLTPGLKVSIRAVCVMRFLVSKRKFKESLRPYDVMDVIEQYSAGHLDMLSRIKSLQSQVDQIVGRGPAITDKDRTKGPAEAELPEDPSMMGRLGKVEKQVLSMEKKLDFLVNIYMQRMGIPPTETEAYFGAKEPEPAPPYHSPEDSREHVDRHGCIVKIVRSSSSTGQKNFSAPPAAPPVQCPPSTSWQPQSHPRQGHGTSPVGDHGSLVRIPPPPAHERSLSAYGGGNRASMEFLRQEDTPGCRPPEGNLRDSDTSISIPSVDHEELERSFSGFSISQSKENLDALNSCYAAVAPCAKVRPYIAEGESDTDSDLCTPCGPPPRSATGEGPFGDVGWAGPRK

SEQ ID NO: 19601 - protein, 506 aa, Artificial Sequence
  Synthetic polypeptide
TSGSAWRFYATNLSRTDLHSTWQYYERTVTVPMYRLIPPLNQLELLRNLKSKSGLAFRKDPPPEPSPSQKVSLKDRVFSSPRGVAAKGKGSPQAQTVRRSPSADQSLEDSPSKVPKSWSFGDRSRARQAFRIKGAASRQNSEEASLPGEDIVDDKSCPCEFVTEDLTPGLKVSIRAVCVMRFLVSKRKFKESLRPYDVMDVIEQYSAGHLDMLSRIKSLQSRVDQIVGRGPAITDKDRTKGPAEAELPEDPSMMGRLGKVEKQVLSMEKKLDFLVNIYMQRMGIPPTETEAYFGAKEPEPAPPYHSPEDSREHVDRHGCIVKIVRSSSSTGQKNFSAPPAAPPVQCPPSTSWQPQSHPRQGHGTSPVGDHGSLVRIPPPPAHERSLSAYGGGNRASMEFLRQEDTPGCRPPEGNLRDSDTSISIPSVDHEELERSFSGFSISQSKENLDALNSCYAAVAPCAKVRPYIAEGESDTDSDLCTPCGPPPRSATGEGPFGDVGWAGPRK

SEQ ID NO: 19602 - protein, 542 aa, Artificial Sequence
  Synthetic polypeptide
TSGSAWRFYATNLSRTDLHSTWQYYERTVTVPMYRLIPPLNQLELLRNLKSKSGLAFRKDPPPEPSPSQKVSLKDRVFSSPRGVAAKGKGSPQAQTVRRSPSADQSLEDSPSKVPKSWSFGDRSRARQAFRIKGAASRQNSEEASLPGEDIVDDKSCPCEFVTEDLTPGLKVSIRAVCVMRFLVSKRKFKESLRPYDVMDVIEQYSAGHLDMLSRIKSLQSRIDMIVGPPPPSTPRHKKYPTKGPTAPPRESPQYSPRVDQIVGRGPAITDKDRTKGPAEAELPEDPSMMGRLGKVEKQVLSMEKKLDFLVNIYMQRMGIPPTETEAYFGAKEPEPAPPYHSPEDSREHVDRHGCIVKIVRSSSSTGQKNFSAPPAAPPVQCPPSTSWQPQSHPRQGHGTSPVGDHGSLVRIPPPPAHERSLSAYGGGNRASMEFLRQEDTPGCRPPEGNLRDSDTSISIPSVDHEELERSFSGFSISQSKENLDALNSCYAAVAPCAKVRPYIAEGESDTDSDLCTPCGPPPRSATGEGPFGDVGWAGPRK

SEQ ID NO: 19603 - protein, 503 aa, Artificial Sequence
  Synthetic polypeptide
TSGSAWRFYATNLSRTDLHSTWQYYERTVTVPMYSSQTQTYGASRLIPPLNQLELLRNLKSKSGLAFRKDPPPEPSPSPRGVAAKGKGSPQAQTVRRSPSADQSLEDSPSKVPKSWSFGDRSRARQAFRIKGAASRQNSEASLPGEDIVDDKSCPCEFVTEDLTPGLKVSIRAVCVMRFLVSKRKFKESLRPYDVMDVIEQYSAGHLDMLSRIKSLQSRVDQIVGRGPAITDKDRTKGPAEAELPEDPSMMGRLGKVEKQVLSMEKKLDFLVNIYMQRMGIPPTETEAYFGAKEPEPAPPYHSPEDSREHVDRHGCIVKIVRSSSSTGQKNFSAPPAAPPVQCPPSTSWQPQSHPRQGHGTSPVGDHGSLVRIPPPPAHERSLSAYGGGNRASMEFLRQEDTPGCRPPEGNLRDSDTSISIPSVDHEELERSFSGFSISQSKENLDALNSCYAAVAPCAKVRPYIAEGESDTDSDLCTPCGPPPRSATGEGPFGDVGWAGPRK

SEQ ID NO: 19604 - protein, 55 aa, Artificial Sequence
  Synthetic polypeptide
TSGSAWRFYATNLSRTDLHSTWQYYERTVTVPMYRYRRRAPATKQLFHFLFSICS

SEQ ID NO: 19605 - protein, 130 aa, Artificial Sequence
  Synthetic polypeptide
FIHTILLSGGAGAAPCYDADGPRGRHAQWREPDGEGRAACDALGRKCPGRGSPWSPVHPGGGQGLGDQEPGAPAERRGRPGDSTPPTSRAQTCTPRGSTTSERSPCPCTGTAAGHLPPSNCFIFYFPFVL

SEQ ID NO: 19606 - protein, 134 aa, Artificial Sequence
  Synthetic polypeptide
TECDLSIRSSYQEERALPLATTRMGRGDVTLSGGSQTGKAVQLAMPLAGNARGGEVRGAPYTLAVARAWGTRNQERLLNVGVGLEILRHQPLAHRPALHVAVLRANGHRAHVQVPPPGTCHQATVSFFIFHLFL

SEQ ID NO: 19607 - protein, 583 aa, Artificial Sequence
  Synthetic polypeptide
GQSRWLTPVIPALWEAEAGGSLESEDVWLEAARLQPGDTAKAVVAQAVRHLPQSVRIYIRAAELETDIRAKKRVLRKALEHVPNSVRLWKAAVELEEPEDARIMLSRAVECCPTSVELWLALARLETYENARKVLNKARENIPTDRHIWITAAKLEEANGNTQMVEKIIDRAITSLRANGVEINREQWIQDAEECDRAGSVATCQAVMRAVIGIGIEEEDRKHTWMEDADSCVAHNALECARAIYAYALQVFPSKKSVWLRAAYFEKNHGTRESLEALLQRAVAHCPKAEVLWLMGAKSKWLAGDVPAARSILALAFQVFMKSVKLEWVQDNIRAAQDLCEEALRHYEDFPKLWMMKGQIEEQKEMMEKAREAYNQGLKKCPHSTPLWLLLSRLEEKIGQLTRARAILEKSRLKNPKNPGLWLESVRLEYRAGLKNIANTLMAKALQECPNSGILWSEAIFLEARPQRRTKSVDALKKCEHDPHVLLAVAKLFWSQRKITKAREWFHRTVKIDSDLGDAWAFFYKFELQHGTEEQQEEVRKRCESAEPRHGELWCAVSKDIANWQKKIGDILRLVAGRIKNTF

SEQ ID NO: 19608 - protein, 34 aa, Artificial Sequence
  Synthetic polypeptide
SQHFGRLRRVDHLRVKMSGWKQPGCSLGTQPRPW

SEQ ID NO: 19609 - protein, 34 aa, Artificial Sequence; identical to SEQ ID NO: 19608
  Synthetic polypeptide

SEQ ID NO: 19610 - protein, 623 aa, Artificial Sequence
  Synthetic polypeptide
GQSRWLTPVIPALWEAEAGGSLESEDVWLEAARLQPGDTAKAVVAQAVRHLPQSVRIYIRAAELETDIRAKKRVLRKALEHVPNSVRLWKAAVELEEPEDARIMLSRAVECCPTSVELWLALARLETYENARKVLNKARENIPTDRHIWITAAKLEEANGNTQMVEKIIDRAITSLRANGVEINREQWIQDAEECDRAGSVATCQAVMRAVIGIGIEEEDRKHTWMEDADSCVAHNALECARAIYAYALQVFPSKKSVWLRAAYFEKNHGTRESLEALLQRAVAHCPKAEVLWLMGAKSKWLAGDVPAARSILALAFQANPNSEEIWLAAVKLESENDEYERARRLLAKARSSAPTARVFMKSVKLEWVQDNIRAAQDLCEEALRHYEDFPKLWMMKGQIEEQKEMMEKAREAYNQGLKKCPHSTPLWLLLSRLEEKIGQLTRARAILEKSRLKNPKNPGLWLESVRLEYRAGLKNIANTLMAKALQECPNSGILWSEAIFLEARPQRRTKSVDALKKCEHDPHVLLAVAKLFWSQRKITKAREWFHRTVKIDSDLGDAWAFFYKFELQHGTEEQQEEVRKRCESAEPRHGELWCAVSKDIANWQKKIGDILRLVAGRIKNTF

SEQ ID NO: 19611 - protein, 29 aa, Artificial Sequence
  Synthetic polypeptide
QVPIIPAIRVKMSGWKQPGCSLGTQPRPW

SEQ ID NO: 19612 - protein, 29 aa, Artificial Sequence
  Synthetic polypeptide
QVPIIPAIRVKMSGWKQPGCSLGTQPRPW

SEQ ID NO: 19613 - protein, 5 aa, Artificial Sequence
  Synthetic polypeptide
SQLFE

SEQ ID NO: 19614 - protein, 5 aa, Artificial Sequence
  Synthetic polypeptide
SQLFE

SEQ ID NO: 19615 - protein, 573 aa, Artificial Sequence
  Synthetic polypeptide
PGVVTGAHNPSYSSEDVWLEAARLQPGDTAKAVVAQAVRHLPQSVRIYIRAAELETDIRAKKRVLRKALEHVPNSVRLWKAAVELEEPEDARIMLSRAVECCPTSVELWLALARLETYENARKVLNKARENIPTDRHIWITAAKLEEANGNTQMVEKIIDRAITSLRANGVEINREQWIQDAEECDRAGSVATCQAVMRAVIGIGIEEEDRKHTWMEDADSCVAHNALECARAIYAYALQVFPSKKSVWLRAAYFEKNHGTRESLEALLQRAVAHCPKAEVLWLMGAKSKWLAGDVPAARSILALAFQVFMKSVKLEWVQDNIRAAQDLCEEALRHYEDFPKLWMMKGQIEEQKEMMEKAREAYNQGLKKCPHSTPLWLLLSRLEEKIGQLTRARAILEKSRLKNPKNPGLWLESVRLEYRAGLKNIANTLMAKALQECPNSGILWSEAIFLEARPQRRTKSVDALKKCEHDPHVLLAVAKLFWSQRKITKAREWFHRTVKIDSDLGDAWAFFYKFELQHGTEEQQEEVRKRCESAEPRHGELWCAVSKDIANWQKKIGDILRLVAGRIKNTF

SEQ ID NO: 19616 - protein, 613 aa, Artificial Sequence
  Synthetic polypeptide
PGVVTGAHNPSYSSEDVWLEAARLQPGDTAKAVVAQAVRHLPQSVRIYIRAAELETDIRAKKRVLRKALEHVPNSVRLWKAAVELEEPEDARIMLSRAVECCPTSVELWLALARLETYENARKVLNKARENIPTDRHIWITAAKLEEANGNTQMVEKIIDRAITSLRANGVEINREQWIQDAEECDRAGSVATCQAVMRAVIGIGIEEEDRKHTWMEDADSCVAHNALECARAIYAYALQVFPSKKSVWLRAAYFEKNHGTRESLEALLQRAVAHCPKAEVLWLMGAKSKWLAGDVPAARSILALAFQANPNSEEIWLAAVKLESENDEYERARRLLAKARSSAPTARVFMKSVKLEWVQDNIRAAQDLCEEALRHYEDFPKLWMMKGQIEEQKEMMEKAREAYNQGLKKCPHSTPLWLLLSRLEEKIGQLTRARAILEKSRLKNPKNPGLWLESVRLEYRAGLKNIANTLMAKALQECPNSGILWSEAIFLEARPQRRTKSVDALKKCEHDPHVLLAVAKLFWSQRKITKAREWFHRTVKIDSDLGDAWAFFYKFELQHGTEEQQEEVRKRCESAEPRHGELWCAVSKDIANWQKKIGDILRLVAGRIKNTF

SEQ ID NO: 19617 - protein, 33 aa, Artificial Sequence
  Synthetic polypeptide
AWWCMSVLLGRLRMPRNVTGLGVWPPARPSCVP

SEQ ID NO: 19618 - protein, 33 aa, Artificial Sequence; identical to SEQ ID NO: 19617
  Synthetic polypeptide

SEQ ID NO: 19619 - protein, 418 aa, Artificial Sequence
  Synthetic polypeptide
GDPVSMKHNVPLSMVVHVCATREAEDAEECDRAGSVATCQAVMRAVIGIGIEEEDRKHTWMEDADSCVAHNALECARAIYAYALQVFPSKKSVWLRAAYFEKNHGTRESLEALLQRAVAHCPKAEVLWLMGAKSKWLAGDVPAARSILALAFQVFMKSVKLEWVQDNIRAAQDLCEEALRHYEDFPKLWMMKGQIEEQKEMMEKAREAYNQGLKKCPHSTPLWLLLSRLEEKIGQLTRARAILEKSRLKNPKNPGLWLESVRLEYRAGLKNIANTLMAKALQECPNSGILWSEAIFLEARPQRRTKSVDALKKCEHDPHVLLAVAKLFWSQRKITKAREWFHRTVKIDSDLGDAWAFFYKFELQHGTEEQQEEVRKRCESAEPRHGELWCAVSKDIANWQKKIGDILRLVAGRIKNTF

SEQ ID NO: 19620 - protein, 458 aa, Artificial Sequence
  Synthetic polypeptide
GDPVSMKHNVPLSMVVHVCATREAEDAEECDRAGSVATCQAVMRAVIGIGIEEEDRKHTWMEDADSCVAHNALECARAIYAYALQVFPSKKSVWLRAAYFEKNHGTRESLEALLQRAVAHCPKAEVLWLMGAKSKWLAGDVPAARSILALAFQANPNSEEIWLAAVKLESENDEYERARRLLAKARSSAPTARVFMKSVKLEWVQDNIRAAQDLCEEALRHYEDFPKLWMMKGQIEEQKEMMEKAREAYNQGLKKCPHSTPLWLLLSRLEEKIGQLTRARAILEKSRLKNPKNPGLWLESVRLEYRAGLKNIANTLMAKALQECPNSGILWSEAIFLEARPQRRTKSVDALKKCEHDPHVLLAVAKLFWSQRKITKAREWFHRTVKIDSDLGDAWAFFYKFELQHGTEEQQEEVRKRCESAEPRHGELWCAVSKDIANWQKKIGDILRLVAGRIKNTF

SEQ ID NO: 19621 - protein, 59 aa, Artificial Sequence
  Synthetic polypeptide
FRDLGRTQTACPPSMSSGSKGPREVTTSTPLGAATATRPTSNCSERPSPPSLSSPLSQT

SEQ ID NO: 19622 - protein, 32 aa, Artificial Sequence
  Synthetic polypeptide
TRIRPLTSSVILGGPRQRAPHRCPLDQRGPGR

SEQ ID NO: 19623 - protein, 32 aa, Artificial Sequence; identical to SEQ ID NO: 19622
  Synthetic polypeptide

SEQ ID NO: 19624 - protein, 69 aa, Artificial Sequence
  Synthetic polypeptide
SWEDPDSVPPIDVLWIKGAQGGDYFYSFGGCHRYAAYQQLQRETIPAKLVQSTLSDLRVYLGASTPDLQ

SEQ ID NO: 19625 - protein, 25 aa, Artificial Sequence
  Synthetic polypeptide
FRDLGRTQTACPPSMSSGSKGPREV

SEQ ID NO: 19626 - protein, 22 aa, Artificial Sequence
  Synthetic polypeptide
SWEDPDSVPPIDVLWIKGAQGG

SEQ ID NO: 19627 - protein, 1057 aa, Artificial Sequence
  Synthetic polypeptide
GAPLPSRDPVWEEWTNEVFSLATNLLAQNMSRDAFLEKAYTKLKLQVTPEGRIPLKNIYRLFSADRKRVETALEACSLPSSRNDSIPQEDFTPEVYRVFLNNLCPRPEIDNIFSEFGAKSKPYLTVDQMMDFINLKQRDPRLNEILYPPLKQEQVQVLIEKYEPNNSLARKGQISVDGFMRYLSGEENGVVSPEKLDLNEDMSQPLSHYFINSSHNTYLTAGQLAGNSSVEMYRQVLLSGCRCVELDCWKGRTAEEEPVITHGFTMTTEISFKEVIEAIAECAFKTSPFPILLSFENHVDSPKQQAKMAEYCRLIFGDALLMEPLEKYPLESGVPLPSPMDLMYKILVKNKKKSHKSSEGSGKKKLSEQASNTYSDSSSMFEPSSPGAGEADTESDDDDDDDDCKKSSMDEGTAGSEAMATEEMSNLVNYIQPVKFESFEISKKRNKSFEMSSFVETKGLEQLTKSPVEFVEYNKMQLSRIYPKGTRVDSSNYMPQLFWNAGCQMVALNFQTMDLAMQINMGMYEYNGKSGYRLKPEFMRRPDKHFDPFTEGIVDGIVANTLSVKIISGQFLSDKKVGTYVEVDMFGLPVDTRRKAFKTKTSQGNAVNPVWEEEPIVFKKVVLPTLACLRIAVYEEGGKFIGHRILPVQAIRPGYHYICLRNERNQPLTLPAVFVYIEVKDYVPDTYADVIEALSNPIRYVNLMEQRAKQLAALTLEDEEEVKKEADPGETPSEAPSEARTTPAENGVNHTTTLTPKPPSQALHSQPAPGSVKAPAKTEDLIQSVLTEVEAQTIEELKQQKSFVKLQKKHYKEMKDLVKRHHKKTTDLIKEHTTKYNEIQNDYLRRRAALEKSAKKDSKKKSEPSSPDHGSSTIEQDLAALDAEMTQKLIDLKDKQQQQLLNLRQEQYYSEKYQKREHIKLLIQKLTDVAEECQNNQLKKLKEICEKEKKELKKKMDKKRQEKITEAKSKDKSQMEEEKTEMIRSYIQEVVQYIKRLEEAQSKRQEKLVEKHKEIRQQILDEKPKGEGSSSFLSETCHEDPSVSPNFTPPNPQALKW

SEQ ID NO: 19628 - protein, 1057 aa, Artificial Sequence; identical to SEQ ID NO: 19627
  Synthetic polypeptide

SEQ ID NO: 19629 - protein, 87 aa, Artificial Sequence
  Synthetic polypeptide
DVGSASAPPPHLGCEERLCPAATPSGRNGQMRFSVWQQTCWPKTCPGMHFWKKPILNLSCKSLQKGVFLSKTYIACFQQIGSELKLL

SEQ ID NO: 19630 - protein, 87 aa, Artificial Sequence; identical to SEQ ID NO: 19629
  Synthetic polypeptide

SEQ ID NO: 19631 - protein, 87 aa, Artificial Sequence; identical to SEQ ID NO: 19629
  Synthetic polypeptide

SEQ ID NO: 19632 - protein, 87 aa, Artificial Sequence; identical to SEQ ID NO: 19629
  Synthetic polypeptide

SEQ ID NO: 19633 - protein, 41 aa, Artificial Sequence
  Synthetic polypeptide
GASLPGHPSSEMWGAPLPRRPIWDVRSASAQPRPRLGGMDK

SEQ ID NO: 19634 - protein, 41 aa, Artificial Sequence; identical to SEQ ID NO: 19633
  Synthetic polypeptide

SEQ ID NO: 19635 - protein, 41 aa, Artificial Sequence; identical to SEQ ID NO: 19633
  Synthetic polypeptide

SEQ ID NO: 19636 - protein, 41 aa, Artificial Sequence; identical to SEQ ID NO: 19633
  Synthetic polypeptide

SEQ ID NO: 19637 - protein, 1100 aa, Artificial Sequence
  Synthetic polypeptide
GAPLPSRDPVWEEWTNEVFSLATNLLAQNMSRDAFLEKAYTKLKLQVTPEGRIPLKNIYRLFSADRKRVETALEACSLPSSRNDSIPQEDFTPEVYRVFLNNLCPRPEIDNIFSEFGAKSKPYLTVDQMMDFINLKQRDPRLNEILYPPLKQEQVQVLIEKYEPNNSLARKGQISVDGFMRYLSGEENGVVSPEKLDLNEDMSQPLSHYFINSSHNTYLTAGQLAGNSSVEMYRQVLLSGCRCVELDCWKGRTAEEEPVITHGFTMTTEISFKEVIEAIAECAFKTSPFPILLSFENHVDSPKQQAKMAEYCRLIFGDALLMEPLEKYPLESGVPLPSPMDLMYKILVKNKKKSHKSSEGSGKKKLSEQASNTYSDSSSMFEPSSPGAGEADTESDDDDDDDDCKKSSMDEGTAGSEAMATEEMSNLVNYIQPVKFESFEISKKRNKSFEMSSFVETKGLEQLTKSPVEFVEYNKMQLSRIYPKGTRVDSSNYMPQLFWNAGCQMVALNFQTMDLAMQINMGMYEYNGKSGYRLKPEFMRRPDKHFDPFTEGIVDGIVANTLSVKIISGQFLSDKKVGTYVEVDMFGLPVDTRRKAFKTKTSQGNAVNPVWEEEPIVFKKVVLPTLACLRIAVYEEGGKFIGHRILPVQAIRPGYHYICLRNERNQPLTLPAVFVYIEVKDYVPDTYADVIEALSNPIRYVNLMEQRAKQLAALTLEDEEEVKKEADPGETPSEAPSEARTTPAENGVNHTTTLTPKPPSQALHSQPAPGSVKAPAKTEDLIQSVLTEVEAQTIEELKQQKSFVKLQKKHYKEMKDLVKRHHKKTTDLIKEHTTKYNEIQNDYLRRRAALEKSAKKDSKKKSEPSSPDHGSSTIEQDLAALDAEMTQKLIDLKDKQQQQLLNLRQEQYYSEKYQKREHIKLLIQKLTDVAEECQNNQLKKLKEICEKEKKELKKKMDKKRQEKITEAKSKDKSQMEEEKTEMIRSYIQEVVQYIKRLEEAQSKRQEKLVEKHKEIRQQILDEKPKLQVELEQEYQDKFKRLPLEILEFVQEAMKGKISEDSNHGSAPLSLSSDPGKVNHKTPSSEELGGDIPGKEFDTPL

SEQ ID NO: 19638 - protein, 117 aa, Artificial Sequence
  Synthetic polypeptide
GAPLPSRDPVWEEWTNEVFSLATNLLAQNMSRDAFLEKAYTKLKLQVTPEGRIPLKNIYRLFSADRKRVETALEACSLPSSRVEKANEAAKSEQSCGKAPPKHFHLHFIKQNKMLEP

SEQ ID NO: 19639 - protein, 28 aa, Artificial Sequence
  Synthetic polypeptide
GAPLPSRDPVWEVRSVSARPPRLRRMDK

SEQ ID NO: 19640 - protein, 28 aa, Artificial Sequence
  Synthetic polypeptide
GAPLPSRDPVWEVRSVSARPPRLRRMDK

SEQ ID NO: 19641 - protein, 28 aa, Artificial Sequence
  Synthetic polypeptide
GAPLPSRDPVWEVRSVSARPPRLRRMDK

SEQ ID NO: 19642 - protein, 28 aa, Artificial Sequence
  Synthetic polypeptide
GAPLPSRDPVWEVRSVSARPPRLRRMDK

SEQ ID NO: 19643 - protein, 1046 aa, Artificial Sequence
  Synthetic polypeptide
EEWTNEVFSLATNLLAQNMSRDAFLEKAYTKLKLQVTPEGRIPLKNIYRLFSADRKRVETALEACSLPSSRNDSIPQEDFTPEVYRVFLNNLCPRPEIDNIFSEFGAKSKPYLTVDQMMDFINLKQRDPRLNEILYPPLKQEQVQVLIEKYEPNNSLARKGQISVDGFMRYLSGEENGVVSPEKLDLNEDMSQPLSHYFINSSHNTYLTAGQLAGNSSVEMYRQVLLSGCRCVELDCWKGRTAEEEPVITHGFTMTTEISFKEVIEAIAECAFKTSPFPILLSFENHVDSPKQQAKMAEYCRLIFGDALLMEPLEKYPLESGVPLPSPMDLMYKILVKNKKKSHKSSEGSGKKKLSEQASNTYSDSSSMFEPSSPGAGEADTESDDDDDDDDCKKSSMDEGTAGSEAMATEEMSNLVNYIQPVKFESFEISKKRNKSFEMSSFVETKGLEQLTKSPVEFVEYNKMQLSRIYPKGTRVDSSNYMPQLFWNAGCQMVALNFQTMDLAMQINMGMYEYNGKSGYRLKPEFMRRPDKHFDPFTEGIVDGIVANTLSVKIISGQFLSDKKVGTYVEVDMFGLPVDTRRKAFKTKTSQGNAVNPVWEEEPIVFKKVVLPTLACLRIAVYEEGGKFIGHRILPVQAIRPGYHYICLRNERNQPLTLPAVFVYIEVKDYVPDTYADVIEALSNPIRYVNLMEQRAKQLAALTLEDEEEVKKEADPGETPSEAPSEARTTPAENGVNHTTTLTPKPPSQALHSQPAPGSVKAPAKTEDLIQSVLTEVEAQTIEELKQQKSFVKLQKKHYKEMKDLVKRHHKKTTDLIKEHTTKYNEIQNDYLRRRAALEKSAKKDSKKKSEPSSPDHGSSTIEQDLAALDAEMTQKLIDLKDKQQQQLLNLRQEQYYSEKYQKREHIKLLIQKLTDVAEECQNNQLKKLKEICEKEKKELKKKMDKKRQEKITEAKSKDKSQMEEEKTEMIRSYIQEVVQYIKRLEEAQSKRQEKLVEKHKEIRQQILDEKPKGEGSSSFLSETCHEDPSVSPNFTPPNPQALKW

SEQ ID NO: 19644 - protein, 1046 aa, Artificial Sequence; identical to SEQ ID NO: 19643
  Synthetic polypeptide

SEQ ID NO: 19645 - protein, 110 aa, Artificial Sequence
  Synthetic polypeptide
GASLPGHPSSEMWGAPLPRRPIWDVRSASAQPRPRLGGEERLCPAAPSEKNGQMRFSVWQQTCWPKTCPGMHFWKKPILNLSCKSLQKGVFLSKTYIACFQQIGSELKLL

SEQ ID NO: 19646 - protein, 110 aa, Artificial Sequence; identical to SEQ ID NO: 19645
  Synthetic polypeptide

SEQ ID NO: 19647 - protein, 110 aa, Artificial Sequence; identical to SEQ ID NO: 19645
  Synthetic polypeptide

SEQ ID NO: 19648 - protein, 110 aa, Artificial Sequence; identical to SEQ ID NO: 19645
  Synthetic polypeptide

SEQ ID NO: 19649 - protein, 1089 aa, Artificial Sequence
  Synthetic polypeptide
EEWTNEVFSLATNLLAQNMSRDAFLEKAYTKLKLQVTPEGRIPLKNIYRLFSADRKRVETALEACSLPSSRNDSIPQEDFTPEVYRVFLNNLCPRPEIDNIFSEFGAKSKPYLTVDQMMDFINLKQRDPRLNEILYPPLKQEQVQVLIEKYEPNNSLARKGQISVDGFMRYLSGEENGVVSPEKLDLNEDMSQPLSHYFINSSHNTYLTAGQLAGNSSVEMYRQVLLSGCRCVELDCWKGRTAEEEPVITHGFTMTTEISFKEVIEAIAECAFKTSPFPILLSFENHVDSPKQQAKMAEYCRLIFGDALLMEPLEKYPLESGVPLPSPMDLMYKILVKNKKKSHKSSEGSGKKKLSEQASNTYSDSSSMFEPSSPGAGEADTESDDDDDDDDCKKSSMDEGTAGSEAMATEEMSNLVNYIQPVKFESFEISKKRNKSFEMSSFVETKGLEQLTKSPVEFVEYNKMQLSRIYPKGTRVDSSNYMPQLFWNAGCQMVALNFQTMDLAMQINMGMYEYNGKSGYRLKPEFMRRPDKHFDPFTEGIVDGIVANTLSVKIISGQFLSDKKVGTYVEVDMFGLPVDTRRKAFKTKTSQGNAVNPVWEEEPIVFKKVVLPTLACLRIAVYEEGGKFIGHRILPVQAIRPGYHYICLRNERNQPLTLPAVFVYIEVKDYVPDTYADVIEALSNPIRYVNLMEQRAKQLAALTLEDEEEVKKEADPGETPSEAPSEARTTPAENGVNHTTTLTPKPPSQALHSQPAPGSVKAPAKTEDLIQSVLTEVEAQTIEELKQQKSFVKLQKKHYKEMKDLVKRHHKKTTDLIKEHTTKYNEIQNDYLRRRAALEKSAKKDSKKKSEPSSPDHGSSTIEQDLAALDAEMTQKLIDLKDKQQQQLLNLRQEQYYSEKYQKREHIKLLIQKLTDVAEECQNNQLKKLKEICEKEKKELKKKMDKKRQEKITEAKSKDKSQMEEEKTEMIRSYIQEVVQYIKRLEEAQSKRQEKLVEKHKEIRQQILDEKPKLQVELEQEYQDKFKRLPLEILEFVQEAMKGKISEDSNHGSAPLSLSSDPGKVNHKTPSSEELGGDIPGKEFDTPL

SEQ ID NO: 19650 - protein, 106 aa, Artificial Sequence
  Synthetic polypeptide
EEWTNEVFSLATNLLAQNMSRDAFLEKAYTKLKLQVTPEGRIPLKNIYRLFSADRKRVETALEACSLPSSRVEKANEAAKSEQSCGKAPPKHFHLHFIKQNKMLEP

SEQ ID NO: 19651 - protein, 1046 aa, Artificial Sequence; identical to SEQ ID NO: 19643
  Synthetic polypeptide

SEQ ID NO: 19652 - protein, 1046 aa, Artificial Sequence; identical to SEQ ID NO: 19643
  Synthetic polypeptide

SEQ ID NO: 19653 - protein, 1089 aa, Artificial Sequence; identical to SEQ ID NO: 19649
  Synthetic polypeptide

SEQ ID NO: 19654 - protein, 106 aa, Artificial Sequence; identical to SEQ ID NO: 19650
  Synthetic polypeptide

SEQ ID NO: 19655 - protein, 98 aa, Artificial Sequence
  Synthetic polypeptide
GAPLPSRDPVWEVRSVSARPPRLRSEETLRPAAAPSEKNGQMRFSVWQQTCWPKTCPGMHFWKKPILNLSCKSLQKGVFLSKTYIACFQQIGSELKLL

SEQ ID NO: 19656 - protein, 98 aa, Artificial Sequence; identical to SEQ ID NO: 19655
  Synthetic polypeptide

SEQ ID NO: 19657 - protein, 98 aa, Artificial Sequence; identical to SEQ ID NO: 19655
  Synthetic polypeptide

SEQ ID NO: 19658 - protein, 98 aa, Artificial Sequence; identical to SEQ ID NO: 19655
  Synthetic polypeptide

SEQ ID NO: 19659 - protein, 18 aa, Artificial Sequence
  Synthetic polypeptide
EVRRPSARQPPRLRRMDK

SEQ ID NO: 19660 - protein, 18 aa, Artificial Sequence
  Synthetic polypeptide
EVRRPSARQPPRLRRMDK

SEQ ID NO: 19661 - protein, 18 aa, Artificial Sequence
  Synthetic polypeptide
EVRRPSARQPPRLRRMDK

SEQ ID NO: 19662 - protein, 18 aa, Artificial Sequence
  Synthetic polypeptide
EVRRPSARQPPRLRRMDK

SEQ ID NO: 19663 - protein, 1046 aa, Artificial Sequence; identical to SEQ ID NO: 19643
  Synthetic polypeptide

SEQ ID NO: 19664 - protein, 1046 aa, Artificial Sequence; identical to SEQ ID NO: 19643
  Synthetic polypeptide

SEQ ID NO: 19665 - protein, 1089 aa, Artificial Sequence; identical to SEQ ID NO: 19649
  Synthetic polypeptide

SEQ ID NO: 19666 - protein, 106 aa, Artificial Sequence; identical to SEQ ID NO: 19650
  Synthetic polypeptide

SEQ ID NO: 19667 - protein, 88 aa, Artificial Sequence
  Synthetic polypeptide
EVRRPSARQPPRLRSEEPLRLAAALSEKNGQMRFSVWQQTCWPKTCPGMHFWKKPILNLSCKSLQKGVFLSKTYIACFQQIGSELKLL

SEQ ID NO: 19668 - protein, 88 aa, Artificial Sequence; identical to SEQ ID NO: 19667
  Synthetic polypeptide

SEQ ID NO: 19669 - protein, 88 aa, Artificial Sequence; identical to SEQ ID NO: 19667
  Synthetic polypeptide

SEQ ID NO: 19670 - protein, 88 aa, Artificial Sequence; identical to SEQ ID NO: 19667
  Synthetic polypeptide

SEQ ID NO: 19671 - protein, 18 aa, Artificial Sequence
  Synthetic polypeptide
EVRSPSAWQLPCLRRMDK

SEQ ID NO: 19672 - protein, 18 aa, Artificial Sequence
  Synthetic polypeptide
EVRSPSAWQLPCLRRMDK

SEQ ID NO: 19673 - protein, 18 aa, Artificial Sequence
  Synthetic polypeptide
EVRSPSAWQLPCLRRMDK

SEQ ID NO: 19674 - protein, 18 aa, Artificial Sequence
  Synthetic polypeptide
EVRSPSAWQLPCLRRMDK

SEQ ID NO: 19675 - protein, 18 aa, Artificial Sequence
  Synthetic polypeptide
SRGFGPPICSEWLGILCV

SEQ ID NO: 19676 - protein, 18 aa, Artificial Sequence
  Synthetic polypeptide
SRGFGPPICSEWLGILCV

SEQ ID NO: 19677 - protein, 18 aa, Artificial Sequence
  Synthetic polypeptide
SRGFGPPICSEWLGILCV

SEQ ID NO: 19678 - protein, 18 aa, Artificial Sequence
  Synthetic polypeptide
SRGFGPPICSEWLGILCV

SEQ ID NO: 19679 - protein, 18 aa, Artificial Sequence
  Synthetic polypeptide
SRGFGPPICSEWLGILCV

SEQ ID NO: 19680 - protein, 18 aa, Artificial Sequence
  Synthetic polypeptide
SRGFGPPICSEWLGILCV

SEQ ID NO: 19681 - protein, 18 aa, Artificial Sequence
  Synthetic polypeptide
SRGFGPPICSEWLGILCV

SEQ ID NO: 19682 - protein, 18 aa, Artificial Sequence
  Synthetic polypeptide
SRGFGPPICSEWLGILCV

SEQ ID NO: 19683 - protein, 18 aa, Artificial Sequence
  Synthetic polypeptide
SRGFGPPICSEWLGILCV

SEQ ID NO: 19684 - protein, 18 aa, Artificial Sequence
  Synthetic polypeptide
SRGFGPPICSEWLGILCV

SEQ ID NO: 19685 - protein, 104 aa, Artificial Sequence
  Synthetic polypeptide
LQTFYRAGALGHQSVQNGWESFVFEPNCLFKVDEFGFFLTWRSEGKEGQVLECSLINSIRSGAIPKDPKILAALEAVGKSENDLEGRIVCVCSGTDLVNISFTY

SEQ ID NO: 19686 - protein, 40 aa, Artificial Sequence
  Synthetic polypeptide
DDSRLSIEQGLWATNLFRMAGNPLCLNPTASSKWMSLASF

SEQ ID NO: 19687 - protein, 40 aa, Artificial Sequence; identical to SEQ ID NO: 19686
  Synthetic polypeptide

SEQ ID NO: 19688 - protein, 40 aa, Artificial Sequence; identical to SEQ ID NO: 19686
  Synthetic polypeptide

SEQ ID NO: 19689 - protein, 40 aa, Artificial Sequence; identical to SEQ ID NO: 19686
  Synthetic polypeptide

SEQ ID NO: 19690 - protein, 40 aa, Artificial Sequence; identical to SEQ ID NO: 19686
  Synthetic polypeptide

SEQ ID NO: 19691 - protein, 40 aa, Artificial Sequence; identical to SEQ ID NO: 19686
  Synthetic polypeptide

SEQ ID NO: 19692 - protein, 40 aa, Artificial Sequence; identical to SEQ ID NO: 19686
  Synthetic polypeptide

SEQ ID NO: 19693 - protein, 40 aa, Artificial Sequence; identical to SEQ ID NO: 19686
  Synthetic polypeptide

SEQ ID NO: 19694 - protein, 40 aa, Artificial Sequence; identical to SEQ ID NO: 19686
  Synthetic polypeptide

SEQ ID NO: 19695 - protein, 40 aa, Artificial Sequence; identical to SEQ ID NO: 19686
  Synthetic polypeptide

SEQ ID NO: 19696 - protein, 101 aa, Artificial Sequence
  Synthetic polypeptide
LQTFYRAGALGHQSVQNGWESFVFEPNCLFKVDEFGFFLTWRSEGKEGQVLECSLINSIRSGAIPKDPKILAALEAVGKSENDLEGRIVCVCSGTDLVNIS

SEQ ID NO: 19697 - protein, 1185 aa, Artificial Sequence
  Synthetic polypeptide
LQTFYRAGALGHQSVQNGWESFVFEPNCLFKVDEFGFFLTWRSEGKEGQVLECSLINSIRSGAIPKDPKILAALEAVGKSENDLEGRIVCVCSGTDLVNISFTYMVAENPEVTKQWVEGLRSIIHNFRANNVSPMTCLKKHWMKLAFMTNTNGKIPVRSITRTFASGKTEKVIFQALKELGLPSGKNDEIEPTAFSYEKFYELTQKICPRTDIEDLFKKINGDKTDYLTVDQLVSFLNEHQRDPRLNEILFPFYDAKRAMQIIEMYEPDEDLKKKGLISSDGFCRYLMSDENAPVFLDRLELYQEMDHPLAHYFISSSHNTYLTGRQFGGKSSVEMYRQVLLAGCRCVELDCWDGKGEDQEPIITHGKAMCTDILFKDVIQAIKETAFVTSEYPVILSFENHCSKYQQYKMSKYCEDLFGDLLLKQALESHPLEPGRALPSPNDLKRKILIKNKRLKPEVEKKQLEALRSMMEAGESASPANILEDDNEEEIESADQEEEAHPEFKFGNELSADDLGHKEAVANSVKKGLVTVEDEQAWMASYKYVGATTNIHPYLSTMINYAQPVKFQGFHVAEERNIHYNMSSFNESVGLGYLKTHAIEFVNYNKRQMSRIYPKGGRVDSSNYMPQIFWNAGCQMVSLNYQTPDLAMQLNQGKFEYNGSCGYLLKPDFMRRPDRTFDPFSETPVDGVIAATCSVQVISGQFLSDKKIGTYVEVDMYGLPTDTIRKEFRTRMVMNNGLNPVYNEESFVFRKVILPDLAVLRIAVYDDNNKLIGQRILPLDGLQAGYRHISLRNEGNKPLSLPTIFCNIVLKTYVPDGFGDIVDALSDPKKFLSITEKRADQMRAMGIETSDIADVPSDTSKNDKKGKANTAKANVTPQSSSELRPTTTAALASGVEAKKGIELIPQVRIEDLKQMKAYLKHLKKQQKELNSLKKKHAKEHSTMQKLHCTQVDKIVAQYDKEKSTHEKILEKAMKKKGGSNCLEMKKETEIKIQTLTSDHKSKVKEIVAQHTKEWSEMINTHSAEEQEIRDLHLSQQCELLKKLLINAHEQQTQQLKLSHDRESKEMRAHQAKISMENSKAISQDKSIKNKAERERRVRELNSSNTKKFLEERKRLAMKQSKEMDQLKKVQLEHLEFLEKQNEQLLKSCHAVSQTQGEGDAADGEIGSRDGPQTSNSSMKLQNAN

SEQ ID NO: 19698 - protein, 1185 aa, Artificial Sequence; identical to SEQ ID NO: 19697
  Synthetic polypeptide

SEQ ID NO: 19699 - protein, 1178 aa, Artificial Sequence
  Synthetic polypeptide
LQTFYRAGALGHQSVQNGWESFVFEPNCLFKVDEFGFFLTWRSEGKEGQVLECSLINSIRSGAIPKDPKILAALEAVGKSENDLEGRIVCVCSGTDLVNISFTYMVAENPEVTKQWVEGLRSIIHNFRANNVSPMTCLKKHWMKLAFMTNTNGKIPVRSITRTFASGKTEKVIFQALKELGLPSGKNDEIEPTAFSYEKFYELTQKICPRTDIEDLFKKINGDKTDYLTVDQLVSFLNEHQRDPRLNEILFPFYDAKRAMQIIEMYEPDEDLKKKGLISSDGFCRYLMSDENAPVFLDRLELYQEMDHPLAHYFISSSHNTYLTGRQFGGKSSVEMYRQVLLAGCRCVELDCWDGKGEDQEPIITHGKAMCTDILFKDVIQAIKETAFVTSEYPVILSFENHCSKYQQYKMSKYCEDLFGDLLLKQALESHPLEPGRALPSPNDLKRKILIKNKRLKPEVEKKQLEALRSMMEAGESASPANILEDDNEEEIESADQEEEAHPEFKFGNELSADDLGHKEAVANSVKKASDDLEHENNKKGLVTVEDEQAWMASYKYVGATTNIHPYLSTMINYAQPVKFQGFHVAEERNIHYNMSSFNESVGLGYLKTHAIEFVNYNKRQMSRIYPKGGRVDSSNYMPQIFWNAGCQMVSLNYQTPDLAMQLNQGKFEYNGSCGYLLKPDFMRRPDRTFDPFSETPVDGVIAATCSVQVISGQFLSDKKIGTYVEVDMYGLPTDTIRKEFRTRMVMNNGLNPVYNEESFVFRKVILPDLAVLRIAVYDDNNKLIGQRILPLDGLQAGYRHISLRNEGNKPLSLPTIFCNIVLKTYVPDGFGDIVDALSDPKKFLSITEKRADQMRAMGIETSDIADVPSDTSKNDKKGKANTAKANVTPQSSSELRPTTTAALASGVEAKKGIELIPQVRIEDLKQMKAYLKHLKKQQKELNSLKKKHAKEHSTMQKLHCTQVDKIVAQYDKEKSTHEKILEKAMKKKGGSNCLEMKKETEIKIQTLTSDHKSKVKEIVAQHTKEWSEMINTHSAEEQEIRDLHLSQQCELLKKLLINAHEQQTQQLKLSHDRESKEMRAHQAKISMENSKAISQDKSIKNKAERERRVRELNSSNTKKFLEERKRLAMKQSKEMDQLKKVQLEHLEFLEKQNEQAKEMQQMVKLEAEMDRRPATVV

SEQ ID NO: 19700 - protein, 1178 aa, Artificial Sequence; identical to SEQ ID NO: 19699
  Synthetic polypeptide

SEQ ID NO: 19701 - protein, 72 aa, Artificial Sequence
  Synthetic polypeptide
LQTFYRAGALGHQSVQNGWESFVFEPNCLFKVDEFGFFLTWRSEGKEGQVLECSLINSIRSGAIPKDPKILA

SEQ ID NO: 19702 - protein, 50 aa, Artificial Sequence
  Synthetic polypeptide
LQTFYRAGALGHQSVQNGWESFVFEPNCLFKVDEFGFFLTWRSEGKEGQV

SEQ ID NO: 19703 - protein, 1166 aa, Artificial Sequence
  Synthetic polypeptide
LQTFYRAGALGHQSVQNGWESFVFEPNCLFKVDEFGFFLTWRSEGKEGQVLECSLINSIRSGAIPKDPKILAALEAVGKSENDLEGRIVCVCSGTDLVNISFTYMVAENPEVTKQWVEGLRSIIHNFRANNVSPMTCLKKHWMKLAFMTNTNGKIPVRSITRTFASGKTEKVIFQALKELGLPSGKNDEIEPTAFSYEKFYELTQKICPRTDIEDLFKKINGDKTDYLTVDQLVSFLNEHQRDPRLNEILFPFYDAKRAMQIIEMYEPDEDLKKKGLISSDGFCRYLMSDENAPVFLDRLELYQEMDHPLAHYFISSSHNTYLTGRQFGGKSSVEMYRQVLLAGCRCVELDCWDGKGEDQEPIITHGKAMCTDILFKDVIQAIKETAFVTSEYPVILSFENHCSKYQQYKMSKYCEDLFGDLLLKQALESHPLEPGRALPSPNDLKRKILIKNKRLKPEVEKKQLEALRSMMEAGESASPANILEDDNEEEIESADQEEEAHPEFKFGNELSADDLGHKEAVANSVKKGLVTVEDEQAWMASYKYVGATTNIHPYLSTMINYAQPVKFQGFHVAEERNIHYNMSSFNESVGLGYLKTHAIEFVNYNKRQMSRIYPKGGRVDSSNYMPQIFWNAGCQMVSLNYQTPDLAMQLNQGKFEYNGSCGYLLKPDFMRRPDRTFDPFSETPVDGVIAATCSVQVISGQFLSDKKIGTYVEVDMYGLPTDTIRKEFRTRMVMNNGLNPVYNEESFVFRKVILPDLAVLRIAVYDDNNKLIGQRILPLDGLQAGYRHISLRNEGNKPLSLPTIFCNIVLKTYVPDGFGDIVDALSDPKKFLSITEKRADQMRAMGIETSDIADVPSDTSKNDKKGKANTAKANVTPQSSSELRPTTTAALASGVEAKKGIELIPQVRIEDLKQMKAYLKHLKKQQKELNSLKKKHAKEHSTMQKLHCTQVDKIVAQYDKEKSTHEKILEKAMKKKGGSNCLEMKKETEIKIQTLTSDHKSKVKEIVAQHTKEWSEMINTHSAEEQEIRDLHLSQQCELLKKLLINAHEQQTQQLKLSHDRESKEMRAHQAKISMENSKAISQDKSIKNKAERERRVRELNSSNTKKFLEERKRLAMKQSKEMDQLKKVQLEHLEFLEKQNEQAKEMQQMVKLEAEMDRRPATVV

SEQ ID NO: 19704 - protein, 1166 aa, Artificial Sequence; identical to SEQ ID NO: 19703
  Synthetic polypeptide

SEQ ID NO: 19705 - protein, 7 aa, Artificial Sequence
  Synthetic polypeptide
ISGILCV

SEQ ID NO: 19706 - protein, 7 aa, Artificial Sequence
  Synthetic polypeptide
ISGILCV

SEQ ID NO: 19707 - protein, 7 aa, Artificial Sequence
  Synthetic polypeptide
ISGILCV

SEQ ID NO: 19708 - protein, 7 aa, Artificial Sequence
  Synthetic polypeptide
ISGILCV

SEQ ID NO: 19709 - protein, 7 aa, Artificial Sequence
  Synthetic polypeptide
ISGILCV

SEQ ID NO: 19710 - protein, 7 aa, Artificial Sequence
  Synthetic polypeptide
ISGILCV

SEQ ID NO: 19711 - protein, 7 aa, Artificial Sequence
  Synthetic polypeptide
ISGILCV

SEQ ID NO: 19712 - protein, 7 aa, Artificial Sequence
  Synthetic polypeptide
ISGILCV

SEQ ID NO: 19713 - protein, 7 aa, Artificial Sequence
  Synthetic polypeptide
ISGILCV

SEQ ID NO: 19714 - protein, 7 aa, Artificial Sequence
  Synthetic polypeptide
ISGILCV

SEQ ID NO: 19715 - protein, 98 aa, Artificial Sequence
  Synthetic polypeptide
HGLWNQRSWLEFQESFVFEPNCLFKVDEFGFFLTWRSEGKEGQVLECSLINSIRSGAIPKDPKILAALEAVGKSENDLEGRIVCVCSGTDLVNISFTY

SEQ ID NO: 19716 - protein, 32 aa, Artificial Sequence
  Synthetic polypeptide
MGFGIREAGLNFRNPLCLNPTASSKWMSLASF

SEQ ID NO: 19717 - protein, 32 aa, Artificial Sequence; identical to SEQ ID NO: 19716
  Synthetic polypeptide

SEQ ID NO: 19718 - protein, 32 aa, Artificial Sequence; identical to SEQ ID NO: 19716
  Synthetic polypeptide

SEQ ID NO: 19719 - protein, 32 aa, Artificial Sequence; identical to SEQ ID NO: 19716
  Synthetic polypeptide

SEQ ID NO: 19720 - protein, 32 aa, Artificial Sequence; identical to SEQ ID NO: 19716
  Synthetic polypeptide

SEQ ID NO: 19721 - protein, 32 aa, Artificial Sequence; identical to SEQ ID NO: 19716
  Synthetic polypeptide

SEQ ID NO: 19722 - protein, 32 aa, Artificial Sequence; identical to SEQ ID NO: 19716
  Synthetic polypeptide

SEQ ID NO: 19723 - protein, 32 aa, Artificial Sequence; identical to SEQ ID NO: 19716
  Synthetic polypeptide

SEQ ID NO: 19724 - protein, 32 aa, Artificial Sequence; identical to SEQ ID NO: 19716
  Synthetic polypeptide

SEQ ID NO: 19725 - protein, 32 aa, Artificial Sequence; identical to SEQ ID NO: 19716
  Synthetic polypeptide

SEQ ID NO: 19726 - protein, 95 aa, Artificial Sequence
  Synthetic polypeptide
HGLWNQRSWLEFQESFVFEPNCLFKVDEFGFFLTWRSEGKEGQVLECSLINSIRSGAIPKDPKILAALEAVGKSENDLEGRIVCVCSGTDLVNIS

SEQ ID NO: 19727 - protein, 1179 aa, Artificial Sequence
  Synthetic polypeptide
HGLWNQRSWLEFQESFVFEPNCLFKVDEFGFFLTWRSEGKEGQVLECSLINSIRSGAIPKDPKILAALEAVGKSENDLEGRIVCVCSGTDLVNISFTYMVAENPEVTKQWVEGLRSIIHNFRANNVSPMTCLKKHWMKLAFMTNTNGKIPVRSITRTFASGKTEKVIFQALKELGLPSGKNDEIEPTAFSYEKFYELTQKICPRTDIEDLFKKINGDKTDYLTVDQLVSFLNEHQRDPRLNEILFPFYDAKRAMQIIEMYEPDEDLKKKGLISSDGFCRYLMSDENAPVFLDRLELYQEMDHPLAHYFISSSHNTYLTGRQFGGKSSVEMYRQVLLAGCRCVELDCWDGKGEDQEPIITHGKAMCTDILFKDVIQAIKETAFVTSEYPVILSFENHCSKYQQYKMSKYCEDLFGDLLLKQALESHPLEPGRALPSPNDLKRKILIKNKRLKPEVEKKQLEALRSMMEAGESASPANILEDDNEEEIESADQEEEAHPEFKFGNELSADDLGHKEAVANSVKKGLVTVEDEQAWMASYKYVGATTNIHPYLSTMINYAQPVKFQGFHVAEERNIHYNMSSFNESVGLGYLKTHAIEFVNYNKRQMSRIYPKGGRVDSSNYMPQIFWNAGCQMVSLNYQTPDLAMQLNQGKFEYNGSCGYLLKPDFMRRPDRTFDPFSETPVDGVIAATCSVQVISGQFLSDKKIGTYVEVDMYGLPTDTIRKEFRTRMVMNNGLNPVYNEESFVFRKVILPDLAVLRIAVYDDNNKLIGQRILPLDGLQAGYRHISLRNEGNKPLSLPTIFCNIVLKTYVPDGFGDIVDALSDPKKFLSITEKRADQMRAMGIETSDIADVPSDTSKNDKKGKANTAKANVTPQSSSELRPTTTAALASGVEAKKGIELIPQVRIEDLKQMKAYLKHLKKQQKELNSLKKKHAKEHSTMQKLHCTQVDKIVAQYDKEKSTHEKILEKAMKKKGGSNCLEMKKETEIKIQTLTSDHKSKVKEIVAQHTKEWSEMINTHSAEEQEIRDLHLSQQCELLKKLLINAHEQQTQQLKLSHDRESKEMRAHQAKISMENSKAISQDKSIKNKAERERRVRELNSSNTKKFLEERKRLAMKQSKEMDQLKKVQLEHLEFLEKQNEQLLKSCHAVSQTQGEGDAADGEIGSRDGPQTSNSSMKLQNAN

SEQ ID NO: 19728 - protein, 1179 aa, Artificial Sequence; identical to SEQ ID NO: 19727
  Synthetic polypeptide

SEQ ID NO: 19729 - protein, 1172 aa, Artificial Sequence
  Synthetic polypeptide
HGLWNQRSWLEFQESFVFEPNCLFKVDEFGFFLTWRSEGKEGQVLECSLINSIRSGAIPKDPKILAALEAVGKSENDLEGRIVCVCSGTDLVNISFTYMVAENPEVTKQWVEGLRSIIHNFRANNVSPMTCLKKHWMKLAFMTNTNGKIPVRSITRTFASGKTEKVIFQALKELGLPSGKNDEIEPTAFSYEKFYELTQKICPRTDIEDLFKKINGDKTDYLTVDQLVSFLNEHQRDPRLNEILFPFYDAKRAMQIIEMYEPDEDLKKKGLISSDGFCRYLMSDENAPVFLDRLELYQEMDHPLAHYFISSSHNTYLTGRQFGGKSSVEMYRQVLLAGCRCVELDCWDGKGEDQEPIITHGKAMCTDILFKDVIQAIKETAFVTSEYPVILSFENHCSKYQQYKMSKYCEDLFGDLLLKQALESHPLEPGRALPSPNDLKRKILIKNKRLKPEVEKKQLEALRSMMEAGESASPANILEDDNEEEIESADQEEEAHPEFKFGNELSADDLGHKEAVANSVKKASDDLEHENNKKGLVTVEDEQAWMASYKYVGATTNIHPYLSTMINYAQPVKFQGFHVAEERNIHYNMSSFNESVGLGYLKTHAIEFVNYNKRQMSRIYPKGGRVDSSNYMPQIFWNAGCQMVSLNYQTPDLAMQLNQGKFEYNGSCGYLLKPDFMRRPDRTFDPFSETPVDGVIAATCSVQVISGQFLSDKKIGTYVEVDMYGLPTDTIRKEFRTRMVMNNGLNPVYNEESFVFRKVILPDLAVLRIAVYDDNNKLIGQRILPLDGLQAGYRHISLRNEGNKPLSLPTIFCNIVLKTYVPDGFGDIVDALSDPKKFLSITEKRADQMRAMGIETSDIADVPSDTSKNDKKGKANTAKANVTPQSSSELRPTTTAALASGVEAKKGIELIPQVRIEDLKQMKAYLKHLKKQQKELNSLKKKHAKEHSTMQKLHCTQVDKIVAQYDKEKSTHEKILEKAMKKKGGSNCLEMKKETEIKIQTLTSDHKSKVKEIVAQHTKEWSEMINTHSAEEQEIRDLHLSQQCELLKKLLINAHEQQTQQLKLSHDRESKEMRAHQAKISMENSKAISQDKSIKNKAERERRVRELNSSNTKKFLEERKRLAMKQSKEMDQLKKVQLEHLEFLEKQNEQAKEMQQMVKLEAEMDRRPATVV

SEQ ID NO: 19730 - protein, 1172 aa, Artificial Sequence; identical to SEQ ID NO: 19729
  Synthetic polypeptide

SEQ ID NO: 19731 - protein, 66 aa, Artificial Sequence
  Synthetic polypeptide
HGLWNQRSWLEFQESFVFEPNCLFKVDEFGFFLTWRSEGKEGQVLECSLINSIRSGAIPKDPKILA

SEQ ID NO: 19732 - protein, 44 aa, Artificial Sequence
  Synthetic polypeptide
HGLWNQRSWLEFQESFVFEPNCLFKVDEFGFFLTWRSEGKEGQV

SEQ ID NO: 19733 - protein, 1160 aa, Artificial Sequence
  Synthetic polypeptide
HGLWNQRSWLEFQESFVFEPNCLFKVDEFGFFLTWRSEGKEGQVLECSLINSIRSGAIPKDPKILAALEAVGKSENDLEGRIVCVCSGTDLVNISFTYMVAENPEVTKQWVEGLRSIIHNFRANNVSPMTCLKKHWMKLAFMTNTNGKIPVRSITRTFASGKTEKVIFQALKELGLPSGKNDEIEPTAFSYEKFYELTQKICPRTDIEDLFKKINGDKTDYLTVDQLVSFLNEHQRDPRLNEILFPFYDAKRAMQIIEMYEPDEDLKKKGLISSDGFCRYLMSDENAPVFLDRLELYQEMDHPLAHYFISSSHNTYLTGRQFGGKSSVEMYRQVLLAGCRCVELDCWDGKGEDQEPIITHGKAMCTDILFKDVIQAIKETAFVTSEYPVILSFENHCSKYQQYKMSKYCEDLFGDLLLKQALESHPLEPGRALPSPNDLKRKILIKNKRLKPEVEKKQLEALRSMMEAGESASPANILEDDNEEEIESADQEEEAHPEFKFGNELSADDLGHKEAVANSVKKGLVTVEDEQAWMASYKYVGATTNIHPYLSTMINYAQPVKFQGFHVAEERNIHYNMSSFNESVGLGYLKTHAIEFVNYNKRQMSRIYPKGGRVDSSNYMPQIFWNAGCQMVSLNYQTPDLAMQLNQGKFEYNGSCGYLLKPDFMRRPDRTFDPFSETPVDGVIAATCSVQVISGQFLSDKKIGTYVEVDMYGLPTDTIRKEFRTRMVMNNGLNPVYNEESFVFRKVILPDLAVLRIAVYDDNNKLIGQRILPLDGLQAGYRHISLRNEGNKPLSLPTIFCNIVLKTYVPDGFGDIVDALSDPKKFLSITEKRADQMRAMGIETSDIADVPSDTSKNDKKGKANTAKANVTPQSSSELRPTTTAALASGVEAKKGIELIPQVRIEDLKQMKAYLKHLKKQQKELNSLKKKHAKEHSTMQKLHCTQVDKIVAQYDKEKSTHEKILEKAMKKKGGSNCLEMKKETEIKIQTLTSDHKSKVKEIVAQHTKEWSEMINTHSAEEQEIRDLHLSQQCELLKKLLINAHEQQTQQLKLSHDRESKEMRAHQAKISMENSKAISQDKSIKNKAERERRVRELNSSNTKKFLEERKRLAMKQSKEMDQLKKVQLEHLEFLEKQNEQAKEMQQMVKLEAEMDRRPATVV

SEQ ID NO: 19734 - protein, 1160 aa, Artificial Sequence; identical to SEQ ID NO: 19733
  Synthetic polypeptide

SEQ ID NO: 19735 - protein, 252 aa, Artificial Sequence
  Synthetic polypeptide
VSQFPGQKVCFADFKHPCYKMAYFHELSSRVSFQEARLACESEGGVLLSLENEAEQKLIESMLQNLTKPGTGISDGDFWIGLWRNGDGQTSGACPDLYQWSDGSNSQYRNWYTDEPSCGSEKCVVMYHQPTANPGLGGPYLYQWNDDRCNMKHNYICKYEPEINPTAPVEKPYLTNQPGDTHQNVVVTEAGIIPNLIYVVIPTIPLLLLILVAFGTCCFQMLHKSKGRTKTSPNQSTLWISKSTRKESGMEV

SEQ ID NO: 19736 - protein, 252 aa, Artificial Sequence; identical to SEQ ID NO: 19735
  Synthetic polypeptide

SEQ ID NO: 19737 - protein, 29 aa, Artificial Sequence
  Synthetic polypeptide
ANSLAKRCVLLTSSIPATKWPTSMNCPAE

SEQ ID NO: 19738 - protein, 29 aa, Artificial Sequence
  Synthetic polypeptide
ANSLAKRCVLLTSSIPATKWPTSMNCPAE

SEQ ID NO: 19739 - protein, 13 aa, Artificial Sequence
  Synthetic polypeptide
LSEPIPWPKGVFC

SEQ ID NO: 19740 - protein, 13 aa, Artificial Sequence
  Synthetic polypeptide
LSEPIPWPKGVFC

SEQ ID NO: 19741 - protein, 253 aa, Artificial Sequence
  Synthetic polypeptide
TSSLQNCQKVCFADFKHPCYKMAYFHELSSRVSFQEARLACESEGGVLLSLENEAEQKLIESMLQNLTKPGTGISDGDFWIGLWRNGDGQTSGACPDLYQWSDGSNSQYRNWYTDEPSCGSEKCVVMYHQPTANPGLGGPYLYQWNDDRCNMKHNYICKYEPEINPTAPVEKPYLTNQPGDTHQNVVVTEAGIIPNLIYVVIPTIPLLLLILVAFGTCCFQMLHKSKGRTKTSPNQSTLWISKSTRKESGMEV

SEQ ID NO: 19742 - protein, 253 aa, Artificial Sequence; identical to SEQ ID NO: 19741
  Synthetic polypeptide

SEQ ID NO: 19743 - protein, 49 aa, Artificial Sequence
  Synthetic polypeptide
TRRWSLPRNWMGQHVDSELLASRTAKRCVLLTSSIPATKWPTSMNCPAE

SEQ ID NO: 19744 - protein, 49 aa, Artificial Sequence; identical to SEQ ID NO: 19743
  Synthetic polypeptide

SEQ ID NO: 19745 - protein, 10 aa, Artificial Sequence
  Synthetic polypeptide
PPELPKGVFC

SEQ ID NO: 19746 - protein, 10 aa, Artificial Sequence
  Synthetic polypeptide
PPELPKGVFC

SEQ ID NO: 19747 - protein, 660 aa, Artificial Sequence
  Synthetic polypeptide
ICRLIRIPVGEFVSDALLVPDKCKFLHQERMDVCETHLHWHTVAKETCSEKSTNLHDYGMLLPCGIDKFRGVEFVCCPLAEESDNVDSADAEEDDSDVWWGGADTDYADGSEDKVVEVAEEEEVAEVEEEEADDDEDDEDGDEVEEEAEEPYEEATERTTSIATTTTTTTESVEEVVREVCSEQAETGPCRAMISRWYFDVTEGKCAPFFYGGCGGNRNNFDTEEYCMAVCGSAMSQSLLKTTQEPLARDPVKLPTTAASTPDAVDKYLETPGDENEHAHFQKAKERLEAKHRERMSQVMREWEEAERQAKNLPKADKKAVIQHFQEKVESLEQEAANERQQLVETHMARVEAMLNDRRRLALENYITALQAVPPRPRHVFNMLKKYVRAEQKDRQHTLKHFEHVRMVDPKKAAQIRSQVMTHLRVIYERMNQSLSLLYNVPAVAEEIQDEVDELLQKEQNYSDDVLANMISEPRISYGNDALMPSLTETKTTVELLPVNGEFSLDDLQPWHSFGADSVPANTENEVEPVDARPAADRGLTTRPGSGLTNIKTEEISEVKMDAEFRHDSGYEVHHQKLVFFAEDVGSNKGAIIGLMVGGVVIATVIVITLVMLKKKQYTSIHHGVVEVDAAVTPEERHLSKMQQNGYENPTYKFFEQMQN

SEQ ID NO: 19748 - protein, 660 aa, Artificial Sequence; identical to SEQ ID NO: 19747
  Synthetic polypeptide

SEQ ID NO: 19749 - protein, 8 aa, Artificial Sequence
  Synthetic polypeptide
SGSQLVSL

SEQ ID NO: 19750 - protein, 8 aa, Artificial Sequence
  Synthetic polypeptide
SGSQLVSL

SEQ ID NO: 19751 - protein, 8 aa, Artificial Sequence
  Synthetic polypeptide
SGSQLVSL

SEQ ID NO: 19752 - protein, 8 aa, Artificial Sequence
  Synthetic polypeptide
SGSQLVSL

SEQ ID NO: 19753 - protein, 8 aa, Artificial Sequence
  Synthetic polypeptide
SGSQLVSL

SEQ ID NO: 19754 - protein, 8 aa, Artificial Sequence
  Synthetic polypeptide
SGSQLVSL

SEQ ID NO: 19755 - protein, 8 aa, Artificial Sequence
  Synthetic polypeptide
SGSQLVSL

SEQ ID NO: 19756 - protein, 8 aa, Artificial Sequence
  Synthetic polypeptide
SGSQLVSL

SEQ ID NO: 19757 - protein, 8 aa, Artificial Sequence
  Synthetic polypeptide
SGSQLVSL

SEQ ID NO: 19758 - protein, 8 aa, Artificial Sequence
  Synthetic polypeptide
SGSQLVSL

SEQ ID NO: 19759 - protein, 44 aa, Artificial Sequence
  Synthetic polypeptide
SMSHLKQSHPGKVCFQARPRTRKSDLGCGAREKMNLQTDQDPSW

SEQ ID NO: 19760 - protein, 44 aa, Artificial Sequence; identical to SEQ ID NO: 19759
  Synthetic polypeptide

SEQ ID NO: 19761 - protein, 44 aa, Artificial Sequence; identical to SEQ ID NO: 19759
  Synthetic polypeptide

SEQ ID NO: 19762 - protein, 44 aa, Artificial Sequence; identical to SEQ ID NO: 19759
  Synthetic polypeptide

SEQ ID NO: 19763 - protein, 44 aa, Artificial Sequence; identical to SEQ ID NO: 19759
  Synthetic polypeptide

SEQ ID NO: 19764 - protein, 44 aa, Artificial Sequence; identical to SEQ ID NO: 19759
  Synthetic polypeptide

SEQ ID NO: 19765 - protein, 44 aa, Artificial Sequence; identical to SEQ ID NO: 19759
  Synthetic polypeptide

SEQ ID NO: 19766 - protein, 44 aa, Artificial Sequence; identical to SEQ ID NO: 19759
  Synthetic polypeptide

SEQ ID NO: 19767 - protein, 44 aa, Artificial Sequence; identical to SEQ ID NO: 19759
  Synthetic polypeptide

SEQ ID NO: 19768 - protein, 44 aa, Artificial Sequence; identical to SEQ ID NO: 19759
  Synthetic polypeptide

SEQ ID NO: 19769 - protein, 585 aa, Artificial Sequence
  Synthetic polypeptide
ICRLIRIPVGEFVSDALLVPDKCKFLHQERMDVCETHLHWHTVAKETCSEKSTNLHDYGMLLPCGIDKFRGVEFVCCPLAEESDNVDSADAEEDDSDVWWGGADTDYADGSEDKVVEVAEEEEVAEVEEEEADDDEDDEDGDEVEEEAEEPYEEATERTTSIATTTTTTTESVEEVVRVPTTAASTPDAVDKYLETPGDENEHAHFQKAKERLEAKHRERMSQVMREWEEAERQAKNLPKADKKAVIQHFQEKVESLEQEAANERQQLVETHMARVEAMLNDRRRLALENYITALQAVPPRPRHVFNMLKKYVRAEQKDRQHTLKHFEHVRMVDPKKAAQIRSQVMTHLRVIYERMNQSLSLLYNVPAVAEEIQDEVDELLQKEQNYSDDVLANMISEPRISYGNDALMPSLTETKTTVELLPVNGEFSLDDLQPWHSFGADSVPANTENEVEPVDARPAADRGLTTRPGSGLTNIKTEEISEVKMDAEFRHDSGYEVHHQKLVFFAEDVGSNKGAIIGLMVGGVVIATVIVITLVMLKKKQYTSIHHGVVEVDAAVTPEERHLSKMQQNGYENPTYKFFEQMQN

SEQ ID NO: 19770 - protein, 585 aa, Artificial Sequence; identical to SEQ ID NO: 19769
  Synthetic polypeptide

SEQ ID NO: 19771 - protein, 585 aa, Artificial Sequence; identical to SEQ ID NO: 19769
  Synthetic polypeptide

SEQ ID NO: 19772 - protein, 641 aa, Artificial Sequence
  Synthetic polypeptide
ICRLIRIPVGEFVSDALLVPDKCKFLHQERMDVCETHLHWHTVAKETCSEKSTNLHDYGMLLPCGIDKFRGVEFVCCPLAEESDNVDSADAEEDDSDVWWGGADTDYADGSEDKVVEVAEEEEVAEVEEEEADDDEDDEDGDEVEEEAEEPYEEATERTTSIATTTTTTTESVEEVVREVCSEQAETGPCRAMISRWYFDVTEGKCAPFFYGGCGGNRNNFDTEEYCMAVCGSAIPTTAASTPDAVDKYLETPGDENEHAHFQKAKERLEAKHRERMSQVMREWEEAERQAKNLPKADKKAVIQHFQEKVESLEQEAANERQQLVETHMARVEAMLNDRRRLALENYITALQAVPPRPRHVFNMLKKYVRAEQKDRQHTLKHFEHVRMVDPKKAAQIRSQVMTHLRVIYERMNQSLSLLYNVPAVAEEIQDEVDELLQKEQNYSDDVLANMISEPRISYGNDALMPSLTETKTTVELLPVNGEFSLDDLQPWHSFGADSVPANTENEVEPVDARPAADRGLTTRPGSGLTNIKTEEISEVKMDAEFRHDSGYEVHHQKLVFFAEDVGSNKGAIIGLMVGGVVIATVIVITLVMLKKKQYTSIHHGVVEVDAAVTPEERHLSKMQQNGYENPTYKFFEQMQN

SEQ ID NO: 19773 - protein, 641 aa, Artificial Sequence; identical to SEQ ID NO: 19772
  Synthetic polypeptide

SEQ ID NO: 19774 - protein, 642 aa, Artificial Sequence
  Synthetic polypeptide
ICRLIRIPVGEFVSDALLVPDKCKFLHQERMDVCETHLHWHTVAKETCSEKSTNLHDYGMLLPCGIDKFRGVEFVCCPLAEESDNVDSADAEEDDSDVWWGGADTDYADGSEDKVVEVAEEEEVAEVEEEEADDDEDDEDGDEVEEEAEEPYEEATERTTSIATTTTTTTESVEEVVREVCSEQAETGPCRAMISRWYFDVTEGKCAPFFYGGCGGNRNNFDTEEYCMAVCGSAMSQSLLKTTQEPLARDPVKLPTTAASTPDAVDKYLETPGDENEHAHFQKAKERLEAKHRERMSQVMREWEEAERQAKNLPKADKKAVIQHFQEKVESLEQEAANERQQLVETHMARVEAMLNDRRRLALENYITALQAVPPRPRHVFNMLKKYVRAEQKDRQHTLKHFEHVRMVDPKKAAQIRSQVMTHLRVIYERMNQSLSLLYNVPAVAEEIQDEVDELLQKEQNYSDDVLANMISEPRISYGNDALMPSLTETKTTVELLPVNGEFSLDDLQPWHSFGADSVPANTENEGSGLTNIKTEEISEVKMDAEFRHDSGYEVHHQKLVFFAEDVGSNKGAIIGLMVGGVVIATVIVITLVMLKKKQYTSIHHGVVEVDAAVTPEERHLSKMQQNGYENPTYKFFEQMQN

SEQ ID NO: 19775 - protein, 604 aa, Artificial Sequence
  Synthetic polypeptide
ICRLIRIPVGEFVSDALLVPDKCKFLHQERMDVCETHLHWHTVAKETCSEKSTNLHDYGMLLPCGIDKFRGVEFVCCPLAEESDNVDSADAEEDDSDVWWGGADTDYADGSEDKVVEVAEEEEVAEVEEEEADDDEDDEDGDEVEEEAEEPYEEATERTTSIATTTTTTTESVEEVVRVSQSLLKTTQEPLARDPVKLPTTAASTPDAVDKYLETPGDENEHAHFQKAKERLEAKHRERMSQVMREWEEAERQAKNLPKADKKAVIQHFQEKVESLEQEAANERQQLVETHMARVEAMLNDRRRLALENYITALQAVPPRPRHVFNMLKKYVRAEQKDRQHTLKHFEHVRMVDPKKAAQIRSQVMTHLRVIYERMNQSLSLLYNVPAVAEEIQDEVDELLQKEQNYSDDVLANMISEPRISYGNDALMPSLTETKTTVELLPVNGEFSLDDLQPWHSFGADSVPANTENEVEPVDARPAADRGLTTRPGSGLTNIKTEEISEVKMDAEFRHDSGYEVHHQKLVFFAEDVGSNKGAIIGLMVGGVVIATVIVITLVMLKKKQYTSIHHGVVEVDAAVTPEERHLSKMQQNGYENPTYKFFEQMQN

SEQ ID NO: 19776 - protein, 453 aa, Artificial Sequence
  Synthetic polypeptide
ICRLIRIPVGEFVSDALLVPDKCKFLHQERMDVCETHLHWHTVAKETCSEKSTNLHDYGMLLPCGIDKFRGVEFVCCPLAEESDNVDSADAEEDDSDVWWGGADTDYADGSEDKVVEVAEEEEVAEVEEEEADDDEDDEDGDEVEEEAEEPYEEATERTTSIATTTTTTTESVEEVVREVCSEQAETGPCRAMISRWYFDVTEGKCAPFFYGGCGGNRNNFDTEEYCMAVCGSAIPTTAASTPDAVDKYLETPGDENEHAHFQKAKERLEAKHRERMSQVMREWEEAERQAKNLPKADKKAVIQHFQEKVESLEQEAANERQQLVETHMARVEAMLNDRRRLALENYITALQAVPPRPRHVFNMLKKYVRAEQKDRQHTLKHFEHVRMVDPKKAAQIRSQVMTHLRVIYERMNQSLSLLYNVPAVAEEIQDEVGAVAHACNSSILGGQGGQMT

SEQ ID NO: 19777 - protein, 721 aa, Artificial Sequence
  Synthetic polypeptide
VMTLSCEIPSSGSSWLKNSPTEHPVTPTPAPQRTTPFDCNFPLPTRILQNGPTPSPFPDSFSDSACLHPVGEFVSDALLVPDKCKFLHQERMDVCETHLHWHTVAKETCSEKSTNLHDYGMLLPCGIDKFRGVEFVCCPLAEESDNVDSADAEEDDSDVWWGGADTDYADGSEDKVVEVAEEEEVAEVEEEEADDDEDDEDGDEVEEEAEEPYEEATERTTSIATTTTTTTESVEEVVREVCSEQAETGPCRAMISRWYFDVTEGKCAPFFYGGCGGNRNNFDTEEYCMAVCGSAMSQSLLKTTQEPLARDPVKLPTTAASTPDAVDKYLETPGDENEHAHFQKAKERLEAKHRERMSQVMREWEEAERQAKNLPKADKKAVIQHFQEKVESLEQEAANERQQLVETHMARVEAMLNDRRRLALENYITALQAVPPRPRHVFNMLKKYVRAEQKDRQHTLKHFEHVRMVDPKKAAQIRSQVMTHLRVIYERMNQSLSLLYNVPAVAEEIQDEVDELLQKEQNYSDDVLANMISEPRISYGNDALMPSLTETKTTVELLPVNGEFSLDDLQPWHSFGADSVPANTENEVEPVDARPAADRGLTTRPGSGLTNIKTEEISEVKMDAEFRHDSGYEVHHQKLVFFAEDVGSNKGAIIGLMVGGVVIATVIVITLVMLKKKQYTSIHHGVVEVDAAVTPEERHLSKMQQNGYENPTYKFFEQMQN

SEQ ID NO: 19778 - protein, 721 aa, Artificial Sequence; identical to SEQ ID NO: 19777
  Synthetic polypeptide

SEQ ID NO: 19779 - protein, 48 aa, Artificial Sequence
  Synthetic polypeptide
PPPLPPREQPPLTAIFLYLPESYKMALPHLPFLTLFRTQPACTQLVSL

SEQ ID NO: 19780 - protein, 48 aa, Artificial Sequence; identical to SEQ ID NO: 19779
  Synthetic polypeptide

SEQ ID NO: 19781 - protein, 48 aa, Artificial Sequence; identical to SEQ ID NO: 19779
  Synthetic polypeptide

SEQ ID NO: 19782 - protein, 48 aa, Artificial Sequence; identical to SEQ ID NO: 19779
  Synthetic polypeptide

SEQ ID NO: 19783 - protein, 48 aa, Artificial Sequence; identical to SEQ ID NO: 19779
  Synthetic polypeptide

SEQ ID NO: 19784 - protein, 48 aa, Artificial Sequence; identical to SEQ ID NO: 19779
  Synthetic polypeptide

SEQ ID NO: 19785 - protein, 48 aa, Artificial Sequence; identical to SEQ ID NO: 19779
  Synthetic polypeptide

SEQ ID NO: 19786 - protein, 48 aa, Artificial Sequence; identical to SEQ ID NO: 19779
  Synthetic polypeptide

SEQ ID NO: 19787 - protein, 48 aa, Artificial Sequence; identical to SEQ ID NO: 19779
  Synthetic polypeptide

SEQ ID NO: 19788 - protein, 48 aa, Artificial Sequence; identical to SEQ ID NO: 19779
  Synthetic polypeptide

SEQ ID NO: 19789 - protein, 12 aa, Artificial Sequence
  Synthetic polypeptide
LFFGLSLPAPSW

SEQ ID NO: 19790 - protein, 12 aa, Artificial Sequence
  Synthetic polypeptide
LFFGLSLPAPSW

SEQ ID NO: 19791 - protein, 12 aa, Artificial Sequence
  Synthetic polypeptide
LFFGLSLPAPSW

SEQ ID NO: 19792 - protein, 12 aa, Artificial Sequence
  Synthetic polypeptide
LFFGLSLPAPSW

SEQ ID NO: 19793 - protein, 12 aa, Artificial Sequence
  Synthetic polypeptide
LFFGLSLPAPSW

SEQ ID NO: 19794 - protein, 12 aa, Artificial Sequence
  Synthetic polypeptide
LFFGLSLPAPSW

SEQ ID NO: 19795 - protein, 12 aa, Artificial Sequence
  Synthetic polypeptide
LFFGLSLPAPSW

SEQ ID NO: 19796 - protein, 12 aa, Artificial Sequence
  Synthetic polypeptide
LFFGLSLPAPSW

SEQ ID NO: 19797 - protein, 12 aa, Artificial Sequence
  Synthetic polypeptide
LFFGLSLPAPSW

SEQ ID NO: 19798 - protein, 12 aa, Artificial Sequence
  Synthetic polypeptide
LFFGLSLPAPSW

SEQ ID NO: 19799 - protein, 646 aa, Artificial Sequence
  Synthetic polypeptide
VMTLSCEIPSSGSSWLKNSPTEHPVTPTPAPQRTTPFDCNFPLPTRILQNGPTPSPFPDSFSDSACLHPVGEFVSDALLVPDKCKFLHQERMDVCETHLHWHTVAKETCSEKSTNLHDYGMLLPCGIDKFRGVEFVCCPLAEESDNVDSADAEEDDSDVWWGGADTDYADGSEDKVVEVAEEEEVAEVEEEEADDDEDDEDGDEVEEEAEEPYEEATERTTSIATTTTTTTESVEEVVRVPTTAASTPDAVDKYLETPGDENEHAHFQKAKERLEAKHRERMSQVMREWEEAERQAKNLPKADKKAVIQHFQEKVESLEQEAANERQQLVETHMARVEAMLNDRRRLALENYITALQAVPPRPRHVFNMLKKYVRAEQKDRQHTLKHFEHVRMVDPKKAAQIRSQVMTHLRVIYERMNQSLSLLYNVPAVAEEIQDEVDELLQKEQNYSDDVLANMISEPRISYGNDALMPSLTETKTTVELLPVNGEFSLDDLQPWHSFGADSVPANTENEVEPVDARPAADRGLTTRPGSGLTNIKTEEISEVKMDAEFRHDSGYEVHHQKLVFFAEDVGSNKGAIIGLMVGGVVIATVIVITLVMLKKKQYTSIHHGVVEVDAAVTPEERHLSKMQQNGYENPTYKFFEQMQN

SEQ ID NO: 19800 - protein, 646 aa, Artificial Sequence; identical to SEQ ID NO: 19799
  Synthetic polypeptide

SEQ ID NO: 19801 - protein, 646 aa, Artificial Sequence; identical to SEQ ID NO: 19799
  Synthetic polypeptide

SEQ ID NO: 19802 - protein, 702 aa, Artificial Sequence
  Synthetic polypeptide
VMTLSCEIPSSGSSWLKNSPTEHPVTPTPAPQRTTPFDCNFPLPTRILQNGPTPSPFPDSFSDSACLHPVGEFVSDALLVPDKCKFLHQERMDVCETHLHWHTVAKETCSEKSTNLHDYGMLLPCGIDKFRGVEFVCCPLAEESDNVDSADAEEDDSDVWWGGADTDYADGSEDKVVEVAEEEEVAEVEEEEADDDEDDEDGDEVEEEAEEPYEEATERTTSIATTTTTTTESVEEVVREVCSEQAETGPCRAMISRWYFDVTEGKCAPFFYGGCGGNRNNFDTEEYCMAVCGSAIPTTAASTPDAVDKYLETPGDENEHAHFQKAKERLEAKHRERMSQVMREWEEAERQAKNLPKADKKAVIQHFQEKVESLEQEAANERQQLVETHMARVEAMLNDRRRLALENYITALQAVPPRPRHVFNMLKKYVRAEQKDRQHTLKHFEHVRMVDPKKAAQIRSQVMTHLRVIYERMNQSLSLLYNVPAVAEEIQDEVDELLQKEQNYSDDVLANMISEPRISYGNDALMPSLTETKTTVELLPVNGEFSLDDLQPWHSFGADSVPANTENEVEPVDARPAADRGLTTRPGSGLTNIKTEEISEVKMDAEFRHDSGYEVHHQKLVFFAEDVGSNKGAIIGLMVGGVVIATVIVITLVMLKKKQYTSIHHGVVEVDAAVTPEERHLSKMQQNGYENPTYKFFEQMQN

SEQ ID NO: 19803 - protein, 702 aa, Artificial Sequence; identical to SEQ ID NO: 19802
  Synthetic polypeptide

SEQ ID NO: 19804 - protein, 703 aa, Artificial Sequence
  Synthetic polypeptide
VMTLSCEIPSSGSSWLKNSPTEHPVTPTPAPQRTTPFDCNFPLPTRILQNGPTPSPFPDSFSDSACLHPVGEFVSDALLVPDKCKFLHQERMDVCETHLHWHTVAKETCSEKSTNLHDYGMLLPCGIDKFRGVEFVCCPLAEESDNVDSADAEEDDSDVWWGGADTDYADGSEDKVVEVAEEEEVAEVEEEEADDDEDDEDGDEVEEEAEEPYEEATERTTSIATTTTTTTESVEEVVREVCSEQAETGPCRAMISRWYFDVTEGKCAPFFYGGCGGNRNNFDTEEYCMAVCGSAMSQSLLKTTQEPLARDPVKLPTTAASTPDAVDKYLETPGDENEHAHFQKAKERLEAKHRERMSQVMREWEEAERQAKNLPKADKKAVIQHFQEKVESLEQEAANERQQLVETHMARVEAMLNDRRRLALENYITALQAVPPRPRHVFNMLKKYVRAEQKDRQHTLKHFEHVRMVDPKKAAQIRSQVMTHLRVIYERMNQSLSLLYNVPAVAEEIQDEVDELLQKEQNYSDDVLANMISEPRISYGNDALMPSLTETKTTVELLPVNGEFSLDDLQPWHSFGADSVPANTENEGSGLTNIKTEEISEVKMDAEFRHDSGYEVHHQKLVFFAEDVGSNKGAIIGLMVGGVVIATVIVITLVMLKKKQYTSIHHGVVEVDAAVTPEERHLSKMQQNGYENPTYKFFEQMQN

SEQ ID NO: 19805 - protein, 665 aa, Artificial Sequence
  Synthetic polypeptide
VMTLSCEIPSSGSSWLKNSPTEHPVTPTPAPQRTTPFDCNFPLPTRILQNGPTPSPFPDSFSDSACLHPVGEFVSDALLVPDKCKFLHQERMDVCETHLHWHTVAKETCSEKSTNLHDYGMLLPCGIDKFRGVEFVCCPLAEESDNVDSADAEEDDSDVWWGGADTDYADGSEDKVVEVAEEEEVAEVEEEEADDDEDDEDGDEVEEEAEEPYEEATERTTSIATTTTTTTESVEEVVRVSQSLLKTTQEPLARDPVKLPTTAASTPDAVDKYLETPGDENEHAHFQKAKERLEAKHRERMSQVMREWEEAERQAKNLPKADKKAVIQHFQEKVESLEQEAANERQQLVETHMARVEAMLNDRRRLALENYITALQAVPPRPRHVFNMLKKYVRAEQKDRQHTLKHFEHVRMVDPKKAAQIRSQVMTHLRVIYERMNQSLSLLYNVPAVAEEIQDEVDELLQKEQNYSDDVLANMISEPRISYGNDALMPSLTETKTTVELLPVNGEFSLDDLQPWHSFGADSVPANTENEVEPVDARPAADRGLTTRPGSGLTNIKTEEISEVKMDAEFRHDSGYEVHHQKLVFFAEDVGSNKGAIIGLMVGGVVIATVIVITLVMLKKKQYTSIHHGVVEVDAAVTPEERHLSKMQQNGYENPTYKFFEQMQN

SEQ ID NO: 19806 - protein, 514 aa, Artificial Sequence
  Synthetic polypeptide
VMTLSCEIPSSGSSWLKNSPTEHPVTPTPAPQRTTPFDCNFPLPTRILQNGPTPSPFPDSFSDSACLHPVGEFVSDALLVPDKCKFLHQERMDVCETHLHWHTVAKETCSEKSTNLHDYGMLLPCGIDKFRGVEFVCCPLAEESDNVDSADAEEDDSDVWWGGADTDYADGSEDKVVEVAEEEEVAEVEEEEADDDEDDEDGDEVEEEAEEPYEEATERTTSIATTTTTTTESVEEVVREVCSEQAETGPCRAMISRWYFDVTEGKCAPFFYGGCGGNRNNFDTEEYCMAVCGSAIPTTAASTPDAVDKYLETPGDENEHAHFQKAKERLEAKHRERMSQVMREWEEAERQAKNLPKADKKAVIQHFQEKVESLEQEAANERQQLVETHMARVEAMLNDRRRLALENYITALQAVPPRPRHVFNMLKKYVRAEQKDRQHTLKHFEHVRMVDPKKAAQIRSQVMTHLRVIYERMNQSLSLLYNVPAVAEEIQDEVGAVAHACNSSILGGQGGQMT

SEQ ID NO: 19807 - protein, 58 aa, Artificial Sequence
  Synthetic polypeptide
RLSIPNLKIQSPKCSKTQNYLHVNMMLKGNAHWSILDFGLSGFQMLNQSTLNCRSPMW

SEQ ID NO: 19808 - protein, 58 aa, Artificial Sequence; identical to SEQ ID NO: 19807
  Synthetic polypeptide

SEQ ID NO: 19809 - protein, 58 aa, Artificial Sequence; identical to SEQ ID NO: 19807
  Synthetic polypeptide

SEQ ID NO: 19810 - protein, 58 aa, Artificial Sequence; identical to SEQ ID NO: 19807
  Synthetic polypeptide

SEQ ID NO: 19811 - protein, 58 aa, Artificial Sequence; identical to SEQ ID NO: 19807
  Synthetic polypeptide

SEQ ID NO: 19812 - protein, 58 aa, Artificial Sequence; identical to SEQ ID NO: 19807
  Synthetic polypeptide

SEQ ID NO: 19813 - protein, 58 aa, Artificial Sequence; identical to SEQ ID NO: 19807
  Synthetic polypeptide

SEQ ID NO: 19814 - protein, 58 aa, Artificial Sequence; identical to SEQ ID NO: 19807
  Synthetic polypeptide

SEQ ID NO: 19815 - protein, 58 aa, Artificial Sequence; identical to SEQ ID NO: 19807
  Synthetic polypeptide

SEQ ID NO: 19816 - protein, 25 aa, Artificial Sequence
  Synthetic polypeptide
CSKEMLIGVFWILDFPDSRCSTSLP

SEQ ID NO: 19817 - protein, 25 aa, Artificial Sequence
  Synthetic polypeptide
CSKEMLIGVFWILDFPDSRCSTSLP

SEQ ID NO: 19818 - protein, 25 aa, Artificial Sequence
  Synthetic polypeptide
CSKEMLIGVFWILDFPDSRCSTSLP

SEQ ID NO: 19819 - protein, 25 aa, Artificial Sequence
  Synthetic polypeptide
CSKEMLIGVFWILDFPDSRCSTSLP

SEQ ID NO: 19820 - protein, 25 aa, Artificial Sequence
  Synthetic polypeptide
CSKEMLIGVFWILDFPDSRCSTSLP

SEQ ID NO: 19821 - protein, 25 aa, Artificial Sequence
  Synthetic polypeptide
CSKEMLIGVFWILDFPDSRCSTSLP

SEQ ID NO: 19822 - protein, 25 aa, Artificial Sequence
  Synthetic polypeptide
CSKEMLIGVFWILDFPDSRCSTSLP

SEQ ID NO: 19823 - protein, 25 aa, Artificial Sequence
  Synthetic polypeptide
CSKEMLIGVFWILDFPDSRCSTSLP

SEQ ID NO: 19824 - protein, 25 aa, Artificial Sequence
  Synthetic polypeptide
CSKEMLIGVFWILDFPDSRCSTSLP

SEQ ID NO: 19825 - protein, 742 aa, Artificial Sequence
  Synthetic polypeptide
VEYPKFKNPESEMLKNPKLFACQHDAQRKCSLEYFGFWTFRIPDAQPVYPELQITNVVEANQPVTIQNWCKRGRKQCKTHPHFVIPYRCLVGEFVSDALLVPDKCKFLHQERMDVCETHLHWHTVAKETCSEKSTNLHDYGMLLPCGIDKFRGVEFVCCPLAEESDNVDSADAEEDDSDVWWGGADTDYADGSEDKVVEVAEEEEVAEVEEEEADDDEDDEDGDEVEEEAEEPYEEATERTTSIATTTTTTTESVEEVVREVCSEQAETGPCRAMISRWYFDVTEGKCAPFFYGGCGGNRNNFDTEEYCMAVCGSAMSQSLLKTTQEPLARDPVKLPTTAASTPDAVDKYLETPGDENEHAHFQKAKERLEAKHRERMSQVMREWEEAERQAKNLPKADKKAVIQHFQEKVESLEQEAANERQQLVETHMARVEAMLNDRRRLALENYITALQAVPPRPRHVFNMLKKYVRAEQKDRQHTLKHFEHVRMVDPKKAAQIRSQVMTHLRVIYERMNQSLSLLYNVPAVAEEIQDEVDELLQKEQNYSDDVLANMISEPRISYGNDALMPSLTETKTTVELLPVNGEFSLDDLQPWHSFGADSVPANTENEVEPVDARPAADRGLTTRPGSGLTNIKTEEISEVKMDAEFRHDSGYEVHHQKLVFFAEDVGSNKGAIIGLMVGGVVIATVIVITLVMLKKKQYTSIHHGVVEVDAAVTPEERHLSKMQQNGYENPTYKFFEQMQN

SEQ ID NO: 19826 - protein, 742 aa, Artificial Sequence; identical to SEQ ID NO: 19825
  Synthetic polypeptide

SEQ ID NO: 19827 - protein, 667 aa, Artificial Sequence
  Synthetic polypeptide
VEYPKFKNPESEMLKNPKLFACQHDAQRKCSLEYFGFWTFRIPDAQPVYPELQITNVVEANQPVTIQNWCKRGRKQCKTHPHFVIPYRCLVGEFVSDALLVPDKCKFLHQERMDVCETHLHWHTVAKETCSEKSTNLHDYGMLLPCGIDKFRGVEFVCCPLAEESDNVDSADAEEDDSDVWWGGADTDYADGSEDKVVEVAEEEEVAEVEEEEADDDEDDEDGDEVEEEAEEPYEEATERTTSIATTTTTTTESVEEVVRVPTTAASTPDAVDKYLETPGDENEHAHFQKAKERLEAKHRERMSQVMREWEEAERQAKNLPKADKKAVIQHFQEKVESLEQEAANERQQLVETHMARVEAMLNDRRRLALENYITALQAVPPRPRHVFNMLKKYVRAEQKDRQHTLKHFEHVRMVDPKKAAQIRSQVMTHLRVIYERMNQSLSLLYNVPAVAEEIQDEVDELLQKEQNYSDDVLANMISEPRISYGNDALMPSLTETKTTVELLPVNGEFSLDDLQPWHSFGADSVPANTENEVEPVDARPAADRGLTTRPGSGLTNIKTEEISEVKMDAEFRHDSGYEVHHQKLVFFAEDVGSNKGAIIGLMVGGVVIATVIVITLVMLKKKQYTSIHHGVVEVDAAVTPEERHLSKMQQNGYENPTYKFFEQMQN

SEQ ID NO: 19828 - protein, 667 aa, Artificial Sequence; identical to SEQ ID NO: 19827
  Synthetic polypeptide

SEQ ID NO: 19829 - protein, 667 aa, Artificial Sequence; identical to SEQ ID NO: 19827
  Synthetic polypeptide

SEQ ID NO: 19830 - protein, 723 aa, Artificial Sequence
  Synthetic polypeptide
VEYPKFKNPESEMLKNPKLFACQHDAQRKCSLEYFGFWTFRIPDAQPVYPELQITNVVEANQPVTIQNWCKRGRKQCKTHPHFVIPYRCLVGEFVSDALLVPDKCKFLHQERMDVCETHLHWHTVAKETCSEKSTNLHDYGMLLPCGIDKFRGVEFVCCPLAEESDNVDSADAEEDDSDVWWGGADTDYADGSEDKVVEVAEEEEVAEVEEEEADDDEDDEDGDEVEEEAEEPYEEATERTTSIATTTTTTTESVEEVVREVCSEQAETGPCRAMISRWYFDVTEGKCAPFFYGGCGGNRNNFDTEEYCMAVCGSAIPTTAASTPDAVDKYLETPGDENEHAHFQKAKERLEAKHRERMSQVMREWEEAERQAKNLPKADKKAVIQHFQEKVESLEQEAANERQQLVETHMARVEAMLNDRRRLALENYITALQAVPPRPRHVFNMLKKYVRAEQKDRQHTLKHFEHVRMVDPKKAAQIRSQVMTHLRVIYERMNQSLSLLYNVPAVAEEIQDEVDELLQKEQNYSDDVLANMISEPRISYGNDALMPSLTETKTTVELLPVNGEFSLDDLQPWHSFGADSVPANTENEVEPVDARPAADRGLTTRPGSGLTNIKTEEISEVKMDAEFRHDSGYEVHHQKLVFFAEDVGSNKGAIIGLMVGGVVIATVIVITLVMLKKKQYTSIHHGVVEVDAAVTPEERHLSKMQQNGYENPTYKFFEQMQN

SEQ ID NO: 19831 - protein, 723 aa, Artificial Sequence; identical to SEQ ID NO: 19830
  Synthetic polypeptide

SEQ ID NO: 19832 - protein, 724 aa, Artificial Sequence
  Synthetic polypeptide
VEYPKFKNPESEMLKNPKLFACQHDAQRKCSLEYFGFWTFRIPDAQPVYPELQITNVVEANQPVTIQNWCKRGRKQCKTHPHFVIPYRCLVGEFVSDALLVPDKCKFLHQERMDVCETHLHWHTVAKETCSEKSTNLHDYGMLLPCGIDKFRGVEFVCCPLAEESDNVDSADAEEDDSDVWWGGADTDYADGSEDKVVEVAEEEEVAEVEEEEADDDEDDEDGDEVEEEAEEPYEEATERTTSIATTTTTTTESVEEVVREVCSEQAETGPCRAMISRWYFDVTEGKCAPFFYGGCGGNRNNFDTEEYCMAVCGSAMSQSLLKTTQEPLARDPVKLPTTAASTPDAVDKYLETPGDENEHAHFQKAKERLEAKHRERMSQVMREWEEAERQAKNLPKADKKAVIQHFQEKVESLEQEAANERQQLVETHMARVEAMLNDRRRLALENYITALQAVPPRPRHVFNMLKKYVRAEQKDRQHTLKHFEHVRMVDPKKAAQIRSQVMTHLRVIYERMNQSLSLLYNVPAVAEEIQDEVDELLQKEQNYSDDVLANMISEPRISYGNDALMPSLTETKTTVELLPVNGEFSLDDLQPWHSFGADSVPANTENEGSGLTNIKTEEISEVKMDAEFRHDSGYEVHHQKLVFFAEDVGSNKGAIIGLMVGGVVIATVIVITLVMLKKKQYTSIHHGVVEVDAAVTPEERHLSKMQQNGYENPTYKFFEQMQN

SEQ ID NO: 19833 - protein, 686 aa, Artificial Sequence
  Synthetic polypeptide
VEYPKFKNPESEMLKNPKLFACQHDAQRKCSLEYFGFWTFRIPDAQPVYPELQITNVVEANQPVTIQNWCKRGRKQCKTHPHFVIPYRCLVGEFVSDALLVPDKCKFLHQERMDVCETHLHWHTVAKETCSEKSTNLHDYGMLLPCGIDKFRGVEFVCCPLAEESDNVDSADAEEDDSDVWWGGADTDYADGSEDKVVEVAEEEEVAEVEEEEADDDEDDEDGDEVEEEAEEPYEEATERTTSIATTTTTTTESVEEVVRVSQSLLKTTQEPLARDPVKLPTTAASTPDAVDKYLETPGDENEHAHFQKAKERLEAKHRERMSQVMREWEEAERQAKNLPKADKKAVIQHFQEKVESLEQEAANERQQLVETHMARVEAMLNDRRRLALENYITALQAVPPRPRHVFNMLKKYVRAEQKDRQHTLKHFEHVRMVDPKKAAQIRSQVMTHLRVIYERMNQSLSLLYNVPAVAEEIQDEVDELLQKEQNYSDDVLANMISEPRISYGNDALMPSLTETKTTVELLPVNGEFSLDDLQPWHSFGADSVPANTENEVEPVDARPAADRGLTTRPGSGLTNIKTEEISEVKMDAEFRHDSGYEVHHQKLVFFAEDVGSNKGAIIGLMVGGVVIATVIVITLVMLKKKQYTSIHHGVVEVDAAVTPEERHLSKMQQNGYENPTYKFFEQMQN

SEQ ID NO: 19834 - protein, 14 aa, Artificial Sequence
  Synthetic polypeptide
EDRLGPRVQGYSLP

SEQ ID NO: 19835 - protein, 14 aa, Artificial Sequence
  Synthetic polypeptide
EDRLGPRVQGYSLP

SEQ ID NO: 19836 - protein, 14 aa, Artificial Sequence
  Synthetic polypeptide
EDRLGPRVQGYSLP

SEQ ID NO: 19837 - protein, 14 aa, Artificial Sequence
  Synthetic polypeptide
EDRLGPRVQGYSLP

SEQ ID NO: 19838 - protein, 14 aa, Artificial Sequence
  Synthetic polypeptide
EDRLGPRVQGYSLP

SEQ ID NO: 19839 - protein, 14 aa, Artificial Sequence
  Synthetic polypeptide
EDRLGPRVQGYSLP

SEQ ID NO: 19840 - protein, 14 aa, Artificial Sequence
  Synthetic polypeptide
EDRLGPRVQGYSLP

SEQ ID NO: 19841 - protein, 14 aa, Artificial Sequence
  Synthetic polypeptide
EDRLGPRVQGYSLP

SEQ ID NO: 19842 - protein, 14 aa, Artificial Sequence
  Synthetic polypeptide
EDRLGPRVQGYSLP

SEQ ID NO: 19843 - protein, 721 aa, Artificial Sequence
  Synthetic polypeptide
PSSVAQTCSRSALSERIAWAQEYKVTVYPELQITNVVEANQPVTIQNWCKRGRKQCKTHPHFVIPYRCLVGEFVSDALLVPDKCKFLHQERMDVCETHLHWHTVAKETCSEKSTNLHDYGMLLPCGIDKFRGVEFVCCPLAEESDNVDSADAEEDDSDVWWGGADTDYADGSEDKVVEVAEEEEVAEVEEEEADDDEDDEDGDEVEEEAEEPYEEATERTTSIATTTTTTTESVEEVVREVCSEQAETGPCRAMISRWYFDVTEGKCAPFFYGGCGGNRNNFDTEEYCMAVCGSAMSQSLLKTTQEPLARDPVKLPTTAASTPDAVDKYLETPGDENEHAHFQKAKERLEAKHRERMSQVMREWEEAERQAKNLPKADKKAVIQHFQEKVESLEQEAANERQQLVETHMARVEAMLNDRRRLALENYITALQAVPPRPRHVFNMLKKYVRAEQKDRQHTLKHFEHVRMVDPKKAAQIRSQVMTHLRVIYERMNQSLSLLYNVPAVAEEIQDEVDELLQKEQNYSDDVLANMISEPRISYGNDALMPSLTETKTTVELLPVNGEFSLDDLQPWHSFGADSVPANTENEVEPVDARPAADRGLTTRPGSGLTNIKTEEISEVKMDAEFRHDSGYEVHHQKLVFFAEDVGSNKGAIIGLMVGGVVIATVIVITLVMLKKKQYTSIHHGVVEVDAAVTPEERHLSKMQQNGYENPTYKFFEQMQN

SEQ ID NO: 19844 - protein, 721 aa, Artificial Sequence; identical to SEQ ID NO: 19843
  Synthetic polypeptide

SEQ ID NO: 19845 - protein, 23 aa, Artificial Sequence
  Synthetic polypeptide
VRGSLGPKSTRLQSTLNCRSPMW

SEQ ID NO: 19846 - protein, 23 aa, Artificial Sequence
  Synthetic polypeptide
VRGSLGPKSTRLQSTLNCRSPMW

SEQ ID NO: 19847 - protein, 23 aa, Artificial Sequence
  Synthetic polypeptide
VRGSLGPKSTRLQSTLNCRSPMW

SEQ ID NO: 19848 - protein, 23 aa, Artificial Sequence
  Synthetic polypeptide
VRGSLGPKSTRLQSTLNCRSPMW

SEQ ID NO: 19849 - protein, 23 aa, Artificial Sequence
  Synthetic polypeptide
VRGSLGPKSTRLQSTLNCRSPMW

SEQ ID NO: 19850 - protein, 23 aa, Artificial Sequence
  Synthetic polypeptide
VRGSLGPKSTRLQSTLNCRSPMW

SEQ ID NO: 19851 - protein, 23 aa, Artificial Sequence
  Synthetic polypeptide
VRGSLGPKSTRLQSTLNCRSPMW

SEQ ID NO: 19852 - protein, 23 aa, Artificial Sequence
  Synthetic polypeptide
VRGSLGPKSTRLQSTLNCRSPMW

SEQ ID NO: 19853 - protein, 23 aa, Artificial Sequence
  Synthetic polypeptide
VRGSLGPKSTRLQSTLNCRSPMW

SEQ ID NO: 19854 - protein, 646 aa, Artificial Sequence
  Synthetic polypeptide
PSSVAQTCSRSALSERIAWAQEYKVTVYPELQITNVVEANQPVTIQNWCKRGRKQCKTHPHFVIPYRCLVGEFVSDALLVPDKCKFLHQERMDVCETHLHWHTVAKETCSEKSTNLHDYGMLLPCGIDKFRGVEFVCCPLAEESDNVDSADAEEDDSDVWWGGADTDYADGSEDKVVEVAEEEEVAEVEEEEADDDEDDEDGDEVEEEAEEPYEEATERTTSIATTTTTTTESVEEVVRVPTTAASTPDAVDKYLETPGDENEHAHFQKAKERLEAKHRERMSQVMREWEEAERQAKNLPKADKKAVIQHFQEKVESLEQEAANERQQLVETHMARVEAMLNDRRRLALENYITALQAVPPRPRHVFNMLKKYVRAEQKDRQHTLKHFEHVRMVDPKKAAQIRSQVMTHLRVIYERMNQSLSLLYNVPAVAEEIQDEVDELLQKEQNYSDDVLANMISEPRISYGNDALMPSLTETKTTVELLPVNGEFSLDDLQPWHSFGADSVPANTENEVEPVDARPAADRGLTTRPGSGLTNIKTEEISEVKMDAEFRHDSGYEVHHQKLVFFAEDVGSNKGAIIGLMVGGVVIATVIVITLVMLKKKQYTSIHHGVVEVDAAVTPEERHLSKMQQNGYENPTYKFFEQMQN

SEQ ID NO: 19855 - protein, 646 aa, Artificial Sequence; identical to SEQ ID NO: 19854
  Synthetic polypeptide

SEQ ID NO: 19856 - protein, 646 aa, Artificial Sequence; identical to SEQ ID NO: 19854
  Synthetic polypeptide

SEQ ID NO: 19857 - protein, 702 aa, Artificial Sequence
  Synthetic polypeptide
PSSVAQTCSRSALSERIAWAQEYKVTVYPELQITNVVEANQPVTIQNWCKRGRKQCKTHPHFVIPYRCLVGEFVSDALLVPDKCKFLHQERMDVCETHLHWHTVAKETCSEKSTNLHDYGMLLPCGIDKFRGVEFVCCPLAEESDNVDSADAEEDDSDVWWGGADTDYADGSEDKVVEVAEEEEVAEVEEEEADDDEDDEDGDEVEEEAEEPYEEATERTTSIATTTTTTTESVEEVVREVCSEQAETGPCRAMISRWYFDVTEGKCAPFFYGGCGGNRNNFDTEEYCMAVCGSAIPTTAASTPDAVDKYLETPGDENEHAHFQKAKERLEAKHRERMSQVMREWEEAERQAKNLPKADKKAVIQHFQEKVESLEQEAANERQQLVETHMARVEAMLNDRRRLALENYITALQAVPPRPRHVFNMLKKYVRAEQKDRQHTLKHFEHVRMVDPKKAAQIRSQVMTHLRVIYERMNQSLSLLYNVPAVAEEIQDEVDELLQKEQNYSDDVLANMISEPRISYGNDALMPSLTETKTTVELLPVNGEFSLDDLQPWHSFGADSVPANTENEVEPVDARPAADRGLTTRPGSGLTNIKTEEISEVKMDAEFRHDSGYEVHHQKLVFFAEDVGSNKGAIIGLMVGGVVIATVIVITLVMLKKKQYTSIHHGVVEVDAAVTPEERHLSKMQQNGYENPTYKFFEQMQN

SEQ ID NO: 19858 - protein, 702 aa, Artificial Sequence; identical to SEQ ID NO: 19857
  Synthetic polypeptide

SEQ ID NO: 19859 - protein, 703 aa, Artificial Sequence
  Synthetic polypeptide
PSSVAQTCSRSALSERIAWAQEYKVTVYPELQITNVVEANQPVTIQNWCKRGRKQCKTHPHFVIPYRCLVGEFVSDALLVPDKCKFLHQERMDVCETHLHWHTVAKETCSEKSTNLHDYGMLLPCGIDKFRGVEFVCCPLAEESDNVDSADAEEDDSDVWWGGADTDYADGSEDKVVEVAEEEEVAEVEEEEADDDEDDEDGDEVEEEAEEPYEEATERTTSIATTTTTTTESVEEVVREVCSEQAETGPCRAMISRWYFDVTEGKCAPFFYGGCGGNRNNFDTEEYCMAVCGSAMSQSLLKTTQEPLARDPVKLPTTAASTPDAVDKYLETPGDENEHAHFQKAKERLEAKHRERMSQVMREWEEAERQAKNLPKADKKAVIQHFQEKVESLEQEAANERQQLVETHMARVEAMLNDRRRLALENYITALQAVPPRPRHVFNMLKKYVRAEQKDRQHTLKHFEHVRMVDPKKAAQIRSQVMTHLRVIYERMNQSLSLLYNVPAVAEEIQDEVDELLQKEQNYSDDVLANMISEPRISYGNDALMPSLTETKTTVELLPVNGEFSLDDLQPWHSFGADSVPANTENEGSGLTNIKTEEISEVKMDAEFRHDSGYEVHHQKLVFFAEDVGSNKGAIIGLMVGGVVIATVIVITLVMLKKKQYTSIHHGVVEVDAAVTPEERHLSKMQQNGYENPTYKFFEQMQN

SEQ ID NO: 19860 - protein, 665 aa, Artificial Sequence
  Synthetic polypeptide
PSSVAQTCSRSALSERIAWAQEYKVTVYPELQITNVVEANQPVTIQNWCKRGRKQCKTHPHFVIPYRCLVGEFVSDALLVPDKCKFLHQERMDVCETHLHWHTVAKETCSEKSTNLHDYGMLLPCGIDKFRGVEFVCCPLAEESDNVDSADAEEDDSDVWWGGADTDYADGSEDKVVEVAEEEEVAEVEEEEADDDEDDEDGDEVEEEAEEPYEEATERTTSIATTTTTTTESVEEVVRVSQSLLKTTQEPLARDPVKLPTTAASTPDAVDKYLETPGDENEHAHFQKAKERLEAKHRERMSQVMREWEEAERQAKNLPKADKKAVIQHFQEKVESLEQEAANERQQLVETHMARVEAMLNDRRRLALENYITALQAVPPRPRHVFNMLKKYVRAEQKDRQHTLKHFEHVRMVDPKKAAQIRSQVMTHLRVIYERMNQSLSLLYNVPAVAEEIQDEVDELLQKEQNYSDDVLANMISEPRISYGNDALMPSLTETKTTVELLPVNGEFSLDDLQPWHSFGADSVPANTENEVEPVDARPAADRGLTTRPGSGLTNIKTEEISEVKMDAEFRHDSGYEVHHQKLVFFAEDVGSNKGAIIGLMVGGVVIATVIVITLVMLKKKQYTSIHHGVVEVDAAVTPEERHLSKMQQNGYENPTYKFFEQMQN

SEQ ID NO: 19861 - protein, 20 aa, Artificial Sequence
  Synthetic polypeptide
SQHFGRPRRADHEKLTHVQK

SEQ ID NO: 19862 - protein, 30 aa, Artificial Sequence
  Synthetic polypeptide
PGAVAHTCNPSTLGGRGGRIMRNLHMSKND

SEQ ID NO: 19863 - protein, 48 aa, Artificial Sequence
  Synthetic polypeptide
GLPSCMELQHPMHHRGDWLDALCSIRACQTNRGANQSEEEARRWERHF

SEQ ID NO: 19864 - protein, 86 aa, Artificial Sequence
  Synthetic polypeptide
MFYKGKSLSLGFHSLSSATMKDVRFTFHYDCEASPAAWNSNIPCTIVETGWMPCALSGHVRPTEGQIRVKRKPEDGRDIFEGTSCQ

SEQ ID NO: 19865 - protein, 48 aa, Artificial Sequence
  Synthetic polypeptide
KMCVSRSTMIVRPPQLHGTPTSHAPSWRLAGCPVLYQGMSDQQRGKSE

SEQ ID NO: 19866 - protein, 48 aa, Artificial Sequence; identical to SEQ ID NO: 19865
  Synthetic polypeptide

SEQ ID NO: 19867 - protein, 37 aa, Artificial Sequence
  Synthetic polypeptide
GLPSCMELQHPMHHRGDWLDALCSIRACQTNRGANQS

SEQ ID NO: 19868 - protein, 69 aa, Artificial Sequence
  Synthetic polypeptide
MFYKGKSLSLGFHSLSSATMKDVRFTFHYDCEASPAAWNSNIPCTIVETGWMPCALSGHVRPTEGQIRV

SEQ ID NO: 19869 - protein, 94 aa, Artificial Sequence
  Synthetic polypeptide
SMDSGARLPESESQPCNIPSEQGAAVGPSGRGASQDVPEPGQVTVAAAECRGHPSPAGPGPDDADHPALPPEPEAAAPRGHTGADIQRQKQGGS

SEQ ID NO: 19870 - protein, 731 aa, Artificial Sequence
  Synthetic polypeptide
AWTQEPDFLSLNPSPATYHLSRVLLWGPAAVEHHKTCRSLGRSLWQQPSVGDILRLLDRDRMMQTILHFPQNRRLLPPEDTQELIFKDKSRVDLDGLYDPCFLLQLFSELTRPEFVVDCRKFLDSNALGLTVTALSSYDPQMRAIAYHVLAAYYSHLEGARFQEQSQLLYLLDVVRNGIRTQDMRLTFTLALFIAKAALQILKPEEHMYLKVSNFLLSHEYLNMDKVPGFYQFFYSSDFEQKTEQKWVFGVLRQGIRDKQCYELCARRGIFHIILSFFHSPLCDEAAQNWILEILQNAAQVARSAYEIIRDYSLLTWILHILESKFLETPLLSNVISLLHTLWVTNLGDKAVEWESQRLCQPSSQEPAKRLALHLVNEFLYVLIVLMKHLRPTLAPVQLTNFFGTLDSVLRYRATVIQAFRDMNRFTVNETVLSTKDVLVLLHKWSLIERDLKLQEDLRAAIEKAQARELMKMLKDKNKPVMPARAKGPRGRKRRPGEAEEMADPELMASTLETCKGLLRSILTYWRPVIPGPDPTQEPVDSASPESDAPGPVYAAASLAVSWVLRSVAEHPLSRAEAAGLIGWLKSHILPHPVVVADLLKDSAVRSSIFRLYSRLCGAEGLAGPVQEVACLFNTVMLQLVAAQGRAGSPFHPAMEALSLSSLSEKDEATQASAAFLVSLYIKDIWLGAQRPDTLLTHVRMVCEAADDAPSSEEEAIVVLCKDAASAASDA

SEQ ID NO: 19871 - protein, 41 aa, Artificial Sequence
  Synthetic polypeptide
AGCCCGAQRPWSITRRAGAWAGHCGSSRVSGTSFACWTGTG

SEQ ID NO: 19872 - protein, 153 aa, Artificial Sequence
  Synthetic polypeptide
MEHKPEIKGNMSGNFTYIIDKLIPNTNYCVSVYLEHSDEQAVIKSPLKCTLLPPGQESESAESAKIGGIITVFLIALVLTSTIVTLKWIGYICLRNSLPKVLRQGLAKGWNAVAIHRCSHNALQSETPELKQSSCLSFPSSWDYKRASLCPSD

SEQ ID NO: 19873 - protein, 153 aa, Artificial Sequence; identical to SEQ ID NO: 19872
  Synthetic polypeptide

SEQ ID NO: 19874 - protein, 14 aa, Artificial Sequence
  Synthetic polypeptide
ATVFSSVEWSINPK

SEQ ID NO: 19875 - protein, 14 aa, Artificial Sequence
  Synthetic polypeptide
ATVFSSVEWSINPK

SEQ ID NO: 19876 - protein, 14 aa, Artificial Sequence
  Synthetic polypeptide
ATVFSSVEWSINPK

SEQ ID NO: 19877 - protein, 14 aa, Artificial Sequence
  Synthetic polypeptide
ATVFSSVEWSINPK

SEQ ID NO: 19878 - protein, 14 aa, Artificial Sequence
  Synthetic polypeptide
ATVFSSVEWSINPK

SEQ ID NO: 19879 - protein, 14 aa, Artificial Sequence
  Synthetic polypeptide
ATVFSSVEWSINPK

SEQ ID NO: 19880 - protein, 14 aa, Artificial Sequence
  Synthetic polypeptide
ATVFSSVEWSINPK

SEQ ID NO: 19881 - protein, 14 aa, Artificial Sequence
  Synthetic polypeptide
ATVFSSVEWSINPK

SEQ ID NO: 19882 - protein, 14 aa, Artificial Sequence
  Synthetic polypeptide
ATVFSSVEWSINPK

SEQ ID NO: 19883 - protein, 29 aa, Artificial Sequence
  Synthetic polypeptide
SVLSQTSSVTLEKLLSHTELQFSHPLNGA

SEQ ID NO: 19884 - protein, 29 aa, Artificial Sequence
  Synthetic polypeptide
SVLSQTSSVTLEKLLSHTELQFSHPLNGA

SEQ ID NO: 19885 - protein, 29 aa, Artificial Sequence
  Synthetic polypeptide
SVLSQTSSVTLEKLLSHTELQFSHPLNGA

SEQ ID NO: 19886 - protein, 29 aa, Artificial Sequence
  Synthetic polypeptide
SVLSQTSSVTLEKLLSHTELQFSHPLNGA

SEQ ID NO: 19887 - protein, 29 aa, Artificial Sequence
  Synthetic polypeptide
SVLSQTSSVTLEKLLSHTELQFSHPLNGA

SEQ ID NO: 19888 - protein, 29 aa, Artificial Sequence
  Synthetic polypeptide
SVLSQTSSVTLEKLLSHTELQFSHPLNGA

SEQ ID NO: 19889 - protein, 29 aa, Artificial Sequence
  Synthetic polypeptide
SVLSQTSSVTLEKLLSHTELQFSHPLNGA

SEQ ID NO: 19890 - protein, 29 aa, Artificial Sequence
  Synthetic polypeptide
SVLSQTSSVTLEKLLSHTELQFSHPLNGA

SEQ ID NO: 19891 - protein, 29 aa, Artificial Sequence
  Synthetic polypeptide
SVLSQTSSVTLEKLLSHTELQFSHPLNGA

SEQ ID NO: 19892 - protein, 337 aa, Artificial Sequence
  Synthetic polypeptide
MEHKPEIKGNMSGNFTYIIDKLIPNTNYCVSVYLEHSDEQAVIKSPLKCTLLPPGQESESAESAKIGGIITVFLIALVLTSTIVTLKWIGYICLRNSLPKVLNFHNFLAWPFPNLPPLEAMDMVEVIYINRKKKVWDYNYDDESDSDTEAAPRTSGGGYTMHGLTVRPLGQASATSTESQLIDPESEEEPDLPEVDVELPTMPKDSPQQLELLSGPCERRKSPLQDPFPEEDYSSTEGSGGRITFNVDLNSVFLRVLDDEDSDDLEAPLMLSSHLEEMVDPEDPDNVQSNHLLASGEGTQPTFPSPSSEGLWSEDAPSDQSDTSESDVDLGDGYIMR

SEQ ID NO: 19893 - protein, 337 aa, Artificial Sequence; identical to SEQ ID NO: 19892
  Synthetic polypeptide

SEQ ID NO: 19894 - protein, 61 aa, Artificial Sequence
  Synthetic polypeptide
MEHKPEIKGNMSGNFTYIIDKLIPNTNYCVSVYLEHSDEQAVIKSPLKCTLLPPGQESEFS

SEQ ID NO: 19895 - protein, 61 aa, Artificial Sequence; identical to SEQ ID NO: 19894
  Synthetic polypeptide

SEQ ID NO: 19896 - protein, 123 aa, Artificial Sequence
  Synthetic polypeptide
MEHKPEIKGNMSGNFTYIIDKLIPNTNYCVSVYLEHSDEQAVIKSPLKCTLLPPGQESESAESAKIGGIITVFLIALVLTSTIVTLKWIGYICLRNSLPKVLNFHNFLAWPFPNLPPLEAMDM

SEQ ID NO: 19897 - protein, 247 aa, Artificial Sequence
  Synthetic polypeptide
MEHKPEIKGNMSGNFTYIIDKLIPNTNYCVSVYLEHSDEQAVIKSPLKCTLLPPGQESALGMVPPPENVRMNSVNFKNILQWESPAFAKGNLTFTAQYLSYRIFQDKCMNTTLTECDFSSLSKYGDHTLRVRAEFADEHSDWVNITFCPVDDTIIGPPGMQVEVLADSLHMRFLAPKIENEYETWTMKNVYNSWTYNVQYWKNGTDEKFQITPQYDFEVLRNLEPWTTYCVQVRGFLPDRNKAGEWS

SEQ ID NO: 19898 - protein, 67 aa, Artificial Sequence
  Synthetic polypeptide
MEHKPEIKGNMSGNFTYIIDKLIPNTNYCVSVYLEHSDEQAVIKSPLKCTLLPPGQESVIGYSKINA

SEQ ID NO: 19899 - protein, 36 aa, Artificial Sequence
  Synthetic polypeptide
TLSSIREQVCLDSVSPQHLGACTLIYKFGRTEELWT

SEQ ID NO: 19900 - protein, 36 aa, Artificial Sequence; identical to SEQ ID NO: 19899
  Synthetic polypeptide

SEQ ID NO: 19901 - protein, 4 aa, Artificial Sequence
  Synthetic polypeptide
VLAL

SEQ ID NO: 19902 - protein, 4 aa, Artificial Sequence
  Synthetic polypeptide
VLAL

SEQ ID NO: 19903 - protein, 31 aa, Artificial Sequence
  Synthetic polypeptide
GASLSGLSLTPALRCLHSDLQIWKNRRAMDL

SEQ ID NO: 19904 - protein, 31 aa, Artificial Sequence; identical to SEQ ID NO: 19903
  Synthetic polypeptide

SEQ ID NO: 19905 - protein, 812 aa, Artificial Sequence
  Synthetic polypeptide
PEVGSLRPAWPTWRNPVSTENTKISWARWHMPVVPVPATWEAKVSNDLLLKIKDTVLQRTVDGMQQEGTPYTGILYAGIMLTKNGPKVLEFNCRFGDPECQVILPLLKSDLYEVIQSTLDGLLCTSLPVWLENHTALTVVMASKGYPGDYTKGVEITGFPEAQALGLEVFHAGTALKNGKVVTHGGRVLAVTAIRENLISALEEAKKGLAAIKFEGAIYRKDVGFRAIAFLQQPRSLTYKESGVDIAAGNMLVKKIQPLAKATSRSGCKVDLGGFAGLFDLKAAGFKDPLLASGTDGVGTKLKIAQLCNKHDTIGQDLVAMCVNDILAQGAEPLFFLDYFSCGKLDLSVTEAVVAGIAKACGKAGCALLGGETAEMPDMYPPGEYDLAGFAVGAMERDQKLPHLERITEGDVVVGIASSGLHSNGFSLVRKIVAKSSLQYSSPAPDGCGDQTLGDLLLTPTRIYSHSLLPVLRSGHVKAFAHITGGGLLENIPRVLPEKLGVDLDAQTWRIPRVFSWLQQEGHLSEEEMARTFNCGVGAVLVVSKEQTEQILRDIQQHKEEAWVIGSVVARAEGSPRVKVKNLIESMQINGSVLKNGSLTNHFSFEKKKARVAVLISGTGSNLQALIDSTREPNSSAQIDIVISNKAAVAGLDKAERAGIPTRVINHKLYKNRVEFDSAIDLVLEEFSIDIVCLAGFMRILSGPFVQKWNGKMLNIHPSLLPSFKGSNAHEQALETGVTVTGCTVHFVAEDVDAGQIILQEAVPVKRGDTVATLSERVKLAEHKIFPAALQLVASGTVQLGENGKICWVKEE

SEQ ID NO: 19906 - protein, 812 aa, Artificial Sequence; identical to SEQ ID NO: 19905
  Synthetic polypeptide

SEQ ID NO: 19907 - protein, 812 aa, Artificial Sequence; identical to SEQ ID NO: 19905
  Synthetic polypeptide

SEQ ID NO: 19908 - protein, 16 aa, Artificial Sequence
  Synthetic polypeptide
SQSQLLGKLRFLMIYY

SEQ ID NO: 19909 - protein, 16 aa, Artificial Sequence
  Synthetic polypeptide
SQSQLLGKLRFLMIYY

SEQ ID NO: 19910 - protein, 16 aa, Artificial Sequence
  Synthetic polypeptide
SQSQLLGKLRFLMIYY

SEQ ID NO: 19911 - protein, 16 aa, Artificial Sequence
  Synthetic polypeptide
SQSQLLGKLRFLMIYY

SEQ ID NO: 19912 - protein, 16 aa, Artificial Sequence
  Synthetic polypeptide
SQSQLLGKLRFLMIYY

SEQ ID NO: 19913 - protein, 108 aa, Artificial Sequence
  Synthetic polypeptide
PEVGSLRPAWPTWRNPVSTENTKISWARWHMPVVPVPATWEAKVSNDLLLKIKDTVLQRTVDGMQQEGTPYTGILYAGIMLTKNGPKVLEFNCRFGDPECQVGNPPTS

SEQ ID NO: 19914 - protein, 235 aa, Artificial Sequence
  Synthetic polypeptide
PEVGSLRPAWPTWRNPVSTENTKISWARWHMPVVPVPATWEAKVSNDLLLKIKDTVLQRTVDGMQQEGTPYTGILYAGIMLTKNGPKVLEFNCRFGDPECQVILPLLKSDLYEVIQSTLDGLLCTSLPVWLENHTALTVVMASKGYPGDYTKGVEITGFPEAQALGLEVFHAGTALKNGKVVTHGGRVLAVTAIRENLISALEEAKKGLAAIKFEGAIYRKDVGFRAIAFLQQPR

SEQ ID NO: 19915 - protein, 14 aa, Artificial Sequence
  Synthetic polypeptide
GQVMIQCPLTLKLR

SEQ ID NO: 19916 - protein, 2 aa, Artificial Sequence
  Synthetic polypeptide
AR

SEQ ID NO: 19917 - protein, 182 aa, Artificial Sequence
  Synthetic polypeptide
PGDDPMPFDIKAEMTLKTNFFATRNMCNELLPIMKPHGRVVNISSLQCLRAFENCSEDLQERFHSETLTEGDLVDLMKKFVEDTKNEVHEREGWPNSPYGVSKLGVTVLSRILARRLDEKRKADRILVNACCPGPVKTDMDGKDSIRTVEEGAETPVYLALLPPDATEPQGQLVHDKVVQNW

SEQ ID NO: 19918 - protein, 406 aa, Artificial Sequence
  Synthetic polypeptide
HLRYDLLANLVACTSESTVNPILSHHVCCMLVQAVVSLLAHLGDFITSFSACLFPFRLFSTQESEWGDPAPTEEIRDPLMQWLGKHVDSEGEIKSGQLSLRFVSSYVSEVEITPSCIPVVTNMEAFSSEHFNLEIYRQNLQTKQLGKVILFAEVTPTTMRLLDGLMFQTPQEMGLIVIAARQTEGKGRGGNVWLSPVGCALSTLLISIPLRSQLGQRIPFVQHLMSVAVVEAVRSIPEYQDINLRVKWPNDIYYSDLMKIGGVLVNSTLMGETFYILIGCGFNVTNSNPTICINDLITEYNKQHKAELKPLRADYLIARVVTVLEKLIKEFQDKGPNSVLPLYYRYWVHSGQQVHLGSAEGPKVSIVGLDDSGFLQVHQEGGEVVTVHPDGNSFDMLRNLILPKRR

SEQ ID NO: 19919 - protein, 406 aa, Artificial Sequence; identical to SEQ ID NO: 19918
  Synthetic polypeptide

SEQ ID NO: 19920 - protein, 46 aa, Artificial Sequence
  Synthetic polypeptide
LVSLLVCSPSGSSQHRSQSGVILLQQRKSGILLCSGLGNMWTPREK

SEQ ID NO: 19921 - protein, 46 aa, Artificial Sequence; identical to SEQ ID NO: 19920
  Synthetic polypeptide

SEQ ID NO: 19922 - protein, 32 aa, Artificial Sequence
  Synthetic polypeptide
SCSNRGNQGSSYAVAWETCGLRGRNKIRPALS

SEQ ID NO: 19923 - protein, 32 aa, Artificial Sequence; identical to SEQ ID NO: 19922
  Synthetic polypeptide

SEQ ID NO: 19924 - protein, 66 aa, Artificial Sequence
  Synthetic polypeptide
VLTRSGSSEVCGTSPTLSFSFSGHARHICFSFTFHYDCWSAVVQSRITAASTSQFKKFSCLSLLSS

SEQ ID NO: 19925 - protein, 66 aa, Artificial Sequence; identical to SEQ ID NO: 19924
  Synthetic polypeptide

SEQ ID NO: 19926 - protein, 81 aa, Artificial Sequence
  Synthetic polypeptide
EVIGSQGGTSPCFSLNNEFSQDLVLQKCVAPPLLSLSPSPAMQDISASPSPSTMIAGVQWFNHGSLQPPPPSSRNSHVSAS

SEQ ID NO: 19927 - protein, 81 aa, Artificial Sequence; identical to SEQ ID NO: 19926
  Synthetic polypeptide

SEQ ID NO: 19928 - protein, 62 aa, Artificial Sequence
  Synthetic polypeptide
VLTRSGSSEVCGTSPTLSFSFSGHARHICFSFTFHYDYKPWKSRKFWNDEAVHAKTESAGPV

SEQ ID NO: 19929 - protein, 62 aa, Artificial Sequence; identical to SEQ ID NO: 19928
  Synthetic polypeptide

SEQ ID NO: 19930 - protein, 87 aa, Artificial Sequence
  Synthetic polypeptide
EVIGSQGGTSPCFSLNNEFSQDLVLQKCVAPPLLSLSPSPAMQDISASPSPSTMITNLGNQESSGMMKLFMPRPKVLAQYESIQFMP

SEQ ID NO: 19931 - protein, 87 aa, Artificial Sequence; identical to SEQ ID NO: 19930
  Synthetic polypeptide

SEQ ID NO: 19932 - protein, 32 aa, Artificial Sequence
  Synthetic polypeptide
LCGSWADCPCCWASVASLYDVCLSGMQEDSIR

SEQ ID NO: 19933 - protein, 32 aa, Artificial Sequence; identical to SEQ ID NO: 19932
  Synthetic polypeptide

SEQ ID NO: 19934 - protein, 32 aa, Artificial Sequence; identical to SEQ ID NO: 19932
  Synthetic polypeptide

SEQ ID NO: 19935 - protein, 32 aa, Artificial Sequence; identical to SEQ ID NO: 19932
  Synthetic polypeptide

SEQ ID NO: 19936 - protein, 34 aa, Artificial Sequence
  Synthetic polypeptide
SYVDPGQIVHVAGPPLLHCMTSASQGCRKIQLDE

SEQ ID NO: 19937 - protein, 34 aa, Artificial Sequence; identical to SEQ ID NO: 19936
  Synthetic polypeptide

SEQ ID NO: 19938 - protein, 34 aa, Artificial Sequence; identical to SEQ ID NO: 19936
  Synthetic polypeptide

SEQ ID NO: 19939 - protein, 34 aa, Artificial Sequence; identical to SEQ ID NO: 19936
  Synthetic polypeptide

SEQ ID NO: 19940 - protein, 89 aa, Artificial Sequence
  Synthetic polypeptide
AGSGGCMSVFPATRKAEGSEKAEEGGETEAQKEGSEDVGNLPEAQEKNEEEGETATEETEEIAMEGAEGEAEEEEETAEGEEPGEDEDS

SEQ ID NO: 19941 - protein, 89 aa, Artificial Sequence; identical to SEQ ID NO: 19940
  Synthetic polypeptide

SEQ ID NO: 19942 - protein, 89 aa, Artificial Sequence; identical to SEQ ID NO: 19940
  Synthetic polypeptide

SEQ ID NO: 19943 - protein, 89 aa, Artificial Sequence; identical to SEQ ID NO: 19940
  Synthetic polypeptide

SEQ ID NO: 19944 - protein, 89 aa, Artificial Sequence; identical to SEQ ID NO: 19940
  Synthetic polypeptide

SEQ ID NO: 19945 - protein, 61 aa, Artificial Sequence
  Synthetic polypeptide
MAVVGACLYSQQLGRLRDQRRLKKVEKLRHKKRAVKMWATSLKPRRRMKKKERQPQKRRKK

SEQ ID NO: 19946 - protein, 61 aa, Artificial Sequence; identical to SEQ ID NO: 19945
  Synthetic polypeptide

SEQ ID NO: 19947 - protein, 61 aa, Artificial Sequence; identical to SEQ ID NO: 19945
  Synthetic polypeptide

SEQ ID NO: 19948 - protein, 61 aa, Artificial Sequence; identical to SEQ ID NO: 19945
  Synthetic polypeptide

SEQ ID NO: 19949 - protein, 61 aa, Artificial Sequence; identical to SEQ ID NO: 19945
  Synthetic polypeptide

SEQ ID NO: 19950 - protein, 61 aa, Artificial Sequence; identical to SEQ ID NO: 19945
  Synthetic polypeptide

SEQ ID NO: 19951 - protein, 67 aa, Artificial Sequence
  Synthetic polypeptide
AGSGGCMSVFPATRKAEGSEKAEEGGETEAQKEGSEDVGNLPEAQEKNEEEGETATEETEEIAMEGA

SEQ ID NO: 19952 - protein, 71 aa, Artificial Sequence
  Synthetic polypeptide
AGSGGCMSVFPATRKAEGSEKAEEGGETEAQKEGSEDVGNLPEAQEKNKMEAMKQHFKCLSTNQTQQNTLA

SEQ ID NO: 19953 - protein, 52 aa, Artificial Sequence
  Synthetic polypeptide
MAVVGACLYSQQLGRLRDQRRLKKVEKLRHKKRAVKMWATSLKPRRRIKWKL

SEQ ID NO: 19954 - protein, 36 aa, Artificial Sequence
  Synthetic polypeptide
KFLHLGLAHMPKLTSYRFSLTLEAVTLPWQEPRTPT

SEQ ID NO: 19955 - protein, 36 aa, Artificial Sequence; identical to SEQ ID NO: 19954
  Synthetic polypeptide

SEQ ID NO: 19956 - protein, 36 aa, Artificial Sequence; identical to SEQ ID NO: 19954
  Synthetic polypeptide

SEQ ID NO: 19957 - protein, 49 aa, Artificial Sequence
  Synthetic polypeptide
NQSVVTKARKWLLLGTRRERGIKEPFEVNRSFCILVWHTCQNSPATDSR

SEQ ID NO: 19958 - protein, 49 aa, Artificial Sequence; identical to SEQ ID NO: 19957
  Synthetic polypeptide

SEQ ID NO: 19959 - protein, 49 aa, Artificial Sequence; identical to SEQ ID NO: 19957
  Synthetic polypeptide

SEQ ID NO: 19960 - protein, 308 aa, Artificial Sequence
  Synthetic polypeptide
IEVSASWFGTHAKTHQLQILVDTGSSNFAVAGTPHSYIDTYFDTERSSTYRSKGFDVTVKYTQGSWTGFVGEDLVTIPKGFNTSFLVNIATIFESENFFLPGIKWNGILGLAYATLAKPSSSLETFFDSLVTQANIPNVFSMQMCGAGLPVAGSGTNGGSLVLGGIEPSLYKGDIWYTPIKEEWYYQIEILKLEIGGQSLNLDCREYNADKAIVDSGTTLLRLPQKVFDAVVEAVARASLIPEFSDGFWTGSQLACWTNSETPWSYFPKISIYLRDENSSRSFRITILPQKLQVLQCLKFPGLSQQRM

SEQ ID NO: 19961 - protein, 430 aa, Artificial Sequence
  Synthetic polypeptide
IEVSASWFGTHAKTHQLQILVDTGSSNFAVAGTPHSYIDTYFDTERSSTYRSKGFDVTVKYTQGSWTGFVGEDLVTIPKGFNTSFLVNIATIFESENFFLPGIKWNGILGLAYATLAKPSSSLETFFDSLVTQANIPNVFSMQMCGAGLPVAGSGTNGGSLVLGGIEPSLYKGDIWYTPIKEEWYYQIEILKLEIGGQSLNLDCREYNADKAIVDSGTTLLRLPQKVFDAVVEAVARASLIPEFSDGFWTGSQLACWTNSETPWSYFPKISIYLRDENSSRSFRITILPQLYIQPMMGAGLNYECYRFGISPSTNALVIGATVMEGFYVIFDRAQKRVGFAASPCAEIAGAAVSEISGPFSTEDVASNCVPAQSLSEPILWIVSYALMSVCGAILLVLIVLLLLPFRCQRRPRDPEVVNDESSLVRHRWK

SEQ ID NO: 19962 - protein, 380 aa, Artificial Sequence
  Synthetic polypeptide
IEVSASWFGTHAKTHQLQILVDTGSSNFAVAGTPHSYIDTYFDTERSSTYRSKGFDVTVKYTQGSWTGFVGEDLVTIPKGFNTSFLVNIATIFESENFFLPGIKWNGILGLAYATLAKPSSSLETFFDSLVTQANIPNVFSMQMCGAGLPVAGSGTNGGSLVLGGIEPSLYKGDIWYTPIKEEWYYQIEILKLEIGGQSLNLDCREYNADKAIVDSGTTLLRLPQKVFDAVVEAVARASLLYIQPMMGAGLNYECYRFGISPSTNALVIGATVMEGFYVIFDRAQKRVGFAASPCAEIAGAAVSEISGPFSTEDVASNCVPAQSLSEPILWIVSYALMSVCGAILLVLIVLLLLPFRCQRRPRDPEVVNDESSLVRHRWK

SEQ ID NO: 19963 - protein, 34 aa, Artificial Sequence
  Synthetic polypeptide
KFLHLGLAHMPKLTRFSLTLEAVTLPWQEPRTPT

SEQ ID NO: 19964 - protein, 34 aa, Artificial Sequence; identical to SEQ ID NO: 19963
  Synthetic polypeptide

SEQ ID NO: 19965 - protein, 34 aa, Artificial Sequence; identical to SEQ ID NO: 19963
  Synthetic polypeptide

SEQ ID NO: 19966 - protein, 47 aa, Artificial Sequence
  Synthetic polypeptide
NQSVVTKARKWLLLGTRRERGIKEPFEVNRSFCILVWHTCQNSPDSR

SEQ ID NO: 19967 - protein, 47 aa, Artificial Sequence; identical to SEQ ID NO: 19966
  Synthetic polypeptide

SEQ ID NO: 19968 - protein, 47 aa, Artificial Sequence; identical to SEQ ID NO: 19966
  Synthetic polypeptide

SEQ ID NO: 19969 - protein, 306 aa, Artificial Sequence
  Synthetic polypeptide
IEVSASWFGTHAKTHQILVDTGSSNFAVAGTPHSYIDTYFDTERSSTYRSKGFDVTVKYTQGSWTGFVGEDLVTIPKGFNTSFLVNIATIFESENFFLPGIKWNGILGLAYATLAKPSSSLETFFDSLVTQANIPNVFSMQMCGAGLPVAGSGTNGGSLVLGGIEPSLYKGDIWYTPIKEEWYYQIEILKLEIGGQSLNLDCREYNADKAIVDSGTTLLRLPQKVFDAVVEAVARASLIPEFSDGFWTGSQLACWTNSETPWSYFPKISIYLRDENSSRSFRITILPQKLQVLQCLKFPGLSQQRM

SEQ ID NO: 19970 - protein, 428 aa, Artificial Sequence
  Synthetic polypeptide
IEVSASWFGTHAKTHQILVDTGSSNFAVAGTPHSYIDTYFDTERSSTYRSKGFDVTVKYTQGSWTGFVGEDLVTIPKGFNTSFLVNIATIFESENFFLPGIKWNGILGLAYATLAKPSSSLETFFDSLVTQANIPNVFSMQMCGAGLPVAGSGTNGGSLVLGGIEPSLYKGDIWYTPIKEEWYYQIEILKLEIGGQSLNLDCREYNADKAIVDSGTTLLRLPQKVFDAVVEAVARASLIPEFSDGFWTGSQLACWTNSETPWSYFPKISIYLRDENSSRSFRITILPQLYIQPMMGAGLNYECYRFGISPSTNALVIGATVMEGFYVIFDRAQKRVGFAASPCAEIAGAAVSEISGPFSTEDVASNCVPAQSLSEPILWIVSYALMSVCGAILLVLIVLLLLPFRCQRRPRDPEVVNDESSLVRHRWK

SEQ ID NO: 19971 - protein, 378 aa, Artificial Sequence
  Synthetic polypeptide
IEVSASWFGTHAKTHQILVDTGSSNFAVAGTPHSYIDTYFDTERSSTYRSKGFDVTVKYTQGSWTGFVGEDLVTIPKGFNTSFLVNIATIFESENFFLPGIKWNGILGLAYATLAKPSSSLETFFDSLVTQANIPNVFSMQMCGAGLPVAGSGTNGGSLVLGGIEPSLYKGDIWYTPIKEEWYYQIEILKLEIGGQSLNLDCREYNADKAIVDSGTTLLRLPQKVFDAVVEAVARASLLYIQPMMGAGLNYECYRFGISPSTNALVIGATVMEGFYVIFDRAQKRVGFAASPCAEIAGAAVSEISGPFSTEDVASNCVPAQSLSEPILWIVSYALMSVCGAILLVLIVLLLLPFRCQRRPRDPEVVNDESSLVRHRWK

SEQ ID NO: 19972 - protein, 12 aa, Artificial Sequence
  Synthetic polypeptide
HFGRPRQADHKV

SEQ ID NO: 19973 - protein, 12 aa, Artificial Sequence
  Synthetic polypeptide
HFGRPRQADHKV

SEQ ID NO: 19974 - protein, 12 aa, Artificial Sequence
  Synthetic polypeptide
HFGRPRQADHKV

SEQ ID NO: 19975 - protein, 284 aa, Artificial Sequence
  Synthetic polypeptide
PGAVAHACNPSTLGGRGRQITRSSTYRSKGFDVTVKYTQGSWTGFVGEDLVTIPKGFNTSFLVNIATIFESENFFLPGIKWNGILGLAYATLAKPSSSLETFFDSLVTQANIPNVFSMQMCGAGLPVAGSGTNGGSLVLGGIEPSLYKGDIWYTPIKEEWYYQIEILKLEIGGQSLNLDCREYNADKAIVDSGTTLLRLPQKVFDAVVEAVARASLIPEFSDGFWTGSQLACWTNSETPWSYFPKISIYLRDENSSRSFRITILPQKLQVLQCLKFPGLSQQRM

SEQ ID NO: 19976 - protein, 34 aa, Artificial Sequence
  Synthetic polypeptide
RAQWLTPVILALWEAEAGRSQGLAHTAPRALTSQ

SEQ ID NO: 19977 - protein, 34 aa, Artificial Sequence; identical to SEQ ID NO: 19976
  Synthetic polypeptide

SEQ ID NO: 19978 - protein, 34 aa, Artificial Sequence; identical to SEQ ID NO: 19976
  Synthetic polypeptide

SEQ ID NO: 19979 - protein, 406 aa, Artificial Sequence
  Synthetic polypeptide
PGAVAHACNPSTLGGRGRQITRSSTYRSKGFDVTVKYTQGSWTGFVGEDLVTIPKGFNTSFLVNIATIFESENFFLPGIKWNGILGLAYATLAKPSSSLETFFDSLVTQANIPNVFSMQMCGAGLPVAGSGTNGGSLVLGGIEPSLYKGDIWYTPIKEEWYYQIEILKLEIGGQSLNLDCREYNADKAIVDSGTTLLRLPQKVFDAVVEAVARASLIPEFSDGFWTGSQLACWTNSETPWSYFPKISIYLRDENSSRSFRITILPQLYIQPMMGAGLNYECYRFGISPSTNALVIGATVMEGFYVIFDRAQKRVGFAASPCAEIAGAAVSEISGPFSTEDVASNCVPAQSLSEPILWIVSYALMSVCGAILLVLIVLLLLPFRCQRRPRDPEVVNDESSLVRHRWK

SEQ ID NO: 19980 - protein, 356 aa, Artificial Sequence
  Synthetic polypeptide
PGAVAHACNPSTLGGRGRQITRSSTYRSKGFDVTVKYTQGSWTGFVGEDLVTIPKGFNTSFLVNIATIFESENFFLPGIKWNGILGLAYATLAKPSSSLETFFDSLVTQANIPNVFSMQMCGAGLPVAGSGTNGGSLVLGGIEPSLYKGDIWYTPIKEEWYYQIEILKLEIGGQSLNLDCREYNADKAIVDSGTTLLRLPQKVFDAVVEAVARASLLYIQPMMGAGLNYECYRFGISPSTNALVIGATVMEGFYVIFDRAQKRVGFAASPCAEIAGAAVSEISGPFSTEDVASNCVPAQSLSEPILWIVSYALMSVCGAILLVLIVLLLLPFRCQRRPRDPEVVNDESSLVRHRWK

SEQ ID NO: 19981 - protein, 284 aa, Artificial Sequence
  Synthetic polypeptide
HFGRPRQADHKVKRSRPSWPTWSSTYRSKGFDVTVKYTQGSWTGFVGEDLVTIPKGFNTSFLVNIATIFESENFFLPGIKWNGILGLAYATLAKPSSSLETFFDSLVTQANIPNVFSMQMCGAGLPVAGSGTNGGSLVLGGIEPSLYKGDIWYTPIKEEWYYQIEILKLEIGGQSLNLDCREYNADKAIVDSGTTLLRLPQKVFDAVVEAVARASLIPEFSDGFWTGSQLACWTNSETPWSYFPKISIYLRDENSSRSFRITILPQKLQVLQCLKFPGLSQQRM

SEQ ID NO: 19982 - protein, 45 aa, Artificial Sequence
  Synthetic polypeptide
PGAVAHACNPSTLGGRGRQITRSRDRDHPGQHGLAHTAPRALTSQ

SEQ ID NO: 19983 - protein, 45 aa, Artificial Sequence; identical to SEQ ID NO: 19982
  Synthetic polypeptide

SEQ ID NO: 19984 - protein, 45 aa, Artificial Sequence; identical to SEQ ID NO: 19982
  Synthetic polypeptide

SEQ ID NO: 19985 - protein, 33 aa, Artificial Sequence
  Synthetic polypeptide
RAQWLTPVILALWEAEAGRSQGQEIETILANMV

SEQ ID NO: 19986 - protein, 33 aa, Artificial Sequence; identical to SEQ ID NO: 19985
  Synthetic polypeptide

SEQ ID NO: 19987 - protein, 33 aa, Artificial Sequence; identical to SEQ ID NO: 19985
  Synthetic polypeptide

SEQ ID NO: 19988 - protein, 406 aa, Artificial Sequence
  Synthetic polypeptide
HFGRPRQADHKVKRSRPSWPTWSSTYRSKGFDVTVKYTQGSWTGFVGEDLVTIPKGFNTSFLVNIATIFESENFFLPGIKWNGILGLAYATLAKPSSSLETFFDSLVTQANIPNVFSMQMCGAGLPVAGSGTNGGSLVLGGIEPSLYKGDIWYTPIKEEWYYQIEILKLEIGGQSLNLDCREYNADKAIVDSGTTLLRLPQKVFDAVVEAVARASLIPEFSDGFWTGSQLACWTNSETPWSYFPKISIYLRDENSSRSFRITILPQLYIQPMMGAGLNYECYRFGISPSTNALVIGATVMEGFYVIFDRAQKRVGFAASPCAEIAGAAVSEISGPFSTEDVASNCVPAQSLSEPILWIVSYALMSVCGAILLVLIVLLLLPFRCQRRPRDPEVVNDESSLVRHRWK

SEQ ID NO: 19989 - protein, 356 aa, Artificial Sequence
  Synthetic polypeptide
HFGRPRQADHKVKRSRPSWPTWSSTYRSKGFDVTVKYTQGSWTGFVGEDLVTIPKGFNTSFLVNIATIFESENFFLPGIKWNGILGLAYATLAKPSSSLETFFDSLVTQANIPNVFSMQMCGAGLPVAGSGTNGGSLVLGGIEPSLYKGDIWYTPIKEEWYYQIEILKLEIGGQSLNLDCREYNADKAIVDSGTTLLRLPQKVFDAVVEAVARASLLYIQPMMGAGLNYECYRFGISPSTNALVIGATVMEGFYVIFDRAQKRVGFAASPCAEIAGAAVSEISGPFSTEDVASNCVPAQSLSEPILWIVSYALMSVCGAILLVLIVLLLLPFRCQRRPRDPEVVNDESSLVRHRWK

SEQ ID NO: 19990 - protein, 97 aa, Artificial Sequence
  Synthetic polypeptide
SKHRKRILGSQNRLQSTPLLHLPGSQTWEWDWVGGYSRVFRGFGSYLYTLLDFKEVQENSSVIPFNLLTLLLFEGTYIRAPCWRHCQELPFPEAAGS

SEQ ID NO: 19991 - protein, 97 aa, Artificial Sequence; identical to SEQ ID NO: 19990
  Synthetic polypeptide

SEQ ID NO: 19992 - protein, 97 aa, Artificial Sequence; identical to SEQ ID NO: 19990
  Synthetic polypeptide

SEQ ID NO: 19993 - protein, 97 aa, Artificial Sequence; identical to SEQ ID NO: 19990
  Synthetic polypeptide

SEQ ID NO: 19994 - protein, 97 aa, Artificial Sequence; identical to SEQ ID NO: 19990
  Synthetic polypeptide

SEQ ID NO: 19995 - protein, 45 aa, Artificial Sequence
  Synthetic polypeptide
HYFYLKERILELRVGGTVRSCPSQRQRDRDQMPAGAETEETCERR

SEQ ID NO: 19996 - protein, 45 aa, Artificial Sequence; identical to SEQ ID NO: 19995
  Synthetic polypeptide

SEQ ID NO: 19997 - protein, 45 aa, Artificial Sequence; identical to SEQ ID NO: 19995
  Synthetic polypeptide

SEQ ID NO: 19998 - protein, 45 aa, Artificial Sequence; identical to SEQ ID NO: 19995
  Synthetic polypeptide

SEQ ID NO: 19999 - protein, 45 aa, Artificial Sequence; identical to SEQ ID NO: 19995
  Synthetic polypeptide

SEQ ID NO: 20000 - protein, 596 aa, Artificial Sequence
  Synthetic polypeptide
SKHRKRILGSQNRLQSTPLLHLPGSQTWEWDWVGGYSRVFRGFGSYLYTLLDFKEVQENSSVIPFNLLTLLLFEGTYIRAQNAIAGEGMGISHELITLEISSRDVPDLTLIDLPGITRVAVGNQPADIGYKIKTLIKKYIQRQETISLVVVPSNVDIATTEALSMAQEVDPEGDRTIGILTKPDLVDKGTEDKVVDVVRNLVFHLKKGYMIVKCRGQQEIQDQLSLSEALQREKIFFENHPYFRDLLEEGKATVPCLAEKLTSELITHICKSLPLLENQIKETHQRITEELQKYGVDIPEDENEKMFFLIDKVNAFNQDITALMQGEETVGEEDIRLFTRLRHEFHKWSTIIENNFQEGHKILSRKIQKFENQYRGRELPGFVNYRTFETIVKQQIKALEEPAVDMLHTVTDMVRLAFTDVSIKNFEEFFNLHRTAKSKIEDIRAEQEREGEKLIRLHFQMEQIVYCQDQVYRGALQKVREKELEEEKKKKSWDFGAFQSSSATDSSMEEIFQHLMAYHQEASKRISSHIPLIIQFFMLQTYGQQLQKAMLQLLQDKDTYSWLLKERSDTSDKRKFLKERLARLTQARRRLAQFPG

SEQ ID NO: 20001 - protein, 596 aa, Artificial Sequence; identical to SEQ ID NO: 20000
  Synthetic polypeptide

SEQ ID NO: 20002 - protein, 596 aa, Artificial Sequence; identical to SEQ ID NO: 20000
  Synthetic polypeptide

SEQ ID NO: 20003 - protein, 596 aa, Artificial Sequence; identical to SEQ ID NO: 20000
  Synthetic polypeptide

SEQ ID NO: 20004 - protein, 26 aa, Artificial Sequence
  Synthetic polypeptide
HYFYLKERILEPRMPSPGKEWESVMS

SEQ ID NO: 20005 - protein, 26 aa, Artificial Sequence
  Synthetic polypeptide
HYFYLKERILEPRMPSPGKEWESVMS

SEQ ID NO: 20006 - protein, 26 aa, Artificial Sequence
  Synthetic polypeptide
HYFYLKERILEPRMPSPGKEWESVMS

SEQ ID NO: 20007 - protein, 26 aa, Artificial Sequence
  Synthetic polypeptide
HYFYLKERILEPRMPSPGKEWESVMS

SEQ ID NO: 20008 - protein, 26 aa, Artificial Sequence
  Synthetic polypeptide
HYFYLKERILEPRMPSPGKEWESVMS

SEQ ID NO: 20009 - protein, 26 aa, Artificial Sequence
  Synthetic polypeptide
HYFYLKERILEPRMPSPGKEWESVMS

SEQ ID NO: 20010 - protein, 131 aa, Artificial Sequence
  Synthetic polypeptide
SKHRKRILGSQNRLQSTPLLHLPGSQTWEWDWVGGYSRVFRGFGSYLYTLLDFKEVQENSSVIPFNLLTLLLFEGTYIRAQNAIAGEGMGISHELITLEISSRDVPDLTLIDLPGITRVAVGNQPADIGYK

SEQ ID NO: 20011 - protein, 135 aa, Artificial Sequence
  Synthetic polypeptide
SKHRKRILGSQNRLQSTPLLHLPGSQTWEWDWVGGYSRVFRGFGSYLYTLLDFKEVQENSSVIPFNLLTLLLFEGTYIRAQNAIAGEGMGISHELITLEISSRDVPDLTLIDLPGITRVAVGNQPADIGYKIKTL

SEQ ID NO: 20012 - protein, 28 aa, Artificial Sequence
  Synthetic polypeptide
TKELEIASEQLIQRYGPACFHRCFDKKF

SEQ ID NO: 20013 - protein, 28 aa, Artificial Sequence
  Synthetic polypeptide
TKELEIASEQLIQRYGPACFHRCFDKKF

SEQ ID NO: 20014 - protein, 28 aa, Artificial Sequence
  Synthetic polypeptide
TKELEIASEQLIQRYGPACFHRCFDKKF

SEQ ID NO: 20015 - protein, 28 aa, Artificial Sequence
  Synthetic polypeptide
TKELEIASEQLIQRYGPACFHRCFDKKF

SEQ ID NO: 20016 - protein, 192 aa, Artificial Sequence
  Synthetic polypeptide
PQNSSFRDMVRLAFTDVSIKNFEEFFNLHRTAKSKIEDIRAEQEREGEKLIRLHFQMEQIVYCQDQVYRGALQKVREKELEEEKKKKSWDFGAFQSSSATDSSMEEIFQHLMAYHQEASKRISSHIPLIIQFFMLQTYGQQLQKAMLQLLQDKDTYSWLLKERSDTSDKRKFLKERLARLTQARRRLAQFPG

SEQ ID NO: 20017 - protein, 192 aa, Artificial Sequence; identical to SEQ ID NO: 20016
  Synthetic polypeptide

SEQ ID NO: 20018 - protein, 192 aa, Artificial Sequence; identical to SEQ ID NO: 20016
  Synthetic polypeptide

SEQ ID NO: 20019 - protein, 192 aa, Artificial Sequence; identical to SEQ ID NO: 20016
  Synthetic polypeptide

SEQ ID NO: 20020 - protein, 23 aa, Artificial Sequence
  Synthetic polypeptide
GAGDSLRTAHSEIWSGLLSQMFR

SEQ ID NO: 20021 - protein, 23 aa, Artificial Sequence
  Synthetic polypeptide
GAGDSLRTAHSEIWSGLLSQMFR

SEQ ID NO: 20022 - protein, 23 aa, Artificial Sequence
  Synthetic polypeptide
GAGDSLRTAHSEIWSGLLSQMFR

SEQ ID NO: 20023 - protein, 23 aa, Artificial Sequence
  Synthetic polypeptide
GAGDSLRTAHSEIWSGLLSQMFR

SEQ ID NO: 20024 - protein, 28 aa, Artificial Sequence
  Synthetic polypeptide
SFSPSIIVILNIPDTYHYSMLLITARWL

SEQ ID NO: 20025 - protein, 543 aa, Artificial Sequence
  Synthetic polypeptide
FSGSQDFESYNTSFPGSPVCRWQIVELLTLHNCHIEHSRYLSLLDAVDNSKMALNSGSPPAIGPYYENHGYQPENPYPAQPTVVPTVYEVHPAQYYPSPVPQYAPRVLTQASNPVVCTQPKSPSGTVCTSKTKKALCITLTLGTFLVGAALAAGLLWKFMGSKCSNSGIECDSSGTCINPSNWCDGVSHCPGGEDENRCVRLYGPNFILQVYSSQRKSWHPVCQDDWNENYGRAACRDMGYKNNFYSSQGIVDDSGSTSFMKLNTSAGNVDIYKKLYHSDACSSKAVVSLRCIACGVNLNSSRQSRIVGGESALPGAWPWQVSLHVQNVHVCGGSIITPEWIVTAAHCVEKPLNNPWHWTAFAGILRQSFMFYGAGYQVEKVISHPNYDSKTKNNDIALMKLQKPLTFNDLVKPVCLPNPGMMLQPEQLCWISGWGATEEKGKTSEVLNAAKVLLIETQRCNSRYVYDNLITPAMICAGFLQGNVDSCQGDSGGPLVTSKNNIWWLIGDTSWGSGCAKAYRPGVYGNVMVFTDWIYRQMRADG

SEQ ID NO: 20026 - protein, 526 aa, Artificial Sequence
  Synthetic polypeptide
MVNFMCQADLVMGCPGHIEHSRYLSLLDAVDNSKMALNSGSPPAIGPYYENHGYQPENPYPAQPTVVPTVYEVHPAQYYPSPVPQYAPRVLTQASNPVVCTQPKSPSGTVCTSKTKKALCITLTLGTFLVGAALAAGLLWKFMGSKCSNSGIECDSSGTCINPSNWCDGVSHCPGGEDENRCVRLYGPNFILQVYSSQRKSWHPVCQDDWNENYGRAACRDMGYKNNFYSSQGIVDDSGSTSFMKLNTSAGNVDIYKKLYHSDACSSKAVVSLRCIACGVNLNSSRQSRIVGGESALPGAWPWQVSLHVQNVHVCGGSIITPEWIVTAAHCVEKPLNNPWHWTAFAGILRQSFMFYGAGYQVEKVISHPNYDSKTKNNDIALMKLQKPLTFNDLVKPVCLPNPGMMLQPEQLCWISGWGATEEKGKTSEVLNAAKVLLIETQRCNSRYVYDNLITPAMICAGFLQGNVDSCQGDSGGPLVTSKNNIWWLIGDTSWGSGCAKAYRPGVYGNVMVFTDWIYRQMRADG

SEQ ID NO: 20027 - protein, 36 aa, Artificial Sequence
  Synthetic polypeptide
WLILCVKLTWSWDAQVILNIPDTYHYSMLLITARWL

SEQ ID NO: 20028 - protein, 9 aa, Artificial Sequence
  Synthetic polypeptide
LGHGMPRSY

SEQ ID NO: 20029 - protein, 49 aa, Artificial Sequence
  Synthetic polypeptide
TTSTPPGSSPLRTKLHPSGVLISEEVLAPCVPRRLERELRAGGLQGHGL

SEQ ID NO: 20030 - protein, 49 aa, Artificial Sequence; identical to SEQ ID NO: 20029
  Synthetic polypeptide

SEQ ID NO: 20031 - protein, 49 aa, Artificial Sequence; identical to SEQ ID NO: 20029
  Synthetic polypeptide

SEQ ID NO: 20032 - protein, 49 aa, Artificial Sequence; identical to SEQ ID NO: 20029
  Synthetic polypeptide

SEQ ID NO: 20033 - protein, 49 aa, Artificial Sequence; identical to SEQ ID NO: 20029
  Synthetic polypeptide

SEQ ID NO: 20034 - protein, 390 aa, Artificial Sequence
  Synthetic polypeptide
NLRLPPGHAELHMPLNQKAKRELCIGWGDPSGLPRRSYRLLLLHQEVRLYGPNFILQVYSSQRKSWHPVCQDDWNENYGRAACRDMGYKNNFYSSQGIVDDSGSTSFMKLNTSAGNVDIYKKLYHSDACSSKAVVSLRCIACGVNLNSSRQSRIVGGESALPGAWPWQVSLHVQNVHVCGGSIITPEWIVTAAHCVEKPLNNPWHWTAFAGILRQSFMFYGAGYQVEKVISHPNYDSKTKNNDIALMKLQKPLTFNDLVKPVCLPNPGMMLQPEQLCWISGWGATEEKGKTSEVLNAAKVLLIETQRCNSRYVYDNLITPAMICAGFLQGNVDSCQGDSGGPLVTSKNNIWWLIGDTSWGSGCAKAYRPGVYGNVMVFTDWIYRQMRADG

SEQ ID NO: 20035 - protein, 390 aa, Artificial Sequence; identical to SEQ ID NO: 20034
  Synthetic polypeptide

SEQ ID NO: 20036 - protein, 390 aa, Artificial Sequence; identical to SEQ ID NO: 20034
  Synthetic polypeptide

SEQ ID NO: 20037 - protein, 82 aa, Artificial Sequence
  Synthetic polypeptide
IKRQRESYALAGETHLDYQGEAIDYFYSTRKFASTDQTSSFRCTHLRGSPGTLCAKTTGTRTTGGRPAGTWAIRIIFTLAKE

SEQ ID NO: 20038 - protein, 82 aa, Artificial Sequence; identical to SEQ ID NO: 20037
  Synthetic polypeptide

SEQ ID NO: 20039 - protein, 82 aa, Artificial Sequence; identical to SEQ ID NO: 20037
  Synthetic polypeptide

SEQ ID NO: 20040 - protein, 82 aa, Artificial Sequence; identical to SEQ ID NO: 20037
  Synthetic polypeptide

SEQ ID NO: 20041 - protein, 82 aa, Artificial Sequence; identical to SEQ ID NO: 20037
  Synthetic polypeptide

SEQ ID NO: 20042 - protein, 387 aa, Artificial Sequence
  Synthetic polypeptide
NLRLPPGHAELHMPLNQKAKRELCIGWGDPSGLPRRSYRLLLLHQEVRLYGPNFILQVYSSQRKSWHPVCQDDWNENYGRAACRDMGYKNNFYSSQGIVDDSGSTSFMKLNTSAGNVDIYKKLYHSDACSSKAVVSLRCIACGVNLNSSRQSRIVGGESALPGAWPWQVSLHVQNVHVCGGSIITPEWIVTAAHCVEKPLNNPWHWTAFAGILRQSFMFYGAGYQVEKVISHPNYDSKTKNNDIALMKLQKPLTFNDLVKPVCLPNPGMMLQPEQLCWISGWGATEEKGKTSEVLNAAKVLLIETQRCNSRYVYDNLITPAMICAGFLQGNVDSCQGDSGGPLVTSKNNIWWLIGDTSWGSGCAKAYRPGVYGNVMVFTDWIYRQMR

SEQ ID NO: 20043 - protein, 157 aa, Artificial Sequence
  Synthetic polypeptide
NLRLPPGHAELHMPLNQKAKRELCIGWGDPSGLPRRSYRLLLLHQEVRLYGPNFILQVYSSQRKSWHPVCQDDWNENYGRAACRDMGYKNNFYSSQGIVDDSGSTSFMKLNTSAGNVDIYKKLYHSDACSSKAVVSLRCIACGVNLNSSRQSRIVGG

SEQ ID NO: 20044 - protein, 9 aa, Artificial Sequence
  Synthetic polypeptide
TTSTPPGRD

SEQ ID NO: 20045 - protein, 9 aa, Artificial Sequence
  Synthetic polypeptide
TTSTPPGRD

SEQ ID NO: 20046 - protein, 9 aa, Artificial Sequence
  Synthetic polypeptide
TTSTPPGRD

SEQ ID NO: 20047 - protein, 9 aa, Artificial Sequence
  Synthetic polypeptide
TTSTPPGRD

SEQ ID NO: 20048 - protein, 9 aa, Artificial Sequence
  Synthetic polypeptide
TTSTPPGRD

SEQ ID NO: 20049 - protein, 459 aa, Artificial Sequence
  Synthetic polypeptide
NLRLPPGHAELHMPLNQKAKRELCIGWGDPSGLPRRSYRLLLLHQEETKKALCITLTLGTFLVGAALAAGLLWKFMGSKCSNSGIECDSSGTCINPSNWCDGVSHCPGGEDENRCVRLYGPNFILQVYSSQRKSWHPVCQDDWNENYGRAACRDMGYKNNFYSSQGIVDDSGSTSFMKLNTSAGNVDIYKKLYHSDACSSKAVVSLRCIACGVNLNSSRQSRIVGGESALPGAWPWQVSLHVQNVHVCGGSIITPEWIVTAAHCVEKPLNNPWHWTAFAGILRQSFMFYGAGYQVEKVISHPNYDSKTKNNDIALMKLQKPLTFNDLVKPVCLPNPGMMLQPEQLCWISGWGATEEKGKTSEVLNAAKVLLIETQRCNSRYVYDNLITPAMICAGFLQGNVDSCQGDSGGPLVTSKNNIWWLIGDTSWGSGCAKAYRPGVYGNVMVFTDWIYRQMRADG

SEQ ID NO: 20050 - protein, 459 aa, Artificial Sequence; identical to SEQ ID NO: 20049
  Synthetic polypeptide

SEQ ID NO: 20051 - protein, 459 aa, Artificial Sequence; identical to SEQ ID NO: 20049
  Synthetic polypeptide

SEQ ID NO: 20052 - protein, 40 aa, Artificial Sequence
  Synthetic polypeptide
IKRQRESYALAGETHLDYQGEAIDYFYSTRKRLRKHCASP

SEQ ID NO: 20053 - protein, 40 aa, Artificial Sequence; identical to SEQ ID NO: 20052
  Synthetic polypeptide

SEQ ID NO: 20054 - protein, 40 aa, Artificial Sequence; identical to SEQ ID NO: 20052
  Synthetic polypeptide

SEQ ID NO: 20055 - protein, 40 aa, Artificial Sequence; identical to SEQ ID NO: 20052
  Synthetic polypeptide

SEQ ID NO: 20056 - protein, 40 aa, Artificial Sequence; identical to SEQ ID NO: 20052
  Synthetic polypeptide

SEQ ID NO: 20057 - protein, 456 aa, Artificial Sequence
  Synthetic polypeptide
NLRLPPGHAELHMPLNQKAKRELCIGWGDPSGLPRRSYRLLLLHQEETKKALCITLTLGTFLVGAALAAGLLWKFMGSKCSNSGIECDSSGTCINPSNWCDGVSHCPGGEDENRCVRLYGPNFILQVYSSQRKSWHPVCQDDWNENYGRAACRDMGYKNNFYSSQGIVDDSGSTSFMKLNTSAGNVDIYKKLYHSDACSSKAVVSLRCIACGVNLNSSRQSRIVGGESALPGAWPWQVSLHVQNVHVCGGSIITPEWIVTAAHCVEKPLNNPWHWTAFAGILRQSFMFYGAGYQVEKVISHPNYDSKTKNNDIALMKLQKPLTFNDLVKPVCLPNPGMMLQPEQLCWISGWGATEEKGKTSEVLNAAKVLLIETQRCNSRYVYDNLITPAMICAGFLQGNVDSCQGDSGGPLVTSKNNIWWLIGDTSWGSGCAKAYRPGVYGNVMVFTDWIYRQMR

SEQ ID NO: 20058 - protein, 186 aa, Artificial Sequence
  Synthetic polypeptide
NLRLPPGHAELHMPLNQKAKRELCIGWGDPSGLPRRSYRLLLLHQEETKKALCITLTLGTFLVGAALAAGLLWKFIRLYGPNFILQVYSSQRKSWHPVCQDDWNENYGRAACRDMGYKNNFYSSQGIVDDSGSTSFMKLNTSAGNVDIYKKLYHSDACSSKAVVSLRCIACGVNLNSSRQSRIVGG

SEQ ID NO: 20059 - protein, 59 aa, Artificial Sequence
  Synthetic polypeptide
TTSTPPGRGHHQLLDLTMKTMDTNRKTPIPHSPLWSPLSTRCIRLSTTRPPCPSTPRGS

SEQ ID NO: 20060 - protein, 59 aa, Artificial Sequence; identical to SEQ ID NO: 20059
  Synthetic polypeptide

SEQ ID NO: 20061 - protein, 59 aa, Artificial Sequence; identical to SEQ ID NO: 20059
  Synthetic polypeptide

SEQ ID NO: 20062 - protein, 59 aa, Artificial Sequence; identical to SEQ ID NO: 20059
  Synthetic polypeptide

SEQ ID NO: 20063 - protein, 59 aa, Artificial Sequence; identical to SEQ ID NO: 20059
  Synthetic polypeptide

SEQ ID NO: 20064 - protein, 59 aa, Artificial Sequence; identical to SEQ ID NO: 20059
  Synthetic polypeptide

SEQ ID NO: 20065 - protein, 56 aa, Artificial Sequence
  Synthetic polypeptide
NLRLPPGHAELHMPLNQKAKRELCIGWGDPSGLPRRSYRLLLLHQEGVTTSYWTLL

SEQ ID NO: 20066 - protein, 56 aa, Artificial Sequence; identical to SEQ ID NO: 20065
  Synthetic polypeptide

SEQ ID NO: 20067 - protein, 56 aa, Artificial Sequence; identical to SEQ ID NO: 20065
  Synthetic polypeptide

SEQ ID NO: 20068 - protein, 56 aa, Artificial Sequence; identical to SEQ ID NO: 20065
  Synthetic polypeptide

SEQ ID NO: 20069 - protein, 56 aa, Artificial Sequence; identical to SEQ ID NO: 20065
  Synthetic polypeptide

SEQ ID NO: 20070 - protein, 56 aa, Artificial Sequence; identical to SEQ ID NO: 20065
  Synthetic polypeptide

SEQ ID NO: 20071 - protein, 518 aa, Artificial Sequence
  Synthetic polypeptide
IKRQRESYALAGETHLDYQGEAIDYFYSTRKGSPPAIGPYYENHGYQPENPYPAQPTVVPTVYEVHPAQYYPSPVPQYAPRVLTQASNPVVCTQPKSPSGTVCTSKTKKALCITLTLGTFLVGAALAAGLLWKFMGSKCSNSGIECDSSGTCINPSNWCDGVSHCPGGEDENRCVRLYGPNFILQVYSSQRKSWHPVCQDDWNENYGRAACRDMGYKNNFYSSQGIVDDSGSTSFMKLNTSAGNVDIYKKLYHSDACSSKAVVSLRCIACGVNLNSSRQSRIVGGESALPGAWPWQVSLHVQNVHVCGGSIITPEWIVTAAHCVEKPLNNPWHWTAFAGILRQSFMFYGAGYQVEKVISHPNYDSKTKNNDIALMKLQKPLTFNDLVKPVCLPNPGMMLQPEQLCWISGWGATEEKGKTSEVLNAAKVLLIETQRCNSRYVYDNLITPAMICAGFLQGNVDSCQGDSGGPLVTSKNNIWWLIGDTSWGSGCAKAYRPGVYGNVMVFTDWIYRQMRADG

SEQ ID NO: 20072 - protein, 518 aa, Artificial Sequence; identical to SEQ ID NO: 20071
  Synthetic polypeptide

SEQ ID NO: 20073 - protein, 518 aa, Artificial Sequence; identical to SEQ ID NO: 20071
  Synthetic polypeptide

SEQ ID NO: 20074 - protein, 515 aa, Artificial Sequence
  Synthetic polypeptide
IKRQRESYALAGETHLDYQGEAIDYFYSTRKGSPPAIGPYYENHGYQPENPYPAQPTVVPTVYEVHPAQYYPSPVPQYAPRVLTQASNPVVCTQPKSPSGTVCTSKTKKALCITLTLGTFLVGAALAAGLLWKFMGSKCSNSGIECDSSGTCINPSNWCDGVSHCPGGEDENRCVRLYGPNFILQVYSSQRKSWHPVCQDDWNENYGRAACRDMGYKNNFYSSQGIVDDSGSTSFMKLNTSAGNVDIYKKLYHSDACSSKAVVSLRCIACGVNLNSSRQSRIVGGESALPGAWPWQVSLHVQNVHVCGGSIITPEWIVTAAHCVEKPLNNPWHWTAFAGILRQSFMFYGAGYQVEKVISHPNYDSKTKNNDIALMKLQKPLTFNDLVKPVCLPNPGMMLQPEQLCWISGWGATEEKGKTSEVLNAAKVLLIETQRCNSRYVYDNLITPAMICAGFLQGNVDSCQGDSGGPLVTSKNNIWWLIGDTSWGSGCAKAYRPGVYGNVMVFTDWIYRQMR

SEQ ID NO: 20075 - protein, 245 aa, Artificial Sequence
  Synthetic polypeptide
IKRQRESYALAGETHLDYQGEAIDYFYSTRKGSPPAIGPYYENHGYQPENPYPAQPTVVPTVYEVHPAQYYPSPVPQYAPRVLTQASNPVVCTQPKSPSGTVCTSKTKKALCITLTLGTFLVGAALAAGLLWKFIRLYGPNFILQVYSSQRKSWHPVCQDDWNENYGRAACRDMGYKNNFYSSQGIVDDSGSTSFMKLNTSAGNVDIYKKLYHSDACSSKAVVSLRCIACGVNLNSSRQSRIVGG

SEQ ID NO: 20076 - protein, 105 aa, Artificial Sequence
  Synthetic polypeptide
IKRQRESYALAGETHLDYQGEAIDYFYSTRKGSPPAIGPYYENHGYQPENPYPAQPTVVPTVYEVHPAQYYPSPVPQYAPRVLTQASNPVVCTQPKSPSGTVCTS

SEQ ID NO: 20077 - protein, 56 aa, Artificial Sequence
  Synthetic polypeptide
GLHRLPQRQRLGACRLLSTGRFPEGGALARAQQLRAPCPIPRPVHLFICTEPSFLF

SEQ ID NO: 20078 - protein, 56 aa, Artificial Sequence; identical to SEQ ID NO: 20077
  Synthetic polypeptide

SEQ ID NO: 20079 - protein, 57 aa, Artificial Sequence
  Synthetic polypeptide
ARGGSRRVEPWRGHSSSELPAPYLALCISSSVQSLHFYFDISAVCKFSLISKAYQHS

SEQ ID NO: 20080 - protein, 57 aa, Artificial Sequence; identical to SEQ ID NO: 20079
  Synthetic polypeptide

SEQ ID NO: 20081 - protein, 619 aa, Artificial Sequence
  Synthetic polypeptide
LWRAPGQPPGGLVARATDHVIRGWDSTRGPLGRGGSPQRWSGSPVAGVLLDRACVMRPPQTPSTTAFGGLQAAEHGEVPGGWSPGEGTAAPSSLPHTSPCASLHLYRAFIFILTFLLYASFHLSRKPISIVKGELHKYCTAWDEADVRFSSQNRKSGSAAPHQLPDNETDCGWAPFDKNNYQQLLGALDYSFLCAYAVGMYLSGIIGERLPIRYYLTFGMLASGAFTALFGLGYFYNIHSFGFYVVTQVINGLVQTTGWPSVVTCLGNWFGKGRRGLIMGVWNSHTSVGNILGSLIAGYWVSTCWGLSFVVPGAIVAAMGIVCFLFLIEHPNDVRCSSTLVTHSKGYENGTNRLRLQKQILKSEKNKPLDPEMQCLLLSDGKGSIHPNHVVILPGDGGSGTAAISFTGALKIPGVIEFSLCLLFAKLVSYTFLFWLPLYITNVDHLDAKKAGELSTLFDVGGIFGGILAGVISDRLEKRASTCGLMLLLAAPTLYIFSTVSKMGLEATIAMLLLSGALVSGPYTLITTAVSADLGTHKSLKGNAHALSTVTAIIDGTGSVGAALGPLLAGLLSPSGWSNVFYMLMFADACALLFLIRLIHKELSCPGSATGDQVPFKEQ

SEQ ID NO: 20082 - protein, 619 aa, Artificial Sequence; identical to SEQ ID NO: 20081
  Synthetic polypeptide

SEQ ID NO: 20083 - protein, 35 aa, Artificial Sequence
  Synthetic polypeptide
GQARWLTPVIQALWEAKAADHEEIETILANTETVP

SEQ ID NO: 20084 - protein, 35 aa, Artificial Sequence; identical to SEQ ID NO: 20083
  Synthetic polypeptide

SEQ ID NO: 20085 - protein, 35 aa, Artificial Sequence; identical to SEQ ID NO: 20083
  Synthetic polypeptide

SEQ ID NO: 20086 - protein, 35 aa, Artificial Sequence; identical to SEQ ID NO: 20083
  Synthetic polypeptide

SEQ ID NO: 20087 - protein, 35 aa, Artificial Sequence; identical to SEQ ID NO: 20083
  Synthetic polypeptide

SEQ ID NO: 20088 - protein, 35 aa, Artificial Sequence; identical to SEQ ID NO: 20083
  Synthetic polypeptide

SEQ ID NO: 20089 - protein, 35 aa, Artificial Sequence; identical to SEQ ID NO: 20083
  Synthetic polypeptide

SEQ ID NO: 20090 - protein, 35 aa, Artificial Sequence; identical to SEQ ID NO: 20083
  Synthetic polypeptide

SEQ ID NO: 20091 - protein, 35 aa, Artificial Sequence; identical to SEQ ID NO: 20083
  Synthetic polypeptide

SEQ ID NO: 20092 - protein, 35 aa, Artificial Sequence; identical to SEQ ID NO: 20083
  Synthetic polypeptide

SEQ ID NO: 20093 - protein, 35 aa, Artificial Sequence; identical to SEQ ID NO: 20083
  Synthetic polypeptide

SEQ ID NO: 20094 - protein, 35 aa, Artificial Sequence; identical to SEQ ID NO: 20083
  Synthetic polypeptide

SEQ ID NO: 20095 - protein, 35 aa, Artificial Sequence; identical to SEQ ID NO: 20083
  Synthetic polypeptide

SEQ ID NO: 20096 - protein, 35 aa, Artificial Sequence; identical to SEQ ID NO: 20083
  Synthetic polypeptide

SEQ ID NO: 20097 - protein, 26 aa, Artificial Sequence
  Synthetic polypeptide
SKHFGRPRRRITRRSRPSWLTRRLCL

SEQ ID NO: 20098 - protein, 26 aa, Artificial Sequence
  Synthetic polypeptide
SKHFGRPRRRITRRSRPSWLTRRLCL

SEQ ID NO: 20099 - protein, 26 aa, Artificial Sequence
  Synthetic polypeptide
SKHFGRPRRRITRRSRPSWLTRRLCL

SEQ ID NO: 20100 - protein, 26 aa, Artificial Sequence
  Synthetic polypeptide
SKHFGRPRRRITRRSRPSWLTRRLCL

SEQ ID NO: 20101 - protein, 26 aa, Artificial Sequence
  Synthetic polypeptide
SKHFGRPRRRITRRSRPSWLTRRLCL

SEQ ID NO: 20102 - protein, 26 aa, Artificial Sequence
  Synthetic polypeptide
SKHFGRPRRRITRRSRPSWLTRRLCL

SEQ ID NO: 20103 - protein, 26 aa, Artificial Sequence
  Synthetic polypeptide
SKHFGRPRRRITRRSRPSWLTRRLCL

SEQ ID NO: 20104 - protein, 26 aa, Artificial Sequence
  Synthetic polypeptide
SKHFGRPRRRITRRSRPSWLTRRLCL

SEQ ID NO: 20105 - protein, 26 aa, Artificial Sequence
  Synthetic polypeptide
SKHFGRPRRRITRRSRPSWLTRRLCL

SEQ ID NO: 20106 - protein, 26 aa, Artificial Sequence
  Synthetic polypeptide
SKHFGRPRRRITRRSRPSWLTRRLCL

SEQ ID NO: 20107 - protein, 26 aa, Artificial Sequence
  Synthetic polypeptide
SKHFGRPRRRITRRSRPSWLTRRLCL

SEQ ID NO: 20108 - protein, 26 aa, Artificial Sequence
  Synthetic polypeptide
SKHFGRPRRRITRRSRPSWLTRRLCL

SEQ ID NO: 20109 - protein, 26 aa, Artificial Sequence
  Synthetic polypeptide
SKHFGRPRRRITRRSRPSWLTRRLCL

SEQ ID NO: 20110 - protein, 26 aa, Artificial Sequence
  Synthetic polypeptide
SKHFGRPRRRITRRSRPSWLTRRLCL

SEQ ID NO: 20111 - protein, 5 aa, Artificial Sequence
  Synthetic polypeptide
HGDCA

SEQ ID NO: 20112 - protein, 5 aa, Artificial Sequence
  Synthetic polypeptide
HGDCA

SEQ ID NO: 20113 - protein, 5 aa, Artificial Sequence
  Synthetic polypeptide
HGDCA

SEQ ID NO: 20114 - protein, 5 aa, Artificial Sequence
  Synthetic polypeptide
HGDCA

SEQ ID NO: 20115 - protein, 5 aa, Artificial Sequence
  Synthetic polypeptide
HGDCA

SEQ ID NO: 20116 - protein, 5 aa, Artificial Sequence
  Synthetic polypeptide
HGDCA

SEQ ID NO: 20117 - protein, 5 aa, Artificial Sequence
  Synthetic polypeptide
HGDCA

SEQ ID NO: 20118 - protein, 5 aa, Artificial Sequence
  Synthetic polypeptide
HGDCA

SEQ ID NO: 20119 - protein, 5 aa, Artificial Sequence
  Synthetic polypeptide
HGDCA

SEQ ID NO: 20120 - protein, 5 aa, Artificial Sequence
  Synthetic polypeptide
HGDCA

SEQ ID NO: 20121 - protein, 5 aa, Artificial Sequence
  Synthetic polypeptide
HGDCA

SEQ ID NO: 20122 - protein, 5 aa, Artificial Sequence
  Synthetic polypeptide
HGDCA

SEQ ID NO: 20123 - protein, 5 aa, Artificial Sequence
  Synthetic polypeptide
HGDCA

SEQ ID NO: 20124 - protein, 5 aa, Artificial Sequence
  Synthetic polypeptide
HGDCA

SEQ ID NO: 20125 - protein, 45 aa, Artificial Sequence
  Synthetic polypeptide
CFLNGSCSCWTSPQRAQLPTDYAPGSPGVSRTCFYGFFVCGIREE

SEQ ID NO: 20126 - protein, 45 aa, Artificial Sequence; identical to SEQ ID NO: 20125
  Synthetic polypeptide

SEQ ID NO: 20127 - protein, 474 aa, Artificial Sequence
  Synthetic polypeptide
TAPAPAGQAHRGPSFQQTMLQEAQVFRGLASTVSLSAESGKSEKGQPQNSKKQSPPKNVVEPKERGKLLATQTAAELSKNLSSPSSYPPAVNKGRKVASPSPSGSVLFTDEGVPKFLSRKTLVEFPQKVLSPFRKQGSDSEARQVGRKVTSPSSSSSSSSSDSESDDEADVSEVTPRVVSKGRGGLRKPEASHSFENRAPRVTVSAKEKTLLQKPHVDITDPEKPHQPKKKGSPAKPSEGRENARPKTTMPRSQVDEEFLKQSLKEKQLQKTFRLNEIDKESQKPFEVKGPLPVHTKSGLSAPPKGSPAPAVLAEEARAEGQLQASPPGAAEGHLEKPVPEPQRKAAPPLPRKETSGTQGIEGHLKGGQAIVEDQIPPSNLETVPVENNHGFHEKTAALKLEAEGEAMEDAAAPGDDRGGTQEPAPVPAEPFDNTTYKNLQHHDYSTYTFLDLNLELSKFRMPQPSSGRESPRH

SEQ ID NO: 20128 - protein, 61 aa, Artificial Sequence
  Synthetic polypeptide
FPERLLLLLDKPTEGPASNRLCSRKPRCFEDLLLRFLCLRNQGRVKRVSHRIPRSKVHQKM

SEQ ID NO: 20129 - protein, 109 aa, Artificial Sequence
  Synthetic polypeptide
TAPAPAGQAHRGPSFQQTMLQEAQVFRGLASTVSLSAESGKSEKGQPQNSKKQSPPKKPAPVPAEPFDNTTYKNLQHHDYSTYTFLDLNLELSKFRMPQPSSGRESPRH

SEQ ID NO: 20130 - protein, 88 aa, Artificial Sequence
  Synthetic polypeptide
FPERLLLLLDKPTEGPASNRLCSRKPRCFEDLLLRFLCLRNQGRVKRVSHRIPRSKVHQKSQPQCLLSRLTTLPTRTCSIMTTARTPS

SEQ ID NO: 20131 - protein, 217 aa, Artificial Sequence
  Synthetic polypeptide
EDRLSLGVQNQPRQHVCDPVLGDKWDGEGSMYVPEDLLPVYKEKVVPLADIITPNQFEAELLSGRKIHSQEEALRVMDMLHSMGPDTVVITSSDLPSPQGSNYLIVLGSQRRRNPAGSVVMERIRMDIRKVDAVFVGTGDLFAAMLLAWTHKHPNNLKVACEKTVSTLHHVLQRTIQCAKAQAGEGVRPSPMQLELRMVQSKRDIEDPEIVVQATVL

SEQ ID NO: 20132 - protein, 217 aa, Artificial Sequence; identical to SEQ ID NO: 20131
  Synthetic polypeptide

SEQ ID NO: 20133 - protein, 217 aa, Artificial Sequence; identical to SEQ ID NO: 20131
  Synthetic polypeptide

SEQ ID NO: 20134 - protein, 55 aa, Artificial Sequence
  Synthetic polypeptide
EFKTSLGNMCVIQSWVTSGTAKARCTSRRTSFPSTKKKWCRLQTLSRPTSLRPSY

SEQ ID NO: 20135 - protein, 55 aa, Artificial Sequence; identical to SEQ ID NO: 20134
  Synthetic polypeptide

SEQ ID NO: 20136 - protein, 55 aa, Artificial Sequence; identical to SEQ ID NO: 20134
  Synthetic polypeptide

SEQ ID NO: 20137 - protein, 24 aa, Artificial Sequence
  Synthetic polypeptide
ALWEAKVRGSLKPRSSKPASATCV

SEQ ID NO: 20138 - protein, 24 aa, Artificial Sequence
  Synthetic polypeptide
ALWEAKVRGSLKPRSSKPASATCV

SEQ ID NO: 20139 - protein, 24 aa, Artificial Sequence
  Synthetic polypeptide
ALWEAKVRGSLKPRSSKPASATCV

SEQ ID NO: 20140 - protein, 21 aa, Artificial Sequence
  Synthetic polypeptide
PGGGLTSQCLSFFTGGCEDRE

SEQ ID NO: 20141 - protein, 21 aa, Artificial Sequence
  Synthetic polypeptide
PGGGLTSQCLSFFTGGCEDRE

SEQ ID NO: 20142 - protein, 21 aa, Artificial Sequence
  Synthetic polypeptide
PGGGLTSQCLSFFTGGCEDRE

SEQ ID NO: 20143 - protein, 21 aa, Artificial Sequence
  Synthetic polypeptide
PGGGLTSQCLSFFTGGCEDRE

SEQ ID NO: 20144 - protein, 137 aa, Artificial Sequence
  Synthetic polypeptide
PPSASVSSQEGVKTENDHINLKVAGQDGSVVQFKIKRHTPLSKLMKAYCERQGLSMRQIRFRFDGQPINETDTPAQVRSWLRVVPGRLPICAGWRWRTRTPSTCSSSRREVCRRAAWQGTVSRGPVPSPGRPSSHCC

SEQ ID NO: 20145 - protein, 29 aa, Artificial Sequence
  Synthetic polypeptide
RPGQARRRSPALTWGWFDLPVPQFLHRRV

SEQ ID NO: 20146 - protein, 29 aa, Artificial Sequence
  Synthetic polypeptide
RPGQARRRSPALTWGWFDLPVPQFLHRRV

SEQ ID NO: 20147 - protein, 29 aa, Artificial Sequence
  Synthetic polypeptide
RPGQARRRSPALTWGWFDLPVPQFLHRRV

SEQ ID NO: 20148 - protein, 29 aa, Artificial Sequence
  Synthetic polypeptide
RPGQARRRSPALTWGWFDLPVPQFLHRRV

SEQ ID NO: 20149 - protein, 105 aa, Artificial Sequence
  Synthetic polypeptide
PPSASVSSQEGVKTENDHINLKVAGQDGSVVQFKIKRHTPLSKLMKAYCERQGLSMRQIRFRFDGQPINETDTPAQLEMEDEDTIDVFQQQTGGVPESSLAGHSF

SEQ ID NO: 20150 - protein, 143 aa, Artificial Sequence
  Synthetic polypeptide
PPSASVSSQEGVKTENDHINLKVAGQDGSVVQFKIKRHTPLSKLMKAYCERQVRHLAPPQSLPVCALVLCVPGIPRARASRGWTQMQLPEGLSMRQIRFRFDGQPINETDTPAQLEMEDEDTIDVFQQQTGGVPESSLAGHSF

SEQ ID NO: 20151 - protein, 149 aa, Artificial Sequence
  Synthetic polypeptide
PPSASVSSQEGVKTENDHINLKVAGQDGSVVQFKIKRHTPLSKLMKAYCERQGLSMRQIRFRFDGQPINETDTPAQGIILSWKELWTWKQTFFFETESRFVAQARMQWRSLSSLCKLCLLSSRHSPASASQVAGTIGAHHHSRLIFLYF

SEQ ID NO: 20152 - protein, 31 aa, Artificial Sequence
  Synthetic polypeptide
LPQFLQVMGGTQWEVTPSGPHLSFLTAPSAP

SEQ ID NO: 20153 - protein, 31 aa, Artificial Sequence; identical to SEQ ID NO: 20152
  Synthetic polypeptide

SEQ ID NO: 20154 - protein, 31 aa, Artificial Sequence; identical to SEQ ID NO: 20152
  Synthetic polypeptide

SEQ ID NO: 20155 - protein, 31 aa, Artificial Sequence; identical to SEQ ID NO: 20152
  Synthetic polypeptide

SEQ ID NO: 20156 - protein, 31 aa, Artificial Sequence; identical to SEQ ID NO: 20152
  Synthetic polypeptide

SEQ ID NO: 20157 - protein, 30 aa, Artificial Sequence
  Synthetic polypeptide
DMVWLCPHPNLILNCSSHNSYRSWEGLSGR

SEQ ID NO: 20158 - protein, 30 aa, Artificial Sequence; identical to SEQ ID NO: 20157
  Synthetic polypeptide

SEQ ID NO: 20159 - protein, 30 aa, Artificial Sequence; identical to SEQ ID NO: 20157
  Synthetic polypeptide

SEQ ID NO: 20160 - protein, 30 aa, Artificial Sequence; identical to SEQ ID NO: 20157
  Synthetic polypeptide

SEQ ID NO: 20161 - protein, 30 aa, Artificial Sequence; identical to SEQ ID NO: 20157
  Synthetic polypeptide

SEQ ID NO: 20162 - protein, 384 aa, Artificial Sequence
  Synthetic polypeptide
IVAPTIPTGHGRDSVGGDAFWAPSVLPHSTLSTLSHHPQPQFGRRMESKVSEGGLNVTLTIRLLMHGKEVGSIIGKKGETVKKMREESGARINISEGNCPERIVTITGPTDAIFKAFAMIAYKFEEDIINSMSNSPATSKPPVTLRLVVPASQCGSLIGKGGSKIKEIRESTGAQVQVAGDMLPNSTERAVTISGTPDAIIQCVKQICVVMLESPPKGATIPYRPKPASTPVIFAGGQAYTIQGQYAIPHPDQLTKLHQLAMQQTPFPPLGQTNPAFPGEKLPLHSSEEAQNLMGQSSGLDASPPASTHELTIPNDLIGCIIGRQGTKINEIRQMSGAQIKIANATEGSSERQITITGTPANISLAQYLINARLTSEVTGMGTL

SEQ ID NO: 20163 - protein, 384 aa, Artificial Sequence; identical to SEQ ID NO: 20162
  Synthetic polypeptide

SEQ ID NO: 20164 - protein, 364 aa, Artificial Sequence
  Synthetic polypeptide
IVAPTIPTGHGRDSVGGDAFWAPSVLPHSTLSTLSHHPQPQFGRRMESKVSEGGLNVTLTIRLLMHGKEVGSIIGKKGETVKKMREESGARINISEGNCPERIVTITGPTDAIFKAFAMIAYKFEEDIINSMSNSPATSKPPVTLRLVVPASQCGSLIGKGGSKIKEIRESTGAQVQVAGDMLPNSTERAVTISGTPDAIIQCVKQICVVMLESPPKGATIPYRPKPASTPVIFAGGQAYTIQGQYAIPHPDQLTKLHQLAMQQTPFPPLGQTNPAFPGLDASPPASTHELTIPNDLIGCIIGRQGTKINEIRQMSGAQIKIANATEGSSERQITITGTPANISLAQYLINARLTSEVTGMGTL

SEQ ID NO: 20165 - protein, 358 aa, Artificial Sequence
  Synthetic polypeptide
IVAPTIPTGHGRDSVGGDAFWAPSVLPHSTLSTLSHHPQPQFGRRMESKVSEGGLNVTLTIRLLMHGKEVGSIIGKKGETVKKMREESGARINISEGNCPERIVTITGPTDAIFKAFAMIAYKFEEDIINSMSNSPATSKPPVTLRLVVPASQCGSLIGKGGSKIKEIRESTGAQVQVAGDMLPNSTERAVTISGTPDAIIQCVKQICVVMLEAYTIQGQYAIPHPDLTKLHQLAMQQTPFPPLGQTNPAFPGEKLPLHSSEEAQNLMGQSSGLDASPPASTHELTIPNDLIGCIIGRQGTKINEIRQMSGAQIKIANATEGSSERQITITGTPANISLAQYLINARLTSEVTGMGTL

SEQ ID NO: 20166 - protein, 383 aa, Artificial Sequence
  Synthetic polypeptide
IVAPTIPTGHGRDSVGGDAFWAPSVLPHSTLSTLSHHPQPQFGRRMESKVSEGGLNVTLTIRLLMHGKEVGSIIGKKGETVKKMREESGARINISEGNCPERIVTITGPTDAIFKAFAMIAYKFEEDIINSMSNSPATSKPPVTLRLVVPASQCGSLIGKGGSKIKEIRESTGAQVQVAGDMLPNSTERAVTISGTPDAIIQCVKQICVVMLESPPKGATIPYRPKPASTPVIFAGGQAYTIQGQYAIPHPDLTKLHQLAMQQTPFPPLGQTNPAFPGEKLPLHSSEEAQNLMGQSSGLDASPPASTHELTIPNDLIGCIIGRQGTKINEIRQMSGAQIKIANATEGSSERQITITGTPANISLAQYLINARLTSEVTGMGTL

SEQ ID NO: 20167 - protein, 37 aa, Artificial Sequence
  Synthetic polypeptide
DGEGRGGMGRDGEGRSGRREGGDGVPRPARLQGLARV

SEQ ID NO: 20168 - protein, 714 aa, Artificial Sequence
  Synthetic polypeptide
TGRDEEEWGEMGRDGVDGVKGEMGYPGLPGCKGSPGFDGIQGPPGPKGDPGAFGLKGEKGEPGADGEAGRPGSSGPSGDEGQPGEPGPPGEKGEAGDEGNPGPDGAPGERGGPGERGPRGTPGTRGPRGDPGEAGPQGDQGREGPVGVPGDPGEAGPIGPKGYRGDEGPPGSEGARGAPGPAGPPGDPGLMGERGEDGPAGNGTEGFPGFPGYPGNRGAPGINGTKGYPGLKGDEGEAGDPGDDNNDIAPRGVKGAKGYRGPEGPQGPPGHQGPPGPDECEILDIIMKMCSCCECKCGPIDLLFVLDSSESIGLQNFEIAKDFVVKVIDRLSRDELVKFEPGQSYAGVVQYSHSQMQEHVSLRSPSIRNVQELKEAIKSLQWMAGGTFTGEALQYTRDQLLPPSPNNRIALVITDGRSDTQRDTTPLNVLCSPGIQVVSVGIKDVFDFIPGSDQLNVISCQGLAPSQGRPGLSLVKENYAELLEDAFLKNVTAQICIDKKCPDYTCPITFSSPADITILLDGSASVGSHNFDTTKRFAKRLAERFLTAGRTDPAHDVRVAVVQYSGTGQQRPERASLQFLQNYTALASAVDAMDFINDATDVNDALGYVTRFYREASSGAAKKRLLLFSDGNSQGATPAAIEKAVQEAQRAGIEIFVVVVGRQVNEPHIRVLVTGKTAEYDVAYGESHLFRVPSYQALLRGVFHQTVSRKVALG

SEQ ID NO: 20169 - protein, 702 aa, Artificial Sequence
  Synthetic polypeptide
MECCCSTCLPASTLGPNRVLSTTTEGSSNSSARLRRLRNKTAHQMKVQHFYQQLLSDVAWASLDLPSLVAEHLPGRQEHVFWKLVLVLPDVEEQSPESCGRILANWLKVKFMGDEGSVDDTSSDAGGIQTLSLFNSLSSKGDQMISVNVCIKVAHGALSDGAIDAVETQKDLLGASGLMLLLPPKMKSEDMAEEDVYWLSALLQLKQLLQAKPFQPALPLVVLVPSPGGDAVEKEVEDGLMLQDLVSAKLISDYTVTEIPDTINDLQGSTKVLQAVQWLVSHCPHSLDLCCQTLIQYVEDGIGHEFSGRFFHDRRERRLGGLASQEPGAIIELFNSVLQFLASVVSSEQLCDLSWPVTEFAEAGGSRLLPHLHWNAPEHLAWLKQAVLGFQLPQMDLPPLGAPWLPVCSMVVQYASQIPSSRQTQPVLQSQVENLLHRTYCRWKSKSPSPVHGAGPSVMEIPWDDLIALCINHKLRDWTPPRLPVTSEALSEDGQICVYFFKNDLKKYDVPLSWEQARLQTQKELQLREGRLAIKPFHPSANNFPIPLLHMHRNWKRSTECAQEGRIPSTEDLMRGASAEELLAQCLSSSLLLEKEENKRFEDQLQQWLSEDSGAFTDLTSLPLYLPQTLVSLSHTIEPVMKTSVTTSPQSDMMREQLQLSEATGTCLGERLKHLERLIRSSREEEVASELHLSALLDMVDI

SEQ ID NO: 20170 - protein, 702 aa, Artificial Sequence; identical to SEQ ID NO: 20169
  Synthetic polypeptide

SEQ ID NO: 20171 - protein, 33 aa, Artificial Sequence
  Synthetic polypeptide
WNVAAAPVCQLPPWAPIVSSAPQQRDPPTAQPG

SEQ ID NO: 20172 - protein, 33 aa, Artificial Sequence; identical to SEQ ID NO: 20171
  Synthetic polypeptide

SEQ ID NO: 20173 - protein, 55 aa, Artificial Sequence
  Synthetic polypeptide
GMLLQHLSASFHPGPQSCPQHHNRGILQQLSQVKAAQKQDSSPDEGSALLPAAAE

SEQ ID NO: 20174 - protein, 55 aa, Artificial Sequence; identical to SEQ ID NO: 20173
  Synthetic polypeptide

SEQ ID NO: 20175 - protein, 13 aa, Artificial Sequence
  Synthetic polypeptide
YNICSTLRLVSRR

SEQ ID NO: 20176 - protein, 62 aa, Artificial Sequence
  Synthetic polypeptide
HTKAGLQEVRPALQATPVLGLLLSSSFLRVTEPGREVGCGLPCPYSRLLQLPPCWTHQQQSK

SEQ ID NO: 20177 - protein, 26 aa, Artificial Sequence
  Synthetic polypeptide
SSRSRAQAARPHWPRCRRHLMCWRRP

SEQ ID NO: 20178 - protein, 26 aa, Artificial Sequence
  Synthetic polypeptide
SSRSRAQAARPHWPRCRRHLMCWRRP

SEQ ID NO: 20179 - protein, 26 aa, Artificial Sequence
  Synthetic polypeptide
SSRSRAQAARPHWPRCRRHLMCWRRP

SEQ ID NO: 20180 - protein, 26 aa, Artificial Sequence
  Synthetic polypeptide
SSRSRAQAARPHWPRCRRHLMCWRRP

SEQ ID NO: 20181 - protein, 26 aa, Artificial Sequence
  Synthetic polypeptide
SSRSRAQAARPHWPRCRRHLMCWRRP

SEQ ID NO: 20182 - protein, 24 aa, Artificial Sequence
  Synthetic polypeptide
HLDCEVLGAEPRQPGLTGHDAGGT

SEQ ID NO: 20183 - protein, 24 aa, Artificial Sequence
  Synthetic polypeptide
HLDCEVLGAEPRQPGLTGHDAGGT

SEQ ID NO: 20184 - protein, 24 aa, Artificial Sequence
  Synthetic polypeptide
HLDCEVLGAEPRQPGLTGHDAGGT

SEQ ID NO: 20185 - protein, 24 aa, Artificial Sequence
  Synthetic polypeptide
HLDCEVLGAEPRQPGLTGHDAGGT

SEQ ID NO: 20186 - protein, 24 aa, Artificial Sequence
  Synthetic polypeptide
HLDCEVLGAEPRQPGLTGHDAGGT

SEQ ID NO: 20187 - protein, 335 aa, Artificial Sequence
  Synthetic polypeptide
CSREGEDGKSSRLGPAPLCYLPDDAEETAFLLEASVASSVPGRWCLPGGVAGRLPKKDNPRRGLWLANCQRLDPSGQGLWDPASEYIYFCSKHFEEDCFELVGISGYHRLKEGAVPTIFESFSKLRRTTKTKGHSYPPGPAEVSRLRRCRKRCSEGRGPTTPFSPPPPADVTCFPVEEASAPATLPASPAGRLEPGLSSPFSDLLGPLGAQADEAGCSAQPSPERQPSPLEPRPVSPSAYMLRLPPPAGAYIQNEHSYQVGSALLWKRRAEAALDALDKAQRQLQACKRREQRLRLRLTKLQQERAREKRAQADARQTLKEHVQDFAMQLSSSMA

SEQ ID NO: 20188 - protein, 335 aa, Artificial Sequence; identical to SEQ ID NO: 20187
  Synthetic polypeptide

SEQ ID NO: 20189 - protein, 109 aa, Artificial Sequence
  Synthetic polypeptide
AVGKGRTGSLAGLDPPHSVTCQMTLRKLLFFSRPPLPRLCPGGGAYPAGSQGDFPRRTTRGEACGWPTASGWTPAARACGTRHPSTSTSAPNTLRRTALSWWESVDITG

SEQ ID NO: 20190 - protein, 109 aa, Artificial Sequence; identical to SEQ ID NO: 20189
  Synthetic polypeptide

SEQ ID NO: 20191 - protein, 68 aa, Artificial Sequence
  Synthetic polypeptide
GNCFSSRGLRCLVCARAVVLTRRGRRETSQEGQPEARLVAGQLPAAGPQRPGPVGPGIRVHLLLLQTL

SEQ ID NO: 20192 - protein, 68 aa, Artificial Sequence; identical to SEQ ID NO: 20191
  Synthetic polypeptide

SEQ ID NO: 20193 - protein, 100 aa, Artificial Sequence
  Synthetic polypeptide
AVGKGRTGSLAGLDPPHSVTCQMTLRKLLFFSRPPLPRLCPGGDFPRRTTRGEACGWPTASGWTPAARACGTRHPSTSTSAPNTLRRTALSWWESVDITG

SEQ ID NO: 20194 - protein, 100 aa, Artificial Sequence; identical to SEQ ID NO: 20193
  Synthetic polypeptide

SEQ ID NO: 20195 - protein, 59 aa, Artificial Sequence
  Synthetic polypeptide
GNCFSSRGLRCLVCARAVTSQEGQPEARLVAGQLPAAGPQRPGPVGPGIRVHLLLLQTL

SEQ ID NO: 20196 - protein, 59 aa, Artificial Sequence; identical to SEQ ID NO: 20195
  Synthetic polypeptide

SEQ ID NO: 20197 - protein, 81 aa, Artificial Sequence
  Synthetic polypeptide
QEGCRWRCLGRSEAMSWHTSGMGGCPGLASSSPASSWPARASLWARAWRQSWKTSGLSSSSSLSCGMCSAGIERCFGRGRD

SEQ ID NO: 20198 - protein, 81 aa, Artificial Sequence; identical to SEQ ID NO: 20197
  Synthetic polypeptide

SEQ ID NO: 20199 - protein, 81 aa, Artificial Sequence; identical to SEQ ID NO: 20197
  Synthetic polypeptide

SEQ ID NO: 20200 - protein, 48 aa, Artificial Sequence
  Synthetic polypeptide
HFRRPSQEERMSPGDLPGQHSKTPSLQKMEKKISRRAVGGGAWGDPRL

SEQ ID NO: 20201 - protein, 48 aa, Artificial Sequence; identical to SEQ ID NO: 20200
  Synthetic polypeptide

SEQ ID NO: 20202 - protein, 48 aa, Artificial Sequence; identical to SEQ ID NO: 20200
  Synthetic polypeptide

SEQ ID NO: 20203 - protein, 455 aa, Artificial Sequence
  Synthetic polypeptide
AQETCLDNIARLHLYKKWKKKLAGGLSVAVPGEIRGYELAHQRHGRLPWARLFQPSIQLARQGFPVGKGLAAVLENKRTVIEQQPVLWYVFCRDRKVLREGERLTLPRLADTYEMLAIEGAQAFYNGSLMAQIVKDIQAAGGIVTAEDLNNYRAELIEHPLNISLGDAVLYMPSARLSGPVLALILNILKGYNFSRESVETPEQKGLTYHRIVEAFRFAYAKRTLLGDPKFVDVTEVVRNMTSEFFAAQLRSQISDHTTHPISYYKPEFYTPDDGGTAHLSVVAEDGSAVSATSTINLYGILFNNEWTTSALPAFTNEFGAPPSPANFIQPGKQPLLSMCLTIMVGQDGQVRMVVGAAGGTQITTDTALAIIYNLWFGYDVKRAVEEPRLHNKLLPNVTTVERNIDQAVTAALETRHHHTQIASTFIAVVQAIVRTAGGWAAASDSRKGGEPAGY

SEQ ID NO: 20204 - protein, 465 aa, Artificial Sequence
  Synthetic polypeptide
AQETCLDNIARLHLYKKWKKKLAGGLSVAVPGEIRGYELAHQRHGRLPWARLFQPSIQLARQGFPVGKGLAAVLENKRTVIEQQPVLWYVFCRDRKVLREGERLTLPRLADTYEMLAIEGAQAFYNGSLMAQIVKDIQAAGGIVTAEDLNNYRAELIEHPLNISLGDAVLYMPSARLSGPVLALILNILKGYNFSRESVETPEQKGLTYHRIVEAFRFAYAKRTLLGDPKFVDVTEVVRNMTSEFFAAQLRSQISDHTTHPISYYKPEFYTPDDGGTAHLSVVAEDGSAVSATSTINLYFGSKVCSPVSGILFNNEWTTSALPAFTNEFGAPPSPANFIQPGKQPLLSMCLTIMVGQDGQVRMVVGAAGGTQITTDTALAIIYNLWFGYDVKRAVEEPRLHNKLLPNVTTVERNIDQAVTAALETRHHHTQIASTFIAVVQAIVRTAGGWAAASDSRKGGEPAGY

SEQ ID NO: 20205 - protein, 465 aa, Artificial Sequence; identical to SEQ ID NO: 20204
  Synthetic polypeptide

SEQ ID NO: 20206 - protein, 52 aa, Artificial Sequence
  Synthetic polypeptide
HVIQSLIALVNDPQPEHPLRADLAEEYSKDRKKFCKNAEEFTKKYGEKRPVD

SEQ ID NO: 20207 - protein, 52 aa, Artificial Sequence; identical to SEQ ID NO: 20206
  Synthetic polypeptide

SEQ ID NO: 20208 - protein, 52 aa, Artificial Sequence; identical to SEQ ID NO: 20206
  Synthetic polypeptide

SEQ ID NO: 20209 - protein, 41 aa, Artificial Sequence
  Synthetic polypeptide
QVQWLTPVIQHFGRRRQVDHEVRRSRPSWLTRNPVPHSTGE

SEQ ID NO: 20210 - protein, 41 aa, Artificial Sequence; identical to SEQ ID NO: 20209
  Synthetic polypeptide

SEQ ID NO: 20211 - protein, 41 aa, Artificial Sequence; identical to SEQ ID NO: 20209
  Synthetic polypeptide

SEQ ID NO: 20212 - protein, 84 aa, Artificial Sequence
  Synthetic polypeptide
EGYPGLSCLALDLLDKMLTFNPHKRIEVEQALAHPYLEQYYDPSDEPIAEAPFKFDMELDDLPKEKLKELIFEETARFQPGYRS

SEQ ID NO: 20213 - protein, 84 aa, Artificial Sequence; identical to SEQ ID NO: 20212
  Synthetic polypeptide

SEQ ID NO: 20214 - protein, 84 aa, Artificial Sequence; identical to SEQ ID NO: 20212
  Synthetic polypeptide

SEQ ID NO: 20215 - protein, 34 aa, Artificial Sequence
  Synthetic polypeptide
AHQLTLKIGRLSWIVLSSSGLIGQNVDIQPTQED

SEQ ID NO: 20216 - protein, 34 aa, Artificial Sequence; identical to SEQ ID NO: 20215
  Synthetic polypeptide

SEQ ID NO: 20217 - protein, 34 aa, Artificial Sequence; identical to SEQ ID NO: 20215
  Synthetic polypeptide

SEQ ID NO: 20218 - protein, 29 aa, Artificial Sequence
  Synthetic polypeptide
GALKIAGKPPAARKREGRISPQGLSPSLC

SEQ ID NO: 20219 - protein, 51 aa, Artificial Sequence
  Synthetic polypeptide
RLLANHQQPERGKEGSPLRVSLPACADSIILCLCFPGILGQAHLHSEQWAQ

SEQ ID NO: 20220 - protein, 138 aa, Artificial Sequence
  Synthetic polypeptide
RRRQRLNLHSCKIRSTKDCWQTTSSQKEGRKDLPSGSLSQPVLTQSSSASASLGSSVKLTCTLSSGHSSYIIAWHQQQPGKAPRYLMKLEGSGSYNKGSGVPDRFSGSSSGADRYLTISNLQFEDEADYYCETWDSNT

SEQ ID NO: 20221 - protein, 19 aa, Artificial Sequence
  Synthetic polypeptide
RRRWVISAFPTEVLGPILC

SEQ ID NO: 20222 - protein, 60 aa, Artificial Sequence
  Synthetic polypeptide
FLHFQLRFLGQFYADSAPLCVGVSGEDGNHLLHPQQWQHCQQLCAVVPAAPGQFPHHCDL

SEQ ID NO: 20223 - protein, 32 aa, Artificial Sequence
  Synthetic polypeptide
EKRFHSEPIHQHECVDKPTETCGAGRAEPAEG

SEQ ID NO: 20224 - protein, 32 aa, Artificial Sequence; identical to SEQ ID NO: 20223
  Synthetic polypeptide

SEQ ID NO: 20225 - protein, 32 aa, Artificial Sequence; identical to SEQ ID NO: 20223
  Synthetic polypeptide

SEQ ID NO: 20226 - protein, 32 aa, Artificial Sequence; identical to SEQ ID NO: 20223
  Synthetic polypeptide

SEQ ID NO: 20227 - protein, 32 aa, Artificial Sequence; identical to SEQ ID NO: 20223
  Synthetic polypeptide

SEQ ID NO: 20228 - protein, 32 aa, Artificial Sequence; identical to SEQ ID NO: 20223
  Synthetic polypeptide

SEQ ID NO: 20229 - protein, 32 aa, Artificial Sequence; identical to SEQ ID NO: 20223
  Synthetic polypeptide

SEQ ID NO: 20230 - protein, 32 aa, Artificial Sequence; identical to SEQ ID NO: 20223
  Synthetic polypeptide

SEQ ID NO: 20231 - protein, 32 aa, Artificial Sequence; identical to SEQ ID NO: 20223
  Synthetic polypeptide

SEQ ID NO: 20232 - protein, 32 aa, Artificial Sequence; identical to SEQ ID NO: 20223
  Synthetic polypeptide

SEQ ID NO: 20233 - protein, 504 aa, Artificial Sequence
  Synthetic polypeptide
KNGSIQSRYISMSVWTSPRRLVELAGQSLLKDEALAIAALELLPRELFPPLFMAAFDGRHSQTLKAMVQAWPFTCLPLGVLMKGQHLHLETFKAVLDGLDVLLAQEVRPRRWKLQVLDLRKNSHQDFWTVWSGNRASLYSFPEPEAAQPMTKKRKVDGLSTEAEQPFIPVEVLVDLFLKEGACDELFSYLIEKVKRKKNVLRLCCKKLKIFAMPMQDIKMILKMVQLDSIEDLEVTCTWKLPTLAKFSPYLGQMINLRRLLLSHIHASSYISPEKEEQYIAQFTSQFLSLQCLQALYVDSLFFLRGRLDQLLRHVMNPLETLSITNCRLSEGDVMHLSQSPSVSQLSVLSLSGVMLTDVSPEPLQALLERASATLQDLVFDECGITDDQLLALLPSLSHCSQLTTLSFYGNSISISALQSLLQHLIGLSNLTHVLYPVPLESYEDIHGTLHLERLAYLHARLRELLCELGRPSMVWLSANPCPHCGDRTFYDPEPILCPCFMPN

SEQ ID NO: 20234 - protein, 504 aa, Artificial Sequence; identical to SEQ ID NO: 20233
  Synthetic polypeptide

SEQ ID NO: 20235 - protein, 504 aa, Artificial Sequence; identical to SEQ ID NO: 20233
  Synthetic polypeptide

SEQ ID NO: 20236 - protein, 504 aa, Artificial Sequence; identical to SEQ ID NO: 20233
  Synthetic polypeptide

SEQ ID NO: 20237 - protein, 504 aa, Artificial Sequence; identical to SEQ ID NO: 20233
  Synthetic polypeptide

SEQ ID NO: 20238 - protein, 11 aa, Artificial Sequence
  Synthetic polypeptide
KTVPFRADTSA

SEQ ID NO: 20239 - protein, 11 aa, Artificial Sequence
  Synthetic polypeptide
KTVPFRADTSA

SEQ ID NO: 20240 - protein, 11 aa, Artificial Sequence
  Synthetic polypeptide
KTVPFRADTSA

SEQ ID NO: 20241 - protein, 11 aa, Artificial Sequence
  Synthetic polypeptide
KTVPFRADTSA

SEQ ID NO: 20242 - protein, 11 aa, Artificial Sequence
  Synthetic polypeptide
KTVPFRADTSA

SEQ ID NO: 20243 - protein, 11 aa, Artificial Sequence
  Synthetic polypeptide
KTVPFRADTSA

SEQ ID NO: 20244 - protein, 11 aa, Artificial Sequence
  Synthetic polypeptide
KTVPFRADTSA

SEQ ID NO: 20245 - protein, 11 aa, Artificial Sequence
  Synthetic polypeptide
KTVPFRADTSA

SEQ ID NO: 20246 - protein, 11 aa, Artificial Sequence
  Synthetic polypeptide
KTVPFRADTSA

SEQ ID NO: 20247 - protein, 11 aa, Artificial Sequence
  Synthetic polypeptide
KTVPFRADTSA

SEQ ID NO: 20248 - protein, 11 aa, Artificial Sequence
  Synthetic polypeptide
KTVPFRADTSA

SEQ ID NO: 20249 - protein, 196 aa, Artificial Sequence
  Synthetic polypeptide
KNGSIQSRYISMSVWTSPRRLVELAGQSLLKDEALAIAALELLPRELFPPLFMAAFDGRHSQTLKAMVQAWPFTCLPLGVLMKGQHLHLETFKAVLDGLDVLLAQEVRPRRWKLQVLDLRKNSHQDFWTVWSGNRASLYSFPEPEAAQPMTKKRKVDGLSTEAEQPFIPVEVLVDLFLKEGACDELFSYLIEKVKR

SEQ ID NO: 20250 - protein, 160 aa, Artificial Sequence
  Synthetic polypeptide
KNGSIQSRYISMSVWTSPRRLVELAGQSLLKDEALAIAALELLPRELFPPLFMAAFDGRHSQTLKAMVQAWPFTCLPLGVLMKGQHLHLETFKAVLDGLDVLLAQEVRPRRWKLQVLDLRKNSHQDFWTVWSGNRASLYSFPEPEAAQPMTKKRKVDGLS

SEQ ID NO: 20251 - protein, 147 aa, Artificial Sequence
  Synthetic polypeptide
KNGSIQSRYISMSVWTSPRRLVELAGQSLLKDEALAIAALELLPRELFPPLFMAAFDGRHSQTLKAMVQAWPFTCLPLGVLMKGQHLHLETFKAVLDGLDVLLAQEVRPRRWKLQVLDLRKNSHQDFWTVWSGNRASLYSFPEPEAA

SEQ ID NO: 20252 - protein, 110 aa, Artificial Sequence
  Synthetic polypeptide
KNGSIQSRYISMSVWTSPRRLVELAGQSLLKDEALAIAALELLPRELFPPLFMAAFDGRHSQTLKAMVQAWPFTCLPLGVLMKGQHLHLETFKAVLDGLDVLLAQEVRPR

SEQ ID NO: 20253 - protein, 12 aa, Artificial Sequence
  Synthetic polypeptide
EKRFHSEPIHQH

SEQ ID NO: 20254 - protein, 12 aa, Artificial Sequence
  Synthetic polypeptide
KNGSIQSRYISM

SEQ ID NO: 20255 - protein, 81 aa, Artificial Sequence
  Synthetic polypeptide
KNGSIQSRYISMSVWTSPRRLVELAGQSLLKDEALAIAALELLPRELFPPLFMAAFDGRHSQTLKAMVQAWPFTCLPLGVL

SEQ ID NO: 20256 - protein, 32 aa, Artificial Sequence
  Synthetic polypeptide
SSKHYRGRTHPVMNLILIFMRLWLLQHQNPLL

SEQ ID NO: 20257 - protein, 44 aa, Artificial Sequence
  Synthetic polypeptide
RMDRPMWSVHTVEYCSVTQGKETMDTGHRRDDLQNITGEGRTLL

SEQ ID NO: 20258 - protein, 271 aa, Artificial Sequence
  Synthetic polypeptide
MFSAASFTIGSNWKQPKCPSAREWIDPCGLCIQWSTAQLHKEKKLWIQVTGGMIFKTLQGKDAPCYESDTDIYETVAAATSESTTVEPGKLDVGATEGQDLQHISNQKMPTGPPEDRLSLKFLPSSEEDNDDAKILPSPVQGSSEDNLSLVCLPRSEDDDCDDDDDDDAQILPSRVQGGCYRFDSSSCSSEDNLSLVCLPRSEDDDCDDDDDDAQILPSPVQACSEDSLFLRCSLRHKDEEEEDDDDIHITARIESDLTLESLSDEEIHPG

SEQ ID NO: 20259 - protein, 306 aa, Artificial Sequence
  Synthetic polypeptide
IYVASASMLNTSLTLSYQRQGSVTLDTVSRSTPHRDGSSQVARAMPFAFCTREKLPWTEFAESAEDGPTTRFCQKLAKNHDMVVVSPILERDSEHGDVLWNTAVVISNSGAVLGKTRKNHIPRVGDFNESTYYMEGNLGHPVFQTQFGRIAVNICYGRHHPLNWLMYSINGAEIIFNPSATIGALSESLWPIEARNAAIANHCFTCAINRVGTEHFPNEFTSGDGKKAHQDFGYFYGSSYVAAPDSSRTPGLSRSRDGLLVAKLDLNLCQQVNDVWNFKMTGRYEMYARELAEAVKSNYSPTIVKE

SEQ ID NO: 20260 - protein, 306 aa, Artificial Sequence; identical to SEQ ID NO: 20259
  Synthetic polypeptide

SEQ ID NO: 20261 - protein, 91 aa, Artificial Sequence
  Synthetic polypeptide
LSHTSGRARSRWTQFPDLHHTEMAQAKWPELCPLPSVRERSFLGQNLLSQQRMGPPPDSVRSWRRTMTWWWCLPSWNETASMGMFCGIQPW

SEQ ID NO: 20262 - protein, 91 aa, Artificial Sequence; identical to SEQ ID NO: 20261
  Synthetic polypeptide

SEQ ID NO: 20263 - protein, 65 aa, Artificial Sequence
  Synthetic polypeptide
WILIDLCCLGIHVEYKFNSLIPAAGLGHAGHSFQIYTTPRWLKPSGQSYALCLLYEREASLDRIC

SEQ ID NO: 20264 - protein, 65 aa, Artificial Sequence; identical to SEQ ID NO: 20263
  Synthetic polypeptide

SEQ ID NO: 20265 - protein, 26 aa, Artificial Sequence
  Synthetic polypeptide
HFGRPSGRKRKRTWNGTWKHLSKAKI

SEQ ID NO: 20266 - protein, 26 aa, Artificial Sequence
  Synthetic polypeptide
HFGRPSGRKRKRTWNGTWKHLSKAKI

SEQ ID NO: 20267 - protein, 36 aa, Artificial Sequence
  Synthetic polypeptide
MDVLAYACNPDTLGGRVAARGRGRGMGRGNIFQKRR

SEQ ID NO: 20268 - protein, 36 aa, Artificial Sequence; identical to SEQ ID NO: 20267
  Synthetic polypeptide

SEQ ID NO: 20269 - protein, 36 aa, Artificial Sequence
  Synthetic polypeptide
WTCWLMLVILTLWEAEWPQEEEDVEWDVETSFKSED

SEQ ID NO: 20270 - protein, 36 aa, Artificial Sequence; identical to SEQ ID NO: 20269
  Synthetic polypeptide

SEQ ID NO: 20271 - protein, 24 aa, Artificial Sequence
  Synthetic polypeptide
HPPTSGGPQHDLRVLRCPAPGPDL

SEQ ID NO: 20272 - protein, 24 aa, Artificial Sequence
  Synthetic polypeptide
HPPTSGGPQHDLRVLRCPAPGPDL

SEQ ID NO: 20273 - protein, 24 aa, Artificial Sequence
  Synthetic polypeptide
HPPTSGGPQHDLRVLRCPAPGPDL

SEQ ID NO: 20274 - protein, 24 aa, Artificial Sequence
  Synthetic polypeptide
HPPTSGGPQHDLRVLRCPAPGPDL

SEQ ID NO: 20275 - protein, 24 aa, Artificial Sequence
  Synthetic polypeptide
HPPTSGGPQHDLRVLRCPAPGPDL

SEQ ID NO: 20276 - protein, 24 aa, Artificial Sequence
  Synthetic polypeptide
HPPTSGGPQHDLRVLRCPAPGPDL

SEQ ID NO: 20277 - protein, 24 aa, Artificial Sequence
  Synthetic polypeptide
HPPTSGGPQHDLRVLRCPAPGPDL

SEQ ID NO: 20278 - protein, 234 aa, Artificial Sequence
  Synthetic polypeptide
TLLPQVVRNMTSEFFAAQLRAQISDDTTHPISYYKPEFYTPDDGGTAHLSVVAEDGSAVSATSTINLYFGSKVRSPVSGILFNNEMDDFSSPSITNEFGVPPSPANFIQPGKQPLSSMCPTIMVGQDGQVRMVVGAAGGTQITTATALAIIYNLWFGYDVKRAVEEPRLHNQLLPNVTTVERNIDQAVTAALETRHHHTQIASTFIAVVQAIVRTAGGWAAASDSRKGGEPAGY

SEQ ID NO: 20279 - protein, 234 aa, Artificial Sequence; identical to SEQ ID NO: 20278
  Synthetic polypeptide

SEQ ID NO: 20280 - protein, 234 aa, Artificial Sequence; identical to SEQ ID NO: 20278
  Synthetic polypeptide

SEQ ID NO: 20281 - protein, 234 aa, Artificial Sequence; identical to SEQ ID NO: 20278
  Synthetic polypeptide

SEQ ID NO: 20282 - protein, 234 aa, Artificial Sequence; identical to SEQ ID NO: 20278
  Synthetic polypeptide

SEQ ID NO: 20283 - protein, 9 aa, Artificial Sequence
  Synthetic polypeptide
PSYLRWSAT

SEQ ID NO: 20284 - protein, 9 aa, Artificial Sequence
  Synthetic polypeptide
PSYLRWSAT

SEQ ID NO: 20285 - protein, 9 aa, Artificial Sequence
  Synthetic polypeptide
PSYLRWSAT

SEQ ID NO: 20286 - protein, 9 aa, Artificial Sequence
  Synthetic polypeptide
PSYLRWSAT

SEQ ID NO: 20287 - protein, 9 aa, Artificial Sequence
  Synthetic polypeptide
PSYLRWSAT

SEQ ID NO: 20288 - protein, 9 aa, Artificial Sequence
  Synthetic polypeptide
PSYLRWSAT

SEQ ID NO: 20289 - protein, 9 aa, Artificial Sequence
  Synthetic polypeptide
PSYLRWSAT

SEQ ID NO: 20290 - protein, 128 aa, Artificial Sequence
  Synthetic polypeptide
TLLPQVVRNMTSEFFAAQLRAQISDDTTHPISYYKPEFYTPDDGGTAHLSVVAEDGSAVSATSTINLYFGSKVRSPVSGILFNNEMDDFSSPSITNEFGVPPSPANFIQPGKQPLSSMCPTIMVGQDG

SEQ ID NO: 20291 - protein, 24 aa, Artificial Sequence
  Synthetic polypeptide
TLLPQVVRNMTSEFFAAQLRAQIS

SEQ ID NO: 20292 - protein, 27 aa, Artificial Sequence
  Synthetic polypeptide
WTLTKPCGFAMFCSGVSGWAALLCCRS

SEQ ID NO: 20293 - protein, 27 aa, Artificial Sequence
  Synthetic polypeptide
WTLTKPCGFAMFCSGVSGWAALLCCRS

SEQ ID NO: 20294 - protein, 27 aa, Artificial Sequence
  Synthetic polypeptide
WTLTKPCGFAMFCSGVSGWAALLCCRS

SEQ ID NO: 20295 - protein, 27 aa, Artificial Sequence
  Synthetic polypeptide
WTLTKPCGFAMFCSGVSGWAALLCCRS

SEQ ID NO: 20296 - protein, 272 aa, Artificial Sequence
  Synthetic polypeptide
DSDGHSQSRVVLPCSVQEYQVGQLYSVAEASKNETGGGEGIEVLKNEPYEKDGEKGQYTHKIYHLKSKVPAFVRMIAPEGSLVFHEKAWNAYPYCRTIVTNEYMKDDFFIKIETWHKPDLGTLENVHGLDPNTWKTVEIVHIDIADRSQVEPADYKADEDPALFQSVKTKRGPLGPNWKKELANSPDCPQMCAYKLVTIKFKWWGLQSKVENFIQKQEKRIFTNFHRQLFCWIDKWIDLTMEDIRRMEDETQKELETMRKRGSVRGTSAADV

SEQ ID NO: 20297 - protein, 272 aa, Artificial Sequence; identical to SEQ ID NO: 20296
  Synthetic polypeptide

SEQ ID NO: 20298 - protein, 51 aa, Artificial Sequence
  Synthetic polypeptide
LNEDFRIRIVMDTHKAVWFCHVLFRSIRLGSFTLLQKLVRMRLVVEKELKS

SEQ ID NO: 20299 - protein, 51 aa, Artificial Sequence; identical to SEQ ID NO: 20298
  Synthetic polypeptide

SEQ ID NO: 20300 - protein, 51 aa, Artificial Sequence; identical to SEQ ID NO: 20298
  Synthetic polypeptide

SEQ ID NO: 20301 - protein, 51 aa, Artificial Sequence; identical to SEQ ID NO: 20298
  Synthetic polypeptide

SEQ ID NO: 20302 - protein, 273 aa, Artificial Sequence
  Synthetic polypeptide
DSDGHSQSRVVLPCSVQEYQVGQLYSVAEASKNETGGGEGIEVLKNEPYEKDGEKGQYTHKIYHLKSKVPAFVRMIAPEGSLVFHEKAWNAYPYCRTIVTNEYMKDDFFIKIETWHKPDLGTLENVHGLDPNTWKTVEIVHIDIADRSQVEPADYKADEDPALFQSVKTKRGPLGPNWKKELANSPDCPQMCAYKLVTIKFKWWGLQSKVENFIQKQEKRIFTNFHRQLFCWIDKWIDLTMEDIRRMEDETQKELETLRNQGQVRGTSAASDE

SEQ ID NO: 20303 - protein, 166 aa, Artificial Sequence
  Synthetic polypeptide
DSDGHSQSRVVLPCSVQEYQVGQLYSVAEASKNETGGGEGIEVLKNEPYEKDGEKGQYTHKIYHLKSKVPAFVRMIAPEGSLVFHEKAWNAYPYCRTIVTNEYMKDDFFIKIETWHKPDLGTLENVHGLDPNTWKTVEIVHIDIADRSQVEPADYKADEDPALFQS

SEQ ID NO: 20304 - protein, 29 aa, Artificial Sequence
  Synthetic polypeptide
GGARWLTSLIPALWEAEAGRSPEFLSFLI

SEQ ID NO: 20305 - protein, 29 aa, Artificial Sequence
  Synthetic polypeptide
GGARWLTSLIPALWEAEAGRSPEFLSFLI

SEQ ID NO: 20306 - protein, 29 aa, Artificial Sequence
  Synthetic polypeptide
GGARWLTSLIPALWEAEAGRSPEFLSFLI

SEQ ID NO: 20307 - protein, 29 aa, Artificial Sequence
  Synthetic polypeptide
GGARWLTSLIPALWEAEAGRSPEFLSFLI

SEQ ID NO: 20308 - protein, 29 aa, Artificial Sequence
  Synthetic polypeptide
GGARWLTSLIPALWEAEAGRSPEFLSFLI

SEQ ID NO: 20309 - protein, 29 aa, Artificial Sequence
  Synthetic polypeptide
GGARWLTSLIPALWEAEAGRSPEFLSFLI

SEQ ID NO: 20310 - protein, 29 aa, Artificial Sequence
  Synthetic polypeptide
GGARWLTSLIPALWEAEAGRSPEFLSFLI

SEQ ID NO: 20311 - protein, 29 aa, Artificial Sequence
  Synthetic polypeptide
GGARWLTSLIPALWEAEAGRSPEFLSFLI

SEQ ID NO: 20312 - protein, 29 aa, Artificial Sequence
  Synthetic polypeptide
GGARWLTSLIPALWEAEAGRSPEFLSFLI

SEQ ID NO: 20313 - protein, 29 aa, Artificial Sequence
  Synthetic polypeptide
GGARWLTSLIPALWEAEAGRSPEFLSFLI

SEQ ID NO: 20314 - protein, 29 aa, Artificial Sequence
  Synthetic polypeptide
GGARWLTSLIPALWEAEAGRSPEFLSFLI

SEQ ID NO: 20315 - protein, 18 aa, Artificial Sequence
  Synthetic polypeptide
SQHFGRPRLADHLSFCLF

SEQ ID NO: 20316 - protein, 18 aa, Artificial Sequence
  Synthetic polypeptide
SQHFGRPRLADHLSFCLF

SEQ ID NO: 20317 - protein, 18 aa, Artificial Sequence
  Synthetic polypeptide
SQHFGRPRLADHLSFCLF

SEQ ID NO: 20318 - protein, 18 aa, Artificial Sequence
  Synthetic polypeptide
SQHFGRPRLADHLSFCLF

SEQ ID NO: 20319 - protein, 18 aa, Artificial Sequence
  Synthetic polypeptide
SQHFGRPRLADHLSFCLF

SEQ ID NO: 20320 - protein, 18 aa, Artificial Sequence
  Synthetic polypeptide
SQHFGRPRLADHLSFCLF

SEQ ID NO: 20321 - protein, 18 aa, Artificial Sequence
  Synthetic polypeptide
SQHFGRPRLADHLSFCLF

SEQ ID NO: 20322 - protein, 18 aa, Artificial Sequence
  Synthetic polypeptide
SQHFGRPRLADHLSFCLF

SEQ ID NO: 20323 - protein, 18 aa, Artificial Sequence
  Synthetic polypeptide
SQHFGRPRLADHLSFCLF

SEQ ID NO: 20324 - protein, 18 aa, Artificial Sequence
  Synthetic polypeptide
SQHFGRPRLADHLSFCLF

SEQ ID NO: 20325 - protein, 18 aa, Artificial Sequence
  Synthetic polypeptide
SQHFGRPRLADHLSFCLF

SEQ ID NO: 20326 - protein, 18 aa, Artificial Sequence
  Synthetic polypeptide
SQHFGRPRLADHLSFCLF

SEQ ID NO: 20327 - protein, 28 aa, Artificial Sequence
  Synthetic polypeptide
GGARWLTSLIPALWEAEAGRSPEFLSFL

SEQ ID NO: 20328 - protein, 13 aa, Artificial Sequence
  Synthetic polypeptide
SQHFGRPRTKNFC

SEQ ID NO: 20329 - protein, 13 aa, Artificial Sequence
  Synthetic polypeptide
SQHFGRPRTKNFC

SEQ ID NO: 20330 - protein, 13 aa, Artificial Sequence
  Synthetic polypeptide
SQHFGRPRTKNFC

SEQ ID NO: 20331 - protein, 13 aa, Artificial Sequence
  Synthetic polypeptide
SQHFGRPRTKNFC

SEQ ID NO: 20332 - protein, 36 aa, Artificial Sequence
  Synthetic polypeptide
MGTGAHTCNPSTLGGQEPKTFARKSAFTRENSWPCS

SEQ ID NO: 20333 - protein, 36 aa, Artificial Sequence; identical to SEQ ID NO: 20332
  Synthetic polypeptide

SEQ ID NO: 20334 - protein, 36 aa, Artificial Sequence; identical to SEQ ID NO: 20332
  Synthetic polypeptide

SEQ ID NO: 20335 - protein, 36 aa, Artificial Sequence; identical to SEQ ID NO: 20332
  Synthetic polypeptide

SEQ ID NO: 20336 - protein, 169 aa, Artificial Sequence
  Synthetic polypeptide
WAPGLTPVIPALWEAKNQKLLLENQLLREKTHGLVVENQELRQRLGMDALVAEEEAEAKGNEVRPVAGSAESAALRLRAPLQQVQAQLSPLQNISPWILAVLTLQIQSLISCWAFWTTWTQSCSSNALPQSLPAWRSSQRSTQKDPVPYQPPFLCQWGRHQPSWKPLMN

SEQ ID NO: 20337 - protein, 169 aa, Artificial Sequence; identical to SEQ ID NO: 20336
  Synthetic polypeptide

SEQ ID NO: 20338 - protein, 169 aa, Artificial Sequence; identical to SEQ ID NO: 20336
  Synthetic polypeptide

SEQ ID NO: 20339 - protein, 284 aa, Artificial Sequence
  Synthetic polypeptide
WAPGLTPVIPALWEAKNQKLLLENQLLREKTHGLVVENQELRQRLGMDALVAEEEAEAKGNEVRPVAGSAESAAGAGPVVTPPEHLPMDSGGIDSSDSESDILLGILDNLDPVMFFKCPSPEPASLEELPEVYPEGPSSLPASLSLSVGTSSAKLEAINELIRFDHIYTKPLVLEIPSETESQANVVVKIEEAPLSPSENDHPEFIVSVKEEPVEDDLVPELGISNLLSSSHCPKPSSCLLDAYSDCGYGGSLSPFSDMSSLLGVNHSWEDTFANELFPQLISV

SEQ ID NO: 20340 - protein, 28 aa, Artificial Sequence
  Synthetic polypeptide
GRVLWLTPVIPALWEAENHSRILVWCPC

SEQ ID NO: 20341 - protein, 1017 aa, Artificial Sequence
  Synthetic polypeptide
SQHFGRPRTTHEFLFGALAELVDNARDADATRIDIYAERREDLRGGFMLCFLDDGAGMDPSDAASVIQFGKSAKRTPESTQIGQYGNGLKSGSMRIGKDFILFTKKEDTMTCLFLSRTFHEEEGIDEVIVPLPTWNARTREPVTDNVEKFAIETELIYKYSPFRTEEEVMTQFMKIPGDSGTLVIIFNLKLMDNGEPELDIISNPRDIQMAETSPEGTKPERRSFRAYAAVLYIDPRMRIFIHGHKVQTKRLSCCLYKPRMYKYTSSRFKTRAEQEVKKAEHVARIAEEKAREAESKARTLEVRLGGDLTRDSRVMLRQVQNRAITLRREADVKKRIKEAKQRALKEPKELNFVFGVNIEHRDLDGMFIYNCSRLIKMYEKVGPQLEGGMACGGVVGVVDVPYLVLEPTHNKQDFADAKEYRHLLRAMGEHLAQYWKDIAIAQRGIIKFWDEFGYLSANWNQPPSSELRYKRRRAMEIPTTIQCDLCLKWRTLPFQLSSVEKDYPDTWVCSMNPDPEQDRCEASEQKQKVPLGTFRKDMKTQEEKQKQLTEKIRQQQEKLEALQKTTPIRSQADLKKLPLEVTTRPSTEEPVRRPQRPRSPPLPAVIRNAPSRPPSLPTPRPASQPRKAPVISSTPKLPALAAREEASTSRLLQPPEAPRKPANTLVKTASRPAPLVQQLSPSLLPNSKSPREVPSPKVIKTPVVKKTESPIKLSPATPSRKRSVAVSDEEEVEEEAERRKERCKRGRFVVKEEKKDSNELSDSAGEEDSADLKRAQKDKGLHVEVRVNREWYTGRVTAVEVGKHVVRWKVKFDYVPTDTTPRDRWVEKGSEDVRLMKPPSPEHQSLDTQQEGGEEEVGPVAQQAIAVAEPSTSECLRIEPDTTALSTNHETIDLLVQILRNCLRYFLPPSFPISKKQLSAMNSDELISFPLKEYFKQYEVGLQNLCNSYQSRADSRAKASEESLRTSERKLRETEEKLQKLRTNIVALLQKVQEDIDINTDDELDAYIEDLITKGD

SEQ ID NO: 20342 - protein, 41 aa, Artificial Sequence
  Synthetic polypeptide
PGAVAHACNPSTLGGREPLTNSCLVPLLNWLIMQEMLMPPE

SEQ ID NO: 20343 - protein, 35 aa, Artificial Sequence
  Synthetic polypeptide
EAVIQADHGVRSSRPAWPIWSCRRQASSLRRWLEL

SEQ ID NO: 20344 - protein, 31 aa, Artificial Sequence
  Synthetic polypeptide
SRQITGLGVQDQPGQYGPVGGKRAACAGGWS

SEQ ID NO: 20345 - protein, 31 aa, Artificial Sequence; identical to SEQ ID NO: 20344
  Synthetic polypeptide

SEQ ID NO: 20346 - protein, 31 aa, Artificial Sequence; identical to SEQ ID NO: 20344
  Synthetic polypeptide

SEQ ID NO: 20347 - protein, 31 aa, Artificial Sequence; identical to SEQ ID NO: 20344
  Synthetic polypeptide

SEQ ID NO: 20348 - protein, 31 aa, Artificial Sequence; identical to SEQ ID NO: 20344
  Synthetic polypeptide

SEQ ID NO: 20349 - protein, 31 aa, Artificial Sequence; identical to SEQ ID NO: 20344
  Synthetic polypeptide

SEQ ID NO: 20350 - protein, 31 aa, Artificial Sequence; identical to SEQ ID NO: 20344
  Synthetic polypeptide

SEQ ID NO: 20351 - protein, 24 aa, Artificial Sequence
  Synthetic polypeptide
EFKTSLANMVLSAASEQPAQVAGA

SEQ ID NO: 20352 - protein, 91 aa, Artificial Sequence
  Synthetic polypeptide
EAVIQADHGVRSSRPAWPIWSCRRQASSLRRWLELNREEPGPEDQEVEQQVQKELEQVEMQIQLLAEELQAQRQPIGACVARIQALRQALC

SEQ ID NO: 20353 - protein, 91 aa, Artificial Sequence; identical to SEQ ID NO: 20352
  Synthetic polypeptide

SEQ ID NO: 20354 - protein, 91 aa, Artificial Sequence; identical to SEQ ID NO: 20352
  Synthetic polypeptide

SEQ ID NO: 20355 - protein, 91 aa, Artificial Sequence; identical to SEQ ID NO: 20352
  Synthetic polypeptide

SEQ ID NO: 20356 - protein, 91 aa, Artificial Sequence; identical to SEQ ID NO: 20352
  Synthetic polypeptide

SEQ ID NO: 20357 - protein, 91 aa, Artificial Sequence; identical to SEQ ID NO: 20352
  Synthetic polypeptide

SEQ ID NO: 20358 - protein, 31 aa, Artificial Sequence
  Synthetic polypeptide
EFKTSLANMVLSAASEQPAQVAGAEQRGAGA

SEQ ID NO: 20359 - protein, 31 aa, Artificial Sequence; identical to SEQ ID NO: 20358
  Synthetic polypeptide

SEQ ID NO: 20360 - protein, 31 aa, Artificial Sequence; identical to SEQ ID NO: 20358
  Synthetic polypeptide

SEQ ID NO: 20361 - protein, 31 aa, Artificial Sequence; identical to SEQ ID NO: 20358
  Synthetic polypeptide

SEQ ID NO: 20362 - protein, 31 aa, Artificial Sequence; identical to SEQ ID NO: 20358
  Synthetic polypeptide

SEQ ID NO: 20363 - protein, 31 aa, Artificial Sequence; identical to SEQ ID NO: 20358
  Synthetic polypeptide

SEQ ID NO: 20364 - protein, 32 aa, Artificial Sequence
  Synthetic polypeptide
WEVQRVTAWAQNKQEVSECEDCSGVEWPSQAL

SEQ ID NO: 20365 - protein, 32 aa, Artificial Sequence; identical to SEQ ID NO: 20364
  Synthetic polypeptide

SEQ ID NO: 20366 - protein, 32 aa, Artificial Sequence; identical to SEQ ID NO: 20364
  Synthetic polypeptide

SEQ ID NO: 20367 - protein, 32 aa, Artificial Sequence; identical to SEQ ID NO: 20364
  Synthetic polypeptide

SEQ ID NO: 20368 - protein, 32 aa, Artificial Sequence; identical to SEQ ID NO: 20364
  Synthetic polypeptide

SEQ ID NO: 20369 - protein, 32 aa, Artificial Sequence; identical to SEQ ID NO: 20364
  Synthetic polypeptide

SEQ ID NO: 20370 - protein, 32 aa, Artificial Sequence; identical to SEQ ID NO: 20364
  Synthetic polypeptide

SEQ ID NO: 20371 - protein, 32 aa, Artificial Sequence; identical to SEQ ID NO: 20364
  Synthetic polypeptide

SEQ ID NO: 20372 - protein, 152 aa, Artificial Sequence
  Synthetic polypeptide
GRFRESQLGLKTSKRFLSVRIALEWNGPHRLFKGHPETLEKFDKFKHLKSEDEMKASEDLKKHGATVLTALGGILKKKGHHEAEIKPLAQSHATKHKIPVKYLEFISECIIQVLQSKHPGDFGADAQGAMNKALELFRKDMASNYKELGFQG

SEQ ID NO: 20373 - protein, 152 aa, Artificial Sequence; identical to SEQ ID NO: 20372
  Synthetic polypeptide

SEQ ID NO: 20374 - protein, 152 aa, Artificial Sequence; identical to SEQ ID NO: 20372
  Synthetic polypeptide

SEQ ID NO: 20375 - protein, 152 aa, Artificial Sequence; identical to SEQ ID NO: 20372
  Synthetic polypeptide

SEQ ID NO: 20376 - protein, 28 aa, Artificial Sequence
  Synthetic polypeptide
GLLWSGMALTGSLRVTQRLWRSLTSSST

SEQ ID NO: 20377 - protein, 28 aa, Artificial Sequence
  Synthetic polypeptide
GLLWSGMALTGSLRVTQRLWRSLTSSST

SEQ ID NO: 20378 - protein, 28 aa, Artificial Sequence
  Synthetic polypeptide
GLLWSGMALTGSLRVTQRLWRSLTSSST

SEQ ID NO: 20379 - protein, 28 aa, Artificial Sequence
  Synthetic polypeptide
GLLWSGMALTGSLRVTQRLWRSLTSSST

SEQ ID NO: 20380 - protein, 28 aa, Artificial Sequence
  Synthetic polypeptide
GLLWSGMALTGSLRVTQRLWRSLTSSST

SEQ ID NO: 20381 - protein, 28 aa, Artificial Sequence
  Synthetic polypeptide
GLLWSGMALTGSLRVTQRLWRSLTSSST

SEQ ID NO: 20382 - protein, 28 aa, Artificial Sequence
  Synthetic polypeptide
GLLWSGMALTGSLRVTQRLWRSLTSSST

SEQ ID NO: 20383 - protein, 28 aa, Artificial Sequence
  Synthetic polypeptide
GLLWSGMALTGSLRVTQRLWRSLTSSST

SEQ ID NO: 20384 - protein, 141 aa, Artificial Sequence
  Synthetic polypeptide
GRFRESQLGLKTSKRFLSVRIALEWNGPHRLFKGHPETLEKFDKFKHLKSEDEMKASEDLKKHGATVLTALGGILKKKGHHEAEIKPLAQSHATKHKIPVKYLEFISECIIQVLQSKHPGDFGADAQGAMNKALELFRKDM

SEQ ID NO: 20385 - protein, 104 aa, Artificial Sequence
  Synthetic polypeptide
GRFRESQLGLKTSKRFLSVRIALEWNGPHRLFKGHPETLEKFDKFKHLKSEDEMKASEDLKKHGATVLTALGGILKKKGHHEAEIKPLAQSHATKHKIPVKYLE

SEQ ID NO: 20386 - protein, 104 aa, Artificial Sequence; identical to SEQ ID NO: 20385
  Synthetic polypeptide

SEQ ID NO: 20387 - protein, 75 aa, Artificial Sequence
  Synthetic polypeptide
GRFRESQLGLKTSKRFLSVRIALEWNGPHRLFKGHPETLEKFDKFKHLKSEDEMKASEDLKKHGATVLTALGGIL

SEQ ID NO: 20388 - protein, 394 aa, Artificial Sequence
  Synthetic polypeptide
IGTICLQCGSRMSALFLGVGVRAEEAGARVQQNVPSGTDTGDPQSKPLGDWAAGTMDPESSIFIEDAIKYFKEKVSTQNLLLLLTDNEAWNGFVAAAELPRNEADELRKALDNLARQMIMKDKNWHDKGQQYRNWFLKEFPRLKSELEDNIRRLRALADGVQKVHKGTTIANVVSGSLSISSGILTLVGMGLAPFTEGGSLVLLEPGMELGITAALTGITSSTMDYGKKWWTQAQAHDLVIKSLDKLKEVREFLGENISNFLSLAGNTYQLTRGIGKDIRALRRARANLQSVPHASASRPRVTEPISAESGEQVERVNEPSILEMSRGVKLTDVAPVSFFLVLDVVYLVYESKHLHEGAKSETAEELKKVAQELEEKLNILNNNYKILQADQEL

SEQ ID NO: 20389 - protein, 394 aa, Artificial Sequence; identical to SEQ ID NO: 20388
  Synthetic polypeptide

SEQ ID NO: 20390 - protein, 394 aa, Artificial Sequence; identical to SEQ ID NO: 20388
  Synthetic polypeptide

SEQ ID NO: 20391 - protein, 394 aa, Artificial Sequence; identical to SEQ ID NO: 20388
  Synthetic polypeptide

SEQ ID NO: 20392 - protein, 15 aa, Artificial Sequence
  Synthetic polypeptide
FECELVQFACSVALG

SEQ ID NO: 20393 - protein, 15 aa, Artificial Sequence
  Synthetic polypeptide
FECELVQFACSVALG

SEQ ID NO: 20394 - protein, 15 aa, Artificial Sequence
  Synthetic polypeptide
FECELVQFACSVALG

SEQ ID NO: 20395 - protein, 15 aa, Artificial Sequence
  Synthetic polypeptide
FECELVQFACSVALG

SEQ ID NO: 20396 - protein, 15 aa, Artificial Sequence
  Synthetic polypeptide
FECELVQFACSVALG

SEQ ID NO: 20397 - protein, 15 aa, Artificial Sequence
  Synthetic polypeptide
FECELVQFACSVALG

SEQ ID NO: 20398 - protein, 15 aa, Artificial Sequence
  Synthetic polypeptide
FECELVQFACSVALG

SEQ ID NO: 20399 - protein, 15 aa, Artificial Sequence
  Synthetic polypeptide
FECELVQFACSVALG

SEQ ID NO: 20400 - protein, 15 aa, Artificial Sequence
  Synthetic polypeptide
FECELVQFACSVALG

SEQ ID NO: 20401 - protein, 15 aa, Artificial Sequence
  Synthetic polypeptide
FECELVQFACSVALG

SEQ ID NO: 20402 - protein, 137 aa, Artificial Sequence
  Synthetic polypeptide
IGTICLQCGSRMSALFLGVGVRAEEAGARVQQNVPSGTDTGDPQSKPLGDWAAGTMDPGPAGSRGDSGEPCTLRPACRGQRQHGGASRISAEGPAPMPRRRTPSTAHLRVPKTSRRNLLCMRAVSLLRMPLSISRKK

SEQ ID NO: 20403 - protein, 137 aa, Artificial Sequence; identical to SEQ ID NO: 20402
  Synthetic polypeptide

SEQ ID NO: 20404 - protein, 137 aa, Artificial Sequence; identical to SEQ ID NO: 20402
  Synthetic polypeptide

SEQ ID NO: 20405 - protein, 85 aa, Artificial Sequence
  Synthetic polypeptide
IGTICLQCGSRMSALFLGVGVRAEEAGARVQQNVPSGTDTGDPQSKPLGDWAAGTMDPESSIFIEDAIKYFKEKVSTQNLLLLLT

SEQ ID NO: 20406 - protein, 155 aa, Artificial Sequence
  Synthetic polypeptide
IGTICLQCGSRMSALFLGVGVRAEEAGARVQQNVPSGTDTGDPQSKPLGDWAAGTMDPESSIFIEDAIKYFKEKVSTQNLLLLLTDNEAWNGFVAAAELPRNEADELRKALDNLARQMIMKDKNWHDKGQQYRNWFLKEFPRLKSELEDNIRRLR

SEQ ID NO: 20407 - protein, 138 aa, Artificial Sequence
  Synthetic polypeptide
IGTICLQCGSRMSALFLGVGVRAEEAGARVQQNVPSGTDTGDPQSKPLGDWAAGTMDPGPAGSRGDSGEPCTLRPACRGQRQHGGASRISAEGPAPMPRRRTPSTAHLRVPKTSRRNLLCMVVVLNAVEFETLFLNFK

SEQ ID NO: 20408 - protein, 21 aa, Artificial Sequence
  Synthetic polypeptide
AMGAVELPTPSTTKSSSKWSA

SEQ ID NO: 20409 - protein, 21 aa, Artificial Sequence
  Synthetic polypeptide
AMGAVELPTPSTTKSSSKWSA

SEQ ID NO: 20410 - protein, 21 aa, Artificial Sequence
  Synthetic polypeptide
AMGAVELPTPSTTKSSSKWSA

SEQ ID NO: 20411 - protein, 21 aa, Artificial Sequence
  Synthetic polypeptide
AMGAVELPTPSTTKSSSKWSA

SEQ ID NO: 20412 - protein, 27 aa, Artificial Sequence
  Synthetic polypeptide
QWVQWSYRLLRPQKVLPNGRPEEKECG

SEQ ID NO: 20413 - protein, 27 aa, Artificial Sequence
  Synthetic polypeptide
QWVQWSYRLLRPQKVLPNGRPEEKECG

SEQ ID NO: 20414 - protein, 27 aa, Artificial Sequence
  Synthetic polypeptide
QWVQWSYRLLRPQKVLPNGRPEEKECG

SEQ ID NO: 20415 - protein, 27 aa, Artificial Sequence
  Synthetic polypeptide
QWVQWSYRLLRPQKVLPNGRPEEKECG

SEQ ID NO: 20416 - protein, 95 aa, Artificial Sequence
  Synthetic polypeptide
NGCSGATDSFDHKKFFQMVGLKKKSADDVKKVFHMLDKDKSGFIEEDELGFILKGFSPDARDLSAKETKMLMAAGDKDGDGKIGVDEFSTLVAES

SEQ ID NO: 20417 - protein, 95 aa, Artificial Sequence; identical to SEQ ID NO: 20416
  Synthetic polypeptide

SEQ ID NO: 20418 - protein, 92 aa, Artificial Sequence
  Synthetic polypeptide
NGCSGATDSFDHKKFFQMVGLKKKSADDVKKVFHMLDKDKSGFIEEDELGFILKGFSPDARDLSAKETKMLMAAGDKDGDGKIGVDDPADVD

SEQ ID NO: 20419 - protein, 86 aa, Artificial Sequence
  Synthetic polypeptide
NGCSGATDSFDHKKFFQMVGLKKKSADDVKKVFHMLDKDKSGFIEEDELGFILKGFSPDARDLSAKETKMLMAAGDKDGDGKIGVD

SEQ ID NO: 20420 - protein, 92 aa, Artificial Sequence
  Synthetic polypeptide
AMATDSFDHKKFFQMVGLKKKSADDVKKVFHMLDKDKSGFIEEDELGFILKGFSPDARDLSAKETKMLMAAGDKDGDGKIGVDEFSTLVAES

SEQ ID NO: 20421 - protein, 92 aa, Artificial Sequence; identical to SEQ ID NO: 20420
  Synthetic polypeptide

SEQ ID NO: 20422 - protein, 17 aa, Artificial Sequence
  Synthetic polypeptide
QWLPTPSTTKSSSKWSA

SEQ ID NO: 20423 - protein, 17 aa, Artificial Sequence
  Synthetic polypeptide
QWLPTPSTTKSSSKWSA

SEQ ID NO: 20424 - protein, 17 aa, Artificial Sequence
  Synthetic polypeptide
QWLPTPSTTKSSSKWSA

SEQ ID NO: 20425 - protein, 17 aa, Artificial Sequence
  Synthetic polypeptide
QWLPTPSTTKSSSKWSA

SEQ ID NO: 20426 - protein, 23 aa, Artificial Sequence
  Synthetic polypeptide
NGYRLLRPQKVLPNGRPEEKECG

SEQ ID NO: 20427 - protein, 23 aa, Artificial Sequence
  Synthetic polypeptide
NGYRLLRPQKVLPNGRPEEKECG

SEQ ID NO: 20428 - protein, 23 aa, Artificial Sequence
  Synthetic polypeptide
NGYRLLRPQKVLPNGRPEEKECG

SEQ ID NO: 20429 - protein, 23 aa, Artificial Sequence
  Synthetic polypeptide
NGYRLLRPQKVLPNGRPEEKECG

SEQ ID NO: 20430 - protein, 89 aa, Artificial Sequence
  Synthetic polypeptide
AMATDSFDHKKFFQMVGLKKKSADDVKKVFHMLDKDKSGFIEEDELGFILKGFSPDARDLSAKETKMLMAAGDKDGDGKIGVDDPADVD

SEQ ID NO: 20431 - protein, 83 aa, Artificial Sequence
  Synthetic polypeptide
AMATDSFDHKKFFQMVGLKKKSADDVKKVFHMLDKDKSGFIEEDELGFILKGFSPDARDLSAKETKMLMAAGDKDGDGKIGVD

SEQ ID NO: 20432 - protein, 40 aa, Artificial Sequence
  Synthetic polypeptide
TENQRPRCNPGSAFIFLCGLRTGLGPYPWCRQHAFHGLPD

SEQ ID NO: 20433 - protein, 40 aa, Artificial Sequence; identical to SEQ ID NO: 20432
  Synthetic polypeptide

SEQ ID NO: 20434 - protein, 119 aa, Artificial Sequence
  Synthetic polypeptide
QKTRGPDVILGLPSSFCVALGLDSGHIRGAVNMPFMDFLTEDGFEKGPEELRALFQTKKVDLSQPLIATCRKGVTACHVALAAYLCGKPDVAVYDGSWSEWFRRAPPESRVSQGKSEKA

SEQ ID NO: 20435 - protein, 119 aa, Artificial Sequence; identical to SEQ ID NO: 20434
  Synthetic polypeptide

SEQ ID NO: 20436 - protein, 14 aa, Artificial Sequence
  Synthetic polypeptide
ETADIQPFLNLHRH

SEQ ID NO: 20437 - protein, 14 aa, Artificial Sequence
  Synthetic polypeptide
ETADIQPFLNLHRH

SEQ ID NO: 20438 - protein, 14 aa, Artificial Sequence
  Synthetic polypeptide
ETADIQPFLNLHRH

SEQ ID NO: 20439 - protein, 14 aa, Artificial Sequence
  Synthetic polypeptide
ETADIQPFLNLHRH

SEQ ID NO: 20440 - protein, 14 aa, Artificial Sequence
  Synthetic polypeptide
ETADIQPFLNLHRH

SEQ ID NO: 20441 - protein, 14 aa, Artificial Sequence
  Synthetic polypeptide
ETADIQPFLNLHRH

SEQ ID NO: 20442 - protein, 102 aa, Artificial Sequence
  Synthetic polypeptide
TYTGIEPGHIPGTVNIPFTDFLSQEGLEKSPEEIRHLFQEKKVDLSKPLVATCGSGVTACHVALGAYLCGKPDVPIYDGSWVEWYMRARPEDVISEGRGKTH

SEQ ID NO: 20443 - protein, 102 aa, Artificial Sequence; identical to SEQ ID NO: 20442
  Synthetic polypeptide

SEQ ID NO: 20444 - protein, 102 aa, Artificial Sequence; identical to SEQ ID NO: 20442
  Synthetic polypeptide

SEQ ID NO: 20445 - protein, 102 aa, Artificial Sequence; identical to SEQ ID NO: 20442
  Synthetic polypeptide

SEQ ID NO: 20446 - protein, 102 aa, Artificial Sequence; identical to SEQ ID NO: 20442
  Synthetic polypeptide

SEQ ID NO: 20447 - protein, 102 aa, Artificial Sequence; identical to SEQ ID NO: 20442
  Synthetic polypeptide

SEQ ID NO: 20448 - protein, 19 aa, Artificial Sequence
  Synthetic polypeptide
YPTIFEPTQALNLATSQVP

SEQ ID NO: 20449 - protein, 19 aa, Artificial Sequence
  Synthetic polypeptide
YPTIFEPTQALNLATSQVP

SEQ ID NO: 20450 - protein, 19 aa, Artificial Sequence
  Synthetic polypeptide
YPTIFEPTQALNLATSQVP

SEQ ID NO: 20451 - protein, 19 aa, Artificial Sequence
  Synthetic polypeptide
YPTIFEPTQALNLATSQVP

SEQ ID NO: 20452 - protein, 19 aa, Artificial Sequence
  Synthetic polypeptide
YPTIFEPTQALNLATSQVP

SEQ ID NO: 20453 - protein, 19 aa, Artificial Sequence
  Synthetic polypeptide
YPTIFEPTQALNLATSQVP

SEQ ID NO: 20454 - protein, 7 aa, Artificial Sequence
  Synthetic polypeptide
QCGVKTS

SEQ ID NO: 20455 - protein, 7 aa, Artificial Sequence
  Synthetic polypeptide
QCGVKTS

SEQ ID NO: 20456 - protein, 7 aa, Artificial Sequence
  Synthetic polypeptide
QCGVKTS

SEQ ID NO: 20457 - protein, 7 aa, Artificial Sequence
  Synthetic polypeptide
QCGVKTS

SEQ ID NO: 20458 - protein, 7 aa, Artificial Sequence
  Synthetic polypeptide
QCGVKTS

SEQ ID NO: 20459 - protein, 7 aa, Artificial Sequence
  Synthetic polypeptide
QCGVKTS

SEQ ID NO: 20460 - protein, 87 aa, Artificial Sequence
  Synthetic polypeptide
VWREDFLSQEGLEKSPEEIRHLFQEKKVDLSKPLVATCGSGVTACHVALGAYLCGKPDVPIYDGSWVEWYMRARPEDVISEGRGKTH

SEQ ID NO: 20461 - protein, 87 aa, Artificial Sequence; identical to SEQ ID NO: 20460
  Synthetic polypeptide

SEQ ID NO: 20462 - protein, 87 aa, Artificial Sequence; identical to SEQ ID NO: 20460
  Synthetic polypeptide

SEQ ID NO: 20463 - protein, 87 aa, Artificial Sequence; identical to SEQ ID NO: 20460
  Synthetic polypeptide

SEQ ID NO: 20464 - protein, 87 aa, Artificial Sequence; identical to SEQ ID NO: 20460
  Synthetic polypeptide

SEQ ID NO: 20465 - protein, 87 aa, Artificial Sequence; identical to SEQ ID NO: 20460
  Synthetic polypeptide

SEQ ID NO: 20466 - protein, 61 aa, Artificial Sequence
  Synthetic polypeptide
NGNSPRCCWKHPAQCLAQDSVKYLECSALTQRGLKTVFDEAIRAVLCPQPTRQQKRACSLL

SEQ ID NO: 20467 - protein, 61 aa, Artificial Sequence; identical to SEQ ID NO: 20466
  Synthetic polypeptide

SEQ ID NO: 20468 - protein, 61 aa, Artificial Sequence; identical to SEQ ID NO: 20466
  Synthetic polypeptide

SEQ ID NO: 20469 - protein, 45 aa, Artificial Sequence
  Synthetic polypeptide
SRLLPPALCLRALASPLWACFLVCEMGTHPGVVGSTQLSAWHRTR

SEQ ID NO: 20470 - protein, 45 aa, Artificial Sequence; identical to SEQ ID NO: 20469
  Synthetic polypeptide

SEQ ID NO: 20471 - protein, 45 aa, Artificial Sequence; identical to SEQ ID NO: 20469
  Synthetic polypeptide

SEQ ID NO: 20472 - protein, 45 aa, Artificial Sequence; identical to SEQ ID NO: 20469
  Synthetic polypeptide

SEQ ID NO: 20473 - protein, 86 aa, Artificial Sequence
  Synthetic polypeptide
PDFSPQLCAFGPWLPHSGPVSWSVKWELTPVLLEAPSSVPGTGLGEIPGVLSSHPERPENRVRRGHPGRAVPSAHAAAEARLQPPL

SEQ ID NO: 20474 - protein, 86 aa, Artificial Sequence; identical to SEQ ID NO: 20473
  Synthetic polypeptide

SEQ ID NO: 20475 - protein, 86 aa, Artificial Sequence; identical to SEQ ID NO: 20473
  Synthetic polypeptide

SEQ ID NO: 20476 - protein, 35 aa, Artificial Sequence
  Synthetic polypeptide
NGNSPRCCWKHPAQCLAQDSVKYLECSALTQRGLK

SEQ ID NO: 20477 - protein, 59 aa, Artificial Sequence
  Synthetic polypeptide
PDFSPQLCAFGPWLPHSGPVSWSVKWELTPVLLEAPSSVPGTGLGEIPGVLSSHPERPE

SEQ ID NO: 20478 - protein, 300 aa, Artificial Sequence
  Synthetic polypeptide
WLRSQLGLRGDLSSRLDSTSSDFYGLGLAPSPHPKLSLTFPICIMEMRIMMIFSFRGRQEDHTGLDSGFCTISRLPRSEKPHDRDRDGSFPSEPGLRRSDSLLSFRLDLDLGPSLLSELLGVMSLPEAPAAETPAPAANPPAPTANPTGPAANPPATTANPPAPAANPSAPAATPTGPAANPPAPAASSTPHGHCPNGVTAGLGPVAEVKSSPVGGGPRGPAGPALGRHWGAGWDGGHHYPEMDARQERVEVLPQARASWESLDEEWRAPQAGSRTPVPSTVQANTFEFADAEEDDEVKV

SEQ ID NO: 20479 - protein, 68 aa, Artificial Sequence
  Synthetic polypeptide
FSAFGVDRKITQAWTLGSAPSPACPARKSRMTETGMVPSPLSPGFAALTLSCPSAWTSTLGPHSSASC

SEQ ID NO: 20480 - protein, 24 aa, Artificial Sequence
  Synthetic polypeptide
TGRSHRPGLWVLHHLPPAPLGKAA

SEQ ID NO: 20481 - protein, 74 aa, Artificial Sequence
  Synthetic polypeptide
GRARWLTPVIPALWEAEAGRSRGAASRKRKRTPVPKEGGAVPPGRAPDDAEGQALHLGKVPGRLCGAEPHQDTV

SEQ ID NO: 20482 - protein, 74 aa, Artificial Sequence; identical to SEQ ID NO: 20481
  Synthetic polypeptide

SEQ ID NO: 20483 - protein, 95 aa, Artificial Sequence
  Synthetic polypeptide
SQHFGRPRRADHEVLLRVKENELQYLKKEVQCLRDELQMMQKDKRFTSGKYQDVYVELSHIKTRSEREIEQLKEHLRLAMAALQEKESMRNSLAE

SEQ ID NO: 20484 - protein, 95 aa, Artificial Sequence; identical to SEQ ID NO: 20483
  Synthetic polypeptide

SEQ ID NO: 20485 - protein, 26 aa, Artificial Sequence
  Synthetic polypeptide
PGAVAHACNPSTLGGRGGQITRCCFA

SEQ ID NO: 20486 - protein, 26 aa, Artificial Sequence
  Synthetic polypeptide
PGAVAHACNPSTLGGRGGQITRCCFA

SEQ ID NO: 20487 - protein, 24 aa, Artificial Sequence
  Synthetic polypeptide
GAPLPGHDPVWEESLTSVPTTTWA

SEQ ID NO: 20488 - protein, 24 aa, Artificial Sequence
  Synthetic polypeptide
GAPLPGHDPVWEESLTSVPTTTWA

SEQ ID NO: 20489 - protein, 24 aa, Artificial Sequence
  Synthetic polypeptide
GAPLPGHDPVWEESLTSVPTTTWA

SEQ ID NO: 20490 - protein, 24 aa, Artificial Sequence
  Synthetic polypeptide
GAPLPGHDPVWEESLTSVPTTTWA

SEQ ID NO: 20491 - protein, 42 aa, Artificial Sequence
  Synthetic polypeptide
EVRSVSARPPIVCDVGSASAPTPRLGCEERLCPATTPSGRNP

SEQ ID NO: 20492 - protein, 42 aa, Artificial Sequence; identical to SEQ ID NO: 20491
  Synthetic polypeptide

SEQ ID NO: 20493 - protein, 42 aa, Artificial Sequence; identical to SEQ ID NO: 20491
  Synthetic polypeptide

SEQ ID NO: 20494 - protein, 42 aa, Artificial Sequence; identical to SEQ ID NO: 20491
  Synthetic polypeptide

SEQ ID NO: 20495 - protein, 391 aa, Artificial Sequence
  Synthetic polypeptide
GASLPGRPSSAMWGAPLPQRPVWDVRSASARPRPRLGGILNFCANNYLGLSSHPEVIQAGLQALEEFGAGLSSVRFICGTQSIHKNLEAKIARFHQREDAILYPSCYDANAGLFEALLTPEDAVLSDELNHASIIDGIRLCKAHKYRYRHLDMADLEAKLQEAQKHRLRLVATDGAFSMDGDIAPLQEICCLASRYGALVFMDECHATGFLGPTGRGTDELLGVMDQVTIINSTLGKALGGASGGYTTGPGPLVSLLRQRARPYLFSNSLPPAVVGCASKALDLLMGSNTIVQSMAAKTQRFRSKMEAAGFTISGASHPICPVMLGDARLASRMADDMLKRGIFVIGFSYPVVPKGKARIRVQISAVHSEEDIDRCVEAFVEVGRLHGALP

SEQ ID NO: 20496 - protein, 391 aa, Artificial Sequence; identical to SEQ ID NO: 20495
  Synthetic polypeptide

SEQ ID NO: 20497 - protein, 123 aa, Artificial Sequence
  Synthetic polypeptide
GASLPGRPSSAMWGAPLPQRPVWDVRSASARPRPRLGGILNFCANNYLGLSSHPEVIQAGLQALEEFGAGLSSVRFICGTQSIHKNLEAKIARFHQREDAILYPSCYDANAGLFESRALVQPG

SEQ ID NO: 20498 - protein, 226 aa, Artificial Sequence
  Synthetic polypeptide
GASLPGRPSSAMWGAPLPQRPVWDVRSASARPRPRLGGILNFCANNYLGLSSHPEVIQAGLQALEEFGAGLSSVRFICGTQSIHKNLEAKIARFHQREDAILYPSCYDANAGLFESRALVQPGTETRGPQREAQNTLPLYPEERPGWQYSFLICWSPGQGRSPGWLNDGSTLTASLQALLTPEDAVLSDELNHASIIDGIRLCKAHKYRYRHLDMADLEAKLQEAQ

SEQ ID NO: 20499 - protein, 462 aa, Artificial Sequence
  Synthetic polypeptide
GQARWLMPVIPALWEVKVDGSRDAVFLILYKELYYRHIYAKVSGGPSLEQRFESYYNYCNLFNYILNADGPAPLELPNQWLWDIIDEFIYQFQSFSQYRCKTAKKSEEEIDFLRSNPKIWNVHSVLNVLHSLVDKSNINRQLEVYTSGGDPESVAGEYGRHSLYKMLGYFSLVGLLRLHSLLGDYYQAIKVLENIELNKKSMYSRVPECQVTTYYYVGFAYLMMRRYQDAIRVFANILLYIQRTKSMFQRTTYKYEMINKQNEQMHALLAIALTMYPMRIDESIHLQLREKYGDKMLRMQKGDPQVYEELFSYSCPKFLSPVVPNYDNVHPNYHKEPFLQQLKVFSDEVQQQAQLSTIRSFLKLYTTMPVAKLAGFLDLTEQEFRIQLLVFKHKMKNLVWTSGISALDGEFQSASEVDFYIDKDMIHIADTKVARRYGDFFIRQIHKFEELNRTLKKMGQRP

SEQ ID NO: 20500 - protein, 462 aa, Artificial Sequence; identical to SEQ ID NO: 20499
  Synthetic polypeptide

SEQ ID NO: 20501 - protein, 10 aa, Artificial Sequence
  Synthetic polypeptide
RWTDHEMLSS

SEQ ID NO: 20502 - protein, 10 aa, Artificial Sequence
  Synthetic polypeptide
RWTDHEMLSS

SEQ ID NO: 20503 - protein, 10 aa, Artificial Sequence
  Synthetic polypeptide
RWTDHEMLSS

SEQ ID NO: 20504 - protein, 10 aa, Artificial Sequence
  Synthetic polypeptide
RWTDHEMLSS

SEQ ID NO: 20505 - protein, 10 aa, Artificial Sequence
  Synthetic polypeptide
RWTDHEMLSS

SEQ ID NO: 20506 - protein, 51 aa, Artificial Sequence
  Synthetic polypeptide
PGAVAHACNPSTLGGEGGRITRCCLPDFIQRIILQAHICQSQWGTFLGAEV

SEQ ID NO: 20507 - protein, 51 aa, Artificial Sequence; identical to SEQ ID NO: 20506
  Synthetic polypeptide

SEQ ID NO: 20508 - protein, 51 aa, Artificial Sequence; identical to SEQ ID NO: 20506
  Synthetic polypeptide

SEQ ID NO: 20509 - protein, 51 aa, Artificial Sequence; identical to SEQ ID NO: 20506
  Synthetic polypeptide

SEQ ID NO: 20510 - protein, 414 aa, Artificial Sequence
  Synthetic polypeptide
GQARWLMPVIPALWEVKVDGSRDAVFLILYKELYYRHIYAKVSFQSFSQYRCKTAKKSEEEIDFLRSNPKIWNVHSVLNVLHSLVDKSNINRQLEVYTSGGDPESVAGEYGRHSLYKMLGYFSLVGLLRLHSLLGDYYQAIKVLENIELNKKSMYSRVPECQVTTYYYVGFAYLMMRRYQDAIRVFANILLYIQRTKSMFQRTTYKYEMINKQNEQMHALLAIALTMYPMRIDESIHLQLREKYGDKMLRMQKGDPQVYEELFSYSCPKFLSPVVPNYDNVHPNYHKEPFLQQLKVFSDEVQQQAQLSTIRSFLKLYTTMPVAKLAGFLDLTEQEFRIQLLVFKHKMKNLVWTSGISALDGEFQSASEVDFYIDKDMIHIADTKVARRYGDFFIRQIHKFEELNRTLKKMGQRP

SEQ ID NO: 20511 - protein, 51 aa, Artificial Sequence
  Synthetic polypeptide
PGAVAHACNPSTLGGEGGRITRCCLPDFIQRIILQAHICQSQFSVIQSVPL

SEQ ID NO: 20512 - protein, 64 aa, Artificial Sequence
  Synthetic polypeptide
GQARWLMPVIPALWEVKVDGSRDAVFLILYKELYYRHIYAKVSGGPSLEQRFESYYNYCNLFNY

SEQ ID NO: 20513 - protein, 72 aa, Artificial Sequence
  Synthetic polypeptide
GQARWLMPVIPALWEVKVDGSRDAVFLILYKELYYRHIYAKVSGGPSLEQRFESYYNYCNLFNYILNADGPA

SEQ ID NO: 20514 - protein, 37 aa, Artificial Sequence
  Synthetic polypeptide
GQARWLMPVIPALWEVKVDGSRGQEIETILANTMLSS

SEQ ID NO: 20515 - protein, 37 aa, Artificial Sequence; identical to SEQ ID NO: 20514
  Synthetic polypeptide

SEQ ID NO: 20516 - protein, 37 aa, Artificial Sequence; identical to SEQ ID NO: 20514
  Synthetic polypeptide

SEQ ID NO: 20517 - protein, 37 aa, Artificial Sequence; identical to SEQ ID NO: 20514
  Synthetic polypeptide

SEQ ID NO: 20518 - protein, 37 aa, Artificial Sequence; identical to SEQ ID NO: 20514
  Synthetic polypeptide

SEQ ID NO: 20519 - protein, 46 aa, Artificial Sequence
  Synthetic polypeptide
RWTDHEVRRSRPSWLTRCCLPDFIQRIILQAHICQSQWGTFLGAEV

SEQ ID NO: 20520 - protein, 46 aa, Artificial Sequence; identical to SEQ ID NO: 20519
  Synthetic polypeptide

SEQ ID NO: 20521 - protein, 46 aa, Artificial Sequence; identical to SEQ ID NO: 20519
  Synthetic polypeptide

SEQ ID NO: 20522 - protein, 46 aa, Artificial Sequence; identical to SEQ ID NO: 20519
  Synthetic polypeptide

SEQ ID NO: 20523 - protein, 441 aa, Artificial Sequence
  Synthetic polypeptide
HDAVFLILYKELYYRHIYAKVSGGPSLEQRFESYYNYCNLFNYILNADGPAPLELPNQWLWDIIDEFIYQFQSFSQYRCKTAKKSEEEIDFLRSNPKIWNVHSVLNVLHSLVDKSNINRQLEVYTSGGDPESVAGEYGRHSLYKMLGYFSLVGLLRLHSLLGDYYQAIKVLENIELNKKSMYSRVPECQVTTYYYVGFAYLMMRRYQDAIRVFANILLYIQRTKSMFQRTTYKYEMINKQNEQMHALLAIALTMYPMRIDESIHLQLREKYGDKMLRMQKGDPQVYEELFSYSCPKFLSPVVPNYDNVHPNYHKEPFLQQLKVFSDEVQQQAQLSTIRSFLKLYTTMPVAKLAGFLDLTEQEFRIQLLVFKHKMKNLVWTSGISALDGEFQSASEVDFYIDKDMIHIADTKVARRYGDFFIRQIHKFEELNRTLKKMGQRP

SEQ ID NO: 20524 - protein, 441 aa, Artificial Sequence; identical to SEQ ID NO: 20523
  Synthetic polypeptide

SEQ ID NO: 20525 - protein, 46 aa, Artificial Sequence
  Synthetic polypeptide
RWTDHEVRRSRPSWLTRCCLPDFIQRIILQAHICQSQFSVIQSVPL

SEQ ID NO: 20526 - protein, 393 aa, Artificial Sequence
  Synthetic polypeptide
HDAVFLILYKELYYRHIYAKVSFQSFSQYRCKTAKKSEEEIDFLRSNPKIWNVHSVLNVLHSLVDKSNINRQLEVYTSGGDPESVAGEYGRHSLYKMLGYFSLVGLLRLHSLLGDYYQAIKVLENIELNKKSMYSRVPECQVTTYYYVGFAYLMMRRYQDAIRVFANILLYIQRTKSMFQRTTYKYEMINKQNEQMHALLAIALTMYPMRIDESIHLQLREKYGDKMLRMQKGDPQVYEELFSYSCPKFLSPVVPNYDNVHPNYHKEPFLQQLKVFSDEVQQQAQLSTIRSFLKLYTTMPVAKLAGFLDLTEQEFRIQLLVFKHKMKNLVWTSGISALDGEFQSASEVDFYIDKDMIHIADTKVARRYGDFFIRQIHKFEELNRTLKKMGQRP

SEQ ID NO: 20527 - protein, 43 aa, Artificial Sequence
  Synthetic polypeptide
HDAVFLILYKELYYRHIYAKVSGGPSLEQRFESYYNYCNLFNY

SEQ ID NO: 20528 - protein, 51 aa, Artificial Sequence
  Synthetic polypeptide
HDAVFLILYKELYYRHIYAKVSGGPSLEQRFESYYNYCNLFNYILNADGPA

SEQ ID NO: 20529 - protein, 102 aa, Artificial Sequence
  Synthetic polypeptide
GRARWLTPIIPALWEAEAGGSQGRCAPMKSISSSLKETMNPHDIVQDAIHNFSPAYQQYTQQSTLEPGPTWRGGAHGLSRSHSLSGARDNEKTLLLSSDDEF

SEQ ID NO: 20530 - protein, 102 aa, Artificial Sequence; identical to SEQ ID NO: 20529
  Synthetic polypeptide

SEQ ID NO: 20531 - protein, 18 aa, Artificial Sequence
  Synthetic polypeptide
SQHFGRPRRVDHKAAVPP

SEQ ID NO: 20532 - protein, 18 aa, Artificial Sequence
  Synthetic polypeptide
SQHFGRPRRVDHKAAVPP

SEQ ID NO: 20533 - protein, 97 aa, Artificial Sequence
  Synthetic polypeptide
PGTVAHAYNPSTLGGRGGWITRPLCPHEEHLQQPQGDHEPARHRAGRHPQLLTCLPAVHAAVHPGAWAHLAWWRPRPLPLPQPQWRPRQREDSPAQL

SEQ ID NO: 20534 - protein, 97 aa, Artificial Sequence; identical to SEQ ID NO: 20533
  Synthetic polypeptide

SEQ ID NO: 20535 - protein, 310 aa, Artificial Sequence
  Synthetic polypeptide
AQISGSGRPGWSAGSAASQELPARVNLSAAPAPVSAVPTGLHSKMDQLEGQLLAQVLALEKERVALSHSSRRQRQEVEKELDVLQGRVAELEHGSSAYSPPDAFKISIPIRNNYMYARVRKALPELYAFTACMWLRSRSSGTGQGTPFSYSVPGQANEIVLLEAGHEPMELLINDKVAQLPLSLKDNGWHHICIAWTTRDGLWSAYQDGELQGSGENLAAWHPIKPHGILILGQEQDTLGGRFDATQAFVGDIAQFNLWDHALTPAQVLGIANCTAPLLGNVLPWEDKLVEAFGGATKAAFDVCKGRAKA

SEQ ID NO: 20536 - protein, 31 aa, Artificial Sequence
  Synthetic polypeptide
SVSLRNEHRFQDQEGQAGVLALQRHRSFQPV

SEQ ID NO: 20537 - protein, 91 aa, Artificial Sequence
  Synthetic polypeptide
GMSTDFRIRKARLECWLCSVTGASSPCEPLSCPSPSLCCAHRPTLQDGPAGGAAAGPGAGTGEGACGPQPQQPPAEAGSGKGVGRPAGSCG

SEQ ID NO: 20538 - protein, 11 aa, Artificial Sequence
  Synthetic polypeptide
PCGTEMCARQD

SEQ ID NO: 20539 - protein, 54 aa, Artificial Sequence
  Synthetic polypeptide
GLPSHVELKCVQGRIETRALPRCSFAYRNYVVPGNTSTQDSWLEINRGPDDIFG

SEQ ID NO: 20540 - protein, 554 aa, Artificial Sequence
  Synthetic polypeptide
IMGAGLLCAVLMIVNKSHKIWWFYKGEFPCTSSLSLPATIHIRCDLLFLAFCHDCEASLAMWNCYYIREKSKQVITLLMDEPLLCKEREVACRTRQRTSHSILFSKRQLGSSNSLTACTSAPTPDISASEKKYKLPKFGRLHNKRNVCKAGLKQEHCQDVHLPTETMLSQETLPLKIHGWKSTEDLMTFLDDDPELPLLATPPSIVSPITCLSEAEEVCNLSGADAVPTLSENSPSGQRDVSLDKRSDGIFTNTVTENLLETPLEKQSAAEGLKTLTILPACWSSKEEFISPDLRVSKSDSTFHNQASVETLCLSPSFKIFDRVKEIVINKAYQKPAQSSIQMDDKILKTTTRVSTASEGASSFSPLSMSSPDLASPEKSAHLLSPILAGPSFWTLSHQQLSSTSFKDEDKTAKLHHSFASRGPVSSDVEENDSLNLLGILPNNSDSAKKNISHISSSHWGEFSTQNVDQFIPLSCSGFQSTKDFPQEPEAKNSISVLLREVKRAIARLHEDLSTVIQELNVINNILMSMSLNSSQISQSSQVPQSSEGSSDQI

SEQ ID NO: 20541 - protein, 18 aa, Artificial Sequence
  Synthetic polypeptide
PCGTVIISGKNLSKSSHC

SEQ ID NO: 20542 - protein, 15 aa, Artificial Sequence
  Synthetic polypeptide
GLPSHVELLLYPGKI

SEQ ID NO: 20543 - protein, 44 aa, Artificial Sequence
  Synthetic polypeptide
GAPLPGRPYWEVRSPSARPAAPSGREVGGSAPRPASRPVRECYS

SEQ ID NO: 20544 - protein, 59 aa, Artificial Sequence
  Synthetic polypeptide
GAPLPGQPPRPGGRLGGQPPARPAAPSGSATVETPAAPDPGRTGEPRDHAAFEKSSRIS

SEQ ID NO: 20545 - protein, 193 aa, Artificial Sequence
  Synthetic polypeptide
PARPAALSGREVGGSALRWASRPVWEVRGASARPPLLGSEEPLCPASRPVREGGGGVSPPPGQPPRPGGRWGGSAPCPAGLPVREVRGASARPPLLGSEEPLCPASRPVREGGWGVSPPPGQPPRPGVLQLKLQQRRTREELVSQGIMPPLKSPAAFHEQRRSLERARTEDYLKRKIRSRPERSELVRMHILE

SEQ ID NO: 20546 - protein, 59 aa, Artificial Sequence
  Synthetic polypeptide
GASPPGSHPVREGGGGGQPPARPAAPSGSATVETPAAPDPGRTGEPRDHAAFEKSSRIS

SEQ ID NO: 20547 - protein, 110 aa, Artificial Sequence
  Synthetic polypeptide
EVRSLSTRQPPHLGSEERLRPAATPSGREVGGVSPPPGQPPRPGVLQLKLQQRRTREELVSQGIMPPLKSPAAFHEQRRSLERARTEDYLKRKIRSRPERSELVRMHILE

SEQ ID NO: 20548 - protein, 45 aa, Artificial Sequence
  Synthetic polypeptide
GASPPGSHPIWEVRSVSARQPPRPGGRWGGSAPRPASRPVRECYS

SEQ ID NO: 20549 - protein, 58 aa, Artificial Sequence
  Synthetic polypeptide
EVRSPSARQPPRLRSEEPLHPAATPSGNATVETPAAPDPGRTGEPRDHAAFEKSSRIS

SEQ ID NO: 20550 - protein, 80 aa, Artificial Sequence
  Synthetic polypeptide
EVRSLSTRQPPHLGMLQLKLQQRRTREELVSQGIMPPLKSPAAFHEQRRSLERARTEDYLKRKIRSRPERSELVRMHILE

SEQ ID NO: 20551 - protein, 15 aa, Artificial Sequence
  Synthetic polypeptide
GASPPGSHPIWECYS

SEQ ID NO: 20552 - protein, 8 aa, Artificial Sequence
  Synthetic polypeptide
GSNEIKHD

SEQ ID NO: 20553 - protein, 8 aa, Artificial Sequence
  Synthetic polypeptide
GSNEIKHD

SEQ ID NO: 20554 - protein, 8 aa, Artificial Sequence
  Synthetic polypeptide
GSNEIKHD

SEQ ID NO: 20555 - protein, 8 aa, Artificial Sequence
  Synthetic polypeptide
GSNEIKHD

SEQ ID NO: 20556 - protein, 129 aa, Artificial Sequence
  Synthetic polypeptide
SMTEADVNPKAYPLADAHLTKKLLDLVQQSCNYKQLRKGANEATKTLNRGISEFIVMAADAEPLEIILHLPLLCEDKNVPYVFVRSKQALGRACGVSRPVIACSVTIKEGSQLKQQIQSIQQSIERLLV

SEQ ID NO: 20557 - protein, 129 aa, Artificial Sequence; identical to SEQ ID NO: 20556
  Synthetic polypeptide

SEQ ID NO: 20558 - protein, 129 aa, Artificial Sequence; identical to SEQ ID NO: 20556
  Synthetic polypeptide

SEQ ID NO: 20559 - protein, 129 aa, Artificial Sequence; identical to SEQ ID NO: 20556
  Synthetic polypeptide

SEQ ID NO: 20560 - protein, 23 aa, Artificial Sequence
  Synthetic polypeptide
PGNFVHRPSAPIPAGHHCENGTG

SEQ ID NO: 20561 - protein, 23 aa, Artificial Sequence
  Synthetic polypeptide
PGNFVHRPSAPIPAGHHCENGTG

SEQ ID NO: 20562 - protein, 153 aa, Artificial Sequence
  Synthetic polypeptide
IWGSSRIPILLQGRGLWSPLIRRRIPLPRCGGLRVRDRNPPGVTNKSGLSAMWGKKGLQHHGDQVTLCTDQVHQFQLDITVKMGRDKVREMFMKNAHVTDPRVVDLLVIKGKIELEETIKVWKQRTHVMRFFHETEAPRPKDFLSKFYVGHDP

SEQ ID NO: 20563 - protein, 153 aa, Artificial Sequence; identical to SEQ ID NO: 20562
  Synthetic polypeptide

SEQ ID NO: 20564 - protein, 15 aa, Artificial Sequence
  Synthetic polypeptide
LCAQTKCTNSSWTSL

SEQ ID NO: 20565 - protein, 15 aa, Artificial Sequence
  Synthetic polypeptide
LCAQTKCTNSSWTSL

SEQ ID NO: 20566 - protein, 51 aa, Artificial Sequence
  Synthetic polypeptide
SQLLGWPRQDNGLNPGGEGCSEPRSCHCTPAWVDKSKDQVWKVLMYQQRLL

SEQ ID NO: 20567 - protein, 51 aa, Artificial Sequence; identical to SEQ ID NO: 20566
  Synthetic polypeptide

SEQ ID NO: 20568 - protein, 51 aa, Artificial Sequence; identical to SEQ ID NO: 20566
  Synthetic polypeptide

SEQ ID NO: 20569 - protein, 51 aa, Artificial Sequence; identical to SEQ ID NO: 20566
  Synthetic polypeptide

SEQ ID NO: 20570 - protein, 51 aa, Artificial Sequence; identical to SEQ ID NO: 20566
  Synthetic polypeptide

SEQ ID NO: 20571 - protein, 30 aa, Artificial Sequence
  Synthetic polypeptide
TREAKVAVSRDRAIALQLGWTRARTKCGRS

SEQ ID NO: 20572 - protein, 30 aa, Artificial Sequence; identical to SEQ ID NO: 20571
  Synthetic polypeptide

SEQ ID NO: 20573 - protein, 30 aa, Artificial Sequence; identical to SEQ ID NO: 20571
  Synthetic polypeptide

SEQ ID NO: 20574 - protein, 30 aa, Artificial Sequence; identical to SEQ ID NO: 20571
  Synthetic polypeptide

SEQ ID NO: 20575 - protein, 30 aa, Artificial Sequence; identical to SEQ ID NO: 20571
  Synthetic polypeptide

SEQ ID NO: 20576 - protein, 338 aa, Artificial Sequence
  Synthetic polypeptide
AEIVPLHSSLGGQEQGPSVEGLNVPTKATLEVSSIIKKKPNQAKKGLGAKKGSLGAQKLANTCFNEIEKQAQAADKMKEQEDLAKVVSKEESIVSSLRLAYKDLEIQMKKDEKMNISGKKNVDSDRLGMGFGNCRSVISHSVTSDMQTIEQESPIMAKPRKKYNDDSDDSYFTSSSSYFDEPVELRSSSFSSWDDSSDSYWKKETSKDTETVLKTTGYSDRPTARRKPDYEPVENTDEAQKKFGNVKAISSDMYFGRQSQADYETRARLERLSASSSISSADLFEEPRKQPAGNYSLSSVLPNAPDMAQFKQGVRSVAGKLSVFANGVVTSIQDRYGS

SEQ ID NO: 20577 - protein, 338 aa, Artificial Sequence; identical to SEQ ID NO: 20576
  Synthetic polypeptide

SEQ ID NO: 20578 - protein, 338 aa, Artificial Sequence; identical to SEQ ID NO: 20576
  Synthetic polypeptide

SEQ ID NO: 20579 - protein, 248 aa, Artificial Sequence
  Synthetic polypeptide
AEIVPLHSSLGGQEQGPSVEGLNVPTKATLEVSSIIKKKPNQAKKGLGAKKGSLGAQKLANTCFNEIEKQAQAADKMKEQEDLAKVVSKEESIVSSLRLAYKDLEIQMKKDEKMNISGKKNVDSDRLGMGFGNCRSVISHSVTSDMQTIEQESPIMAKPRKKYNDDSDDSYFTSSSRPTARRKPDYEPVENTDEAQKKFGNVKAISSDMYFGRQSQADYETRARLERLSASSSISSADLFEEPRKQPA

SEQ ID NO: 20580 - protein, 46 aa, Artificial Sequence
  Synthetic polypeptide
AEIVPLHSSLGGQEQGPSVEGLNVPTKATLEVSSIIKKKPNQAKKG

SEQ ID NO: 20581 - protein, 132 aa, Artificial Sequence
  Synthetic polypeptide
LLFVPYNGGPGWWSLRPCQWEHWVRLLPGLERAGRLHREGCGSPGPLHWAAGPELGMAPHLLWCPTNGLGLGGSPAGQWGGGSHYRGLVPGEPAGRPPALPLPGLAGLHDHTQLLRMAGQPWLAWGTAAARV

SEQ ID NO: 20582 - protein, 132 aa, Artificial Sequence; identical to SEQ ID NO: 20581
  Synthetic polypeptide

SEQ ID NO: 20583 - protein, 116 aa, Artificial Sequence
  Synthetic polypeptide
GPVSGNTGYGSYLVWKELGGFTEKAVVPLGLYTGQLALNWAWPPIFFGARQMGWALVDLLLVSGAAAATTVAWYQVSPLAARLLYPYLAWLAFTTTLNYCVWRDNHGWRGGRRLPE

SEQ ID NO: 20584 - protein, 116 aa, Artificial Sequence; identical to SEQ ID NO: 20583
  Synthetic polypeptide

SEQ ID NO: 20585 - protein, 77 aa, Artificial Sequence
  Synthetic polypeptide
ARDSELASDPALLLWPWESHHASVTFIRSIQRGTWMVVSKALSVGTLGTAPTWSGKSWEASQRRLWFPWASTLGSWP

SEQ ID NO: 20586 - protein, 77 aa, Artificial Sequence; identical to SEQ ID NO: 20585
  Synthetic polypeptide

SEQ ID NO: 20587 - protein, 77 aa, Artificial Sequence; identical to SEQ ID NO: 20585
  Synthetic polypeptide

SEQ ID NO: 20588 - protein, 69 aa, Artificial Sequence
  Synthetic polypeptide
LLFVPYNGGPGWWSLRPCQWEHWVRLLPGLERAGRLHREGCGSPGPLHWAAGPELGMAPHLLWCPTNGL

SEQ ID NO: 20589 - protein, 54 aa, Artificial Sequence
  Synthetic polypeptide
GPVSGNTGYGSYLVWKELGGFTEKAVVPLGLYTGQLALNWAWPPIFFGARQMGW

SEQ ID NO: 20590 - protein, 394 aa, Artificial Sequence
  Synthetic polypeptide
AVAAAAAARGPRLKFMSSPSLSDLGKREPAAAADERGTQQRRACANATWNSIHNGVIAVFQRKGLPDQELFSLNEGVRQLLKTELGSFFTEYLQNQLLTKGMVILRDKIRFYEGQKLLDSLAETWDFFFSDVLPMLQAIFYPVQGKEPSVRQLALLHFRNAITLSVKLEDALARAHARVPPAIVQMLLVLQGVHESRGVTEDYLRLETLVQKVVSPYLGTYGLHSSEGPFTHSCILEKRLLRRSRSGDVLAKNPVVRSKSYNTPLLNPVQEHEAEGAAAGGTSIRRHSVSEMTSCPEPQGFSDPPGQGPTGTFRSSPAPHSGPCPSRLYPTTQPPEQGLDPTRSSLPRSSPENLVDQILESVDSDSEGIFIDFGRGRGSGMSDLEGSGGRQSVV

SEQ ID NO: 20591 - protein, 394 aa, Artificial Sequence; identical to SEQ ID NO: 20590
  Synthetic polypeptide

SEQ ID NO: 20592 - protein, 12 aa, Artificial Sequence
  Synthetic polypeptide
RWQRRRRRGDRG

SEQ ID NO: 20593 - protein, 12 aa, Artificial Sequence
  Synthetic polypeptide
RWQRRRRRGDRG

SEQ ID NO: 20594 - protein, 12 aa, Artificial Sequence
  Synthetic polypeptide
RWQRRRRRGDRG

SEQ ID NO: 20595 - protein, 12 aa, Artificial Sequence
  Synthetic polypeptide
RWQRRRRRGDRG

SEQ ID NO: 20596 - protein, 12 aa, Artificial Sequence
  Synthetic polypeptide
RWQRRRRRGDRG

SEQ ID NO: 20597 - protein, 12 aa, Artificial Sequence
  Synthetic polypeptide
RWQRRRRRGDRG

SEQ ID NO: 20598 - protein, 12 aa, Artificial Sequence
  Synthetic polypeptide
RWQRRRRRGDRG

SEQ ID NO: 20599 - protein, 21 aa, Artificial Sequence
  Synthetic polypeptide
GGSGGGGAGTEVEVHEFAQPQ

SEQ ID NO: 20600 - protein, 21 aa, Artificial Sequence
  Synthetic polypeptide
GGSGGGGAGTEVEVHEFAQPQ

SEQ ID NO: 20601 - protein, 21 aa, Artificial Sequence
  Synthetic polypeptide
GGSGGGGAGTEVEVHEFAQPQ

SEQ ID NO: 20602 - protein, 21 aa, Artificial Sequence
  Synthetic polypeptide
GGSGGGGAGTEVEVHEFAQPQ

SEQ ID NO: 20603 - protein, 21 aa, Artificial Sequence
  Synthetic polypeptide
GGSGGGGAGTEVEVHEFAQPQ

SEQ ID NO: 20604 - protein, 21 aa, Artificial Sequence
  Synthetic polypeptide
GGSGGGGAGTEVEVHEFAQPQ

SEQ ID NO: 20605 - protein, 21 aa, Artificial Sequence
  Synthetic polypeptide
GGSGGGGAGTEVEVHEFAQPQ

SEQ ID NO: 20606 - protein, 183 aa, Artificial Sequence
  Synthetic polypeptide
AVAAAAAARGPRLKFMSSPSLSDLGKREPAAAADERGTQQRRACANATWNSIHNGVIAVFQRKGLPDQELFSLNEGVRQLLKTELGSFFTEYLQNQLLTKGMVILRDKIRFYEGICPRQSGPVVMAPMPTGQKLLDSLAETWDFFFSDVLPMLQAIFYPVQGKEPSVRQLALLHFRNAITLSV

SEQ ID NO: 20607 - protein, 128 aa, Artificial Sequence
  Synthetic polypeptide
AVAAAAAARGPRLKFMSSPSLSDLGKREPAAAADERGTQQRRACANATWNSIHNGVIAVFQRKGLPDQELFSLNEGVRQLLKTELGSFFTEYLQNQLLTKGMVILRDKIRFYEEAAGLTGRDLGLLLQ

SEQ ID NO: 20608 - protein, 570 aa, Artificial Sequence
  Synthetic polypeptide
AVAAAAAARGPRLKFMSSPSLSDLGKREPAAAADERGTQQRRACANATWNSIHNGVIAVFQRKGLPDQELFSLNEGVRQLLKTELGSFFTEYLQNQLLTKGMVILRDKIRFYEELQRDKAAAAAVLGAVRKRPSVVPMAGQDPALSTSHPFYDVARHGILQVAGDDRFGRRVVTFSCCRMPPSHELDHQRLLEYLKYTLDQYVENDYTIVYFHYGLNSRNKPSLGWLQSAYKEFDRKYKKNLKALYVVHPTSFIKVLWNILKPLISHKFGKKVIYFNYLSELHEHLKYDQLVIPPEVLRYDEKLQSLHEGRTPPPTKTPPPRPPLPTQQFGVSLQYLKDKNQGELIPPVLRFTVTYLREKGLRTEGLFRRSASVQTVREIQRLYNQGKPVNFDDYGDIHIPAVILKTFLRELPQPLLTFQAYEQILGITCVESSLRVTGCRQILRSLPEHNYVVLRYLMGFLHAVSRESIFNKMNSSNLACVFGLNLIWPSQGVSSLSALVPLNMFTELLIEYYEKIFSTPEAPGEHGLAPWEQGSRAAPLQEAVPRTQATGLTKPTLPPSPLMAARRRL

SEQ ID NO: 20609 - protein, 649 aa, Artificial Sequence
  Synthetic polypeptide
AVAAAAAARGPRLKFMSSPSLSDLGKREPAAAADERGTQQRRACANATWNSIHNGVIAVFQRKGLPDQELFSLNEGVRQLLKTELGSFFTEYLQNQLLTKGMVILRDKIRFYEGQKLLDSLAETWDFFFSDVLPMLQAIFYPVQGKEPSVRQLALLHFRNAITLSVKLEDALARAHARVPPAIVQMLLVLQGVHESRGVTEDYLRLETLVQKVVSPYLGTYGLHSSEGPFTHSCILELQRDKAAAAAVLGAVRKRPSVVPMAGQDPALSTSHPFYDVARHGILQVAGDDRFGRRVVTFSCCRMPPSHELDHQRLLEYKKNLKALYVVHPTSFIKVLWNILKPLISHKFGKKVIYFNYLSELHEHLKYDQLVIPPEVLRYDEKLQSLHEGRTPPPTKTPPPRPPLPTQQFGVSLQYLKDKNQGELIPPVLRFTVTYLREKGLRTEGLFRRSASVQTVREIQRLYNQGKPVNFDDYGDIHIPAVILKTFLRELPQPLLTFQAYEQILGITCVESSLRVTGCRQILRSLPEHNYVVLRYLMGFLHAVSRESIFNKMNSSNLACVFGLNLIWPSQGVSSLSALVPLNMFTELLIEYYEKIFSTPEAPGEHGLAPWEQGSRAAPLQEAVPRTQATGLTKPTLPPSPLMAARRRL

SEQ ID NO: 20610 - protein, 649 aa, Artificial Sequence; identical to SEQ ID NO: 20609
  Synthetic polypeptide

SEQ ID NO: 20611 - protein, 72 aa, Artificial Sequence
  Synthetic polypeptide
CLPRSSSPILLPLLPDLCPPCSTGTALANLTSDLHVAQSKRPSTQRQGCSLTRQPSTSRSWKAPPERQFVHL

SEQ ID NO: 20612 - protein, 72 aa, Artificial Sequence; identical to SEQ ID NO: 20611
  Synthetic polypeptide

SEQ ID NO: 20613 - protein, 50 aa, Artificial Sequence
  Synthetic polypeptide
VSPDHLLPFFSHSYQIYALPAPLELPWPTSPVTSMSPNPRGPLHRDKAAV

SEQ ID NO: 20614 - protein, 50 aa, Artificial Sequence; identical to SEQ ID NO: 20613
  Synthetic polypeptide

SEQ ID NO: 20615 - protein, 204 aa, Artificial Sequence
  Synthetic polypeptide
PPCRPIQEALYTETRLQFDETAKHLQKLESTTRKAVCASVKDFNKSQAIESVERKKQEKKQEQEDNLAEITNLLRGDLLSENPQQAASSFGPHRVVPDRWKGMTQEQLEQIRLVQKQQIQEKLRLQEEKRQRDLDWDRRRIQGARATLLFERQQWRRQRDLRRALDSSNLSLAKEQHLQKKYMNEVYTNQPTGDYFTQFNTGSR

SEQ ID NO: 20616 - protein, 204 aa, Artificial Sequence; identical to SEQ ID NO: 20615
  Synthetic polypeptide

SEQ ID NO: 20617 - protein, 17 aa, Artificial Sequence
  Synthetic polypeptide
LPRPQPRGPLHRDKAAV

SEQ ID NO: 20618 - protein, 17 aa, Artificial Sequence
  Synthetic polypeptide
LPRPQPRGPLHRDKAAV

SEQ ID NO: 20619 - protein, 209 aa, Artificial Sequence
  Synthetic polypeptide
QLLSSSCPGPSPEALYTETRLQFDETAKHLQKLESTTRKAVCASVKDFNKSQAIESVERKKQEKKQEQEDNLAEITNLLRGDLLSENPQQAASSFGPHRVVPDRWKGMTQEQLEQIRLVQKQQIQEKLRLQEEKRQRDLDWDRRRIQGARATLLFERQQWRRQRDLRRALDSSNLSLAKEQHLQKKYMNEVYTNQPTGDYFTQFNTGSR

SEQ ID NO: 20620 - protein, 209 aa, Artificial Sequence; identical to SEQ ID NO: 20619
  Synthetic polypeptide

SEQ ID NO: 20621 - protein, 51 aa, Artificial Sequence
  Synthetic polypeptide
PSTHIRDSSFLLAAQAPAQRPSTQRQGCSLTRQPSTSRSWKAPPERQFVHL

SEQ ID NO: 20622 - protein, 51 aa, Artificial Sequence; identical to SEQ ID NO: 20621
  Synthetic polypeptide

SEQ ID NO: 20623 - protein, 62 aa, Artificial Sequence
  Synthetic polypeptide
LPRPQPRPSSQWKGKSKRKSKNKRTTWPRSPTSCVGTCSPRTRSRQPAPSGPTAWSLTAGRA

SEQ ID NO: 20624 - protein, 62 aa, Artificial Sequence; identical to SEQ ID NO: 20623
  Synthetic polypeptide

SEQ ID NO: 20625 - protein, 62 aa, Artificial Sequence
  Synthetic polypeptide
QLLSSSCPGPSPGHRVSGKEKAREKARTRGQLGRDHQPPAWGPALREPAAGSQLLRAPPRGP

SEQ ID NO: 20626 - protein, 62 aa, Artificial Sequence; identical to SEQ ID NO: 20625
  Synthetic polypeptide

SEQ ID NO: 20627 - protein, 176 aa, Artificial Sequence
  Synthetic polypeptide
PSTHIRDSSFLLAAQAPAQAIESVERKKQEKKQEQEDNLAEITNLLRGDLLSENPQQAASSFGPHRVVPDRWKGMTQEQLEQIRLVQKQQIQEKLRLQEEKRQRDLDWDRRRIQGARATLLFERQQWRRQRDLRRALDSSNLSLAKEQHLQKKYMNEVYTNQPTGDYFTQFNTGSR

SEQ ID NO: 20628 - protein, 176 aa, Artificial Sequence; identical to SEQ ID NO: 20627
  Synthetic polypeptide

SEQ ID NO: 20629 - protein, 33 aa, Artificial Sequence
  Synthetic polypeptide
CELIESWVQDWRSAWTPRATGTPTSAGCRFKTP

SEQ ID NO: 20630 - protein, 167 aa, Artificial Sequence
  Synthetic polypeptide
VSSLRAGSRTGGRPGPPGLREPRLLLAVASRHPDLELCGAHRSCYNHQHSHFCPICKGFLPKKAPLLWEKRDRLPAEDRIPPAAAHQRHLAAGAAGCEPRCTELSLPLRHLQRLTGPLRPPFPLRAQPGGPEAPEGRARREEAAPGGLRHHQGHPADALPQLQHHLR

SEQ ID NO: 20631 - protein, 432 aa, Artificial Sequence
  Synthetic polypeptide
ELGPGLAVGLDPQGYGNPDFCWLSLQDTLIWSFAGPIGAVIIINTVTSVLSAKVSCQRKHHYYGKKGIVSLLRTAFLLLLLISATWLLGLLAVNRDALSFHYLFAIFSGLQGPFVLLFHCVLNQEVRKHLKGVLGGRKLHLEDSATTRATLLTRSLNCNTTFGDGPDMLRTDLGESTASLDSIVRDEGIQKLGVSSGLVRGSHGEPDASLMPRSCKDPPGHDSDSDSELSLDEQSSSYASSHSSDSEDDGVGAEEKWDPARGAVHSTPKGDAVANHVPAGWPDQSLAESDSEDPSGKPRLKVETKVSVELHREEQGSHRGEYPPDQESGGAARLASSQPPEQRKGILKNKVTYPPPLTLTEQTLKGRLREKLADCEQSPTSSRTSSLGSGGPDCAITVKSPGREPGRDHLNGVAMNVRTGSAQADGSDSEKP

SEQ ID NO: 20632 - protein, 15 aa, Artificial Sequence
  Synthetic polypeptide
GQEIETILANKKAPC

SEQ ID NO: 20633 - protein, 59 aa, Artificial Sequence
  Synthetic polypeptide
SQHFGRPRRADHEVRRSRPSWLTRRPPAEAGWPEDHPADHAPGAWHREGGPDQQAEATP

SEQ ID NO: 20634 - protein, 721 aa, Artificial Sequence
  Synthetic polypeptide
QEGPLLRPAGRRTTPQTTRPGPGTEREAPISRRRRHPDDAGQFAVALVIIYRTLGQLLPERYDPDRRSLRLPHRPIINTPMVSTLVYSEGAPLPRPLERPVLVEFALLEVEERTKPVCVFWNHSLAVGGTGGWSARGCELLSRNRTHVACQCSHTASFAVLMDISRRENGEVLPLKIVTYAAVSLSLAALLVAFVLLSLVRMLRSNLHSIHKHLAVALFLSQLVFVIGINQTENPFLCTVVAILLHYIYMSTFAWTLVESLHVYRMLTEVRNIDTGPMRFYYVVGWGIPAIVTGLAVGLDPQGYGNPDFCWLSLQDTLIWSFAGPIGAVIIINTVTSVLSAKVSCQRKHHYYGKKGIVSLLRTAFLLLLLISATWLLGLLAVNRDALSFHYLFAIFSGLQGPFVLLFHCVLNQEVRKHLKGVLGGRKLHLEDSATTRATLLTRSLNCNTTFGDGPDMLRTDLGESTASLDSIVRDEGIQKLGVSSGLVRGSHGEPDASLMPRSCKDPPGHDSDSDSELSLDEQSSSYASSHSSDSEDDGVGAEEKWDPARGAVHSTPKGDAVANHVPAGWPDQSLAESDSEDPSGKPRLKVETKVSVELHREEQGSHRGEYPPDQESGGAARLASSQPPEQRKGILKNKVTYPPPLTLTEQTLKGRLREKLADCEQSPTSSRTSSLGSGGPDCAITVKSPGREPGRDHLNGVAMNVRTGSAQADGSDSEKP

SEQ ID NO: 20635 - protein, 31 aa, Artificial Sequence
  Synthetic polypeptide
GQARWLMPVILALREAEVPKTDPGPAPNWPP

SEQ ID NO: 20636 - protein, 207 aa, Artificial Sequence
  Synthetic polypeptide
HFGRLRYLKQIQDLPPTGLPEMNLLEMYSLKDEMGNLRKLLESTPSPVVFCHNDIQEGNILLLSEPENADSLMLVDFEYSSYNYRGFDIGNHFCEWVYDYTHEEWPFYKARPTDYPTQEQQLHFIRHYLAEAKKGETLSQEEQRKLEEDLLVEVSRYALASHFFWGLWSILQASMSTIEFGYLDYAQSRFQFYFQQKGQLTSVHSSS

SEQ ID NO: 20637 - protein, 164 aa, Artificial Sequence
  Synthetic polypeptide
LLTAGQMYQQYQQQAGYGAQQPQAPPQQPQQYGIQYSASYSQQTGPQQPQQFQGYGQQPTSQAPAPAFSGQPQQLPAQPPQQYQASNYPAQTYTAQTSQPTNYTVAPASQPGMAPSQPGAYQPRPGFTSLPGSTMTPPPSGPNPYARNRPPFGQGYTQPGPGYR

SEQ ID NO: 20638 - protein, 164 aa, Artificial Sequence; identical to SEQ ID NO: 20637
  Synthetic polypeptide

SEQ ID NO: 20639 - protein, 164 aa, Artificial Sequence; identical to SEQ ID NO: 20637
  Synthetic polypeptide

SEQ ID NO: 20640 - protein, 164 aa, Artificial Sequence; identical to SEQ ID NO: 20637
  Synthetic polypeptide

SEQ ID NO: 20641 - protein, 132 aa, Artificial Sequence
  Synthetic polypeptide
LQVRCTNSTSNRPAMVHSSRRLHLSSLNSMVFSIQQAIVSRLDLNNLSSSRDMASNQLPRHQLLPFLVSLNNCLLSRHSSTRRAIILHKLTLPKLLSLLIILWLLPLNLEWLQANLGPINQDQVLLHFLEVP

SEQ ID NO: 20642 - protein, 132 aa, Artificial Sequence; identical to SEQ ID NO: 20641
  Synthetic polypeptide

SEQ ID NO: 20643 - protein, 132 aa, Artificial Sequence; identical to SEQ ID NO: 20641
  Synthetic polypeptide

SEQ ID NO: 20644 - protein, 132 aa, Artificial Sequence; identical to SEQ ID NO: 20641
  Synthetic polypeptide

SEQ ID NO: 20645 - protein, 47 aa, Artificial Sequence
  Synthetic polypeptide
LFMVLFLAIDCRSDVPTVPATGRLWCTAAAGSTSAASTVWYSVFSKL

SEQ ID NO: 20646 - protein, 47 aa, Artificial Sequence; identical to SEQ ID NO: 20645
  Synthetic polypeptide

SEQ ID NO: 20647 - protein, 47 aa, Artificial Sequence; identical to SEQ ID NO: 20645
  Synthetic polypeptide

SEQ ID NO: 20648 - protein, 47 aa, Artificial Sequence; identical to SEQ ID NO: 20645
  Synthetic polypeptide

SEQ ID NO: 20649 - protein, 38 aa, Artificial Sequence
  Synthetic polypeptide
DVGSASAPPPRLGCEERLCPAATPSGSHPRLCPSSWKL

SEQ ID NO: 20650 - protein, 38 aa, Artificial Sequence; identical to SEQ ID NO: 20649
  Synthetic polypeptide

SEQ ID NO: 20651 - protein, 38 aa, Artificial Sequence; identical to SEQ ID NO: 20649
  Synthetic polypeptide

SEQ ID NO: 20652 - protein, 38 aa, Artificial Sequence; identical to SEQ ID NO: 20649
  Synthetic polypeptide

SEQ ID NO: 20653 - protein, 38 aa, Artificial Sequence; identical to SEQ ID NO: 20649
  Synthetic polypeptide

SEQ ID NO: 20654 - protein, 677 aa, Artificial Sequence
  Synthetic polypeptide
GASLPGHPSSEMWGAPLPHRPVWDVRSASARPRPRLGVTPDYVPPLGNFDVETLDITPHTVTAISAKIRKKGKIERKQKTDGSKTSSSDTLSEEKNSECDPTPSHRGQLNKEFTGKEEKTSLLLHNSHAFFRELDIEVFSILHCGLVTKFILDTEMHTEATEVVQLGPPELLFLLEDLSQKLESMLTPPIARRVPFLKNKGSRNIGFSHLQQRSAQEIVHCVFQLLTPMCNHLENIHNYFQCLAAENHGVVDGPGVKVQEYHIMSSCYQRLLQIFHGLFAWSGFSQPENQNLLYSALHVLSSRLKQGEHSQPLEELLSQSVHYLQNFHQSIPSFQCALYLIRLLMVILEKSTASAQNKEKIASLARQFLCRVWPSGDKEKSNISNDQLHALLCIYLEHTESILKAIEEIAGVGVPELINSPKDASSSTFPTLTRHTFVVFFRVMMAELEKTVKKIEPGTAADSQQIHEEKLLYWNMAVRDFSILINLIKVFDSHPVLHVCLKYGRLFVEAFLKQCMPLLDFSFRKHREDVLSLLETFQLDTRLLHHLCGHSKIHQDTRLTQHVPLLKKTLELLVCRVKAMLTLNNCREAFWLGNLKNRDLQGEEIKSQNSQESTADESEDDMSSQASKSKATEVSLQNPPESGTDGCILLIVLSWWSRTLPTYVYCQMLLCPFPFPP

SEQ ID NO: 20655 - protein, 28 aa, Artificial Sequence
  Synthetic polypeptide
GAPLPGRDPVWESPQTMSLLLETLMWKL

SEQ ID NO: 20656 - protein, 28 aa, Artificial Sequence
  Synthetic polypeptide
GAPLPGRDPVWESPQTMSLLLETLMWKL

SEQ ID NO: 20657 - protein, 28 aa, Artificial Sequence
  Synthetic polypeptide
GAPLPGRDPVWESPQTMSLLLETLMWKL

SEQ ID NO: 20658 - protein, 28 aa, Artificial Sequence
  Synthetic polypeptide
GAPLPGRDPVWESPQTMSLLLETLMWKL

SEQ ID NO: 20659 - protein, 28 aa, Artificial Sequence
  Synthetic polypeptide
GAPLPGRDPVWESPQTMSLLLETLMWKL

SEQ ID NO: 20660 - protein, 455 aa, Artificial Sequence
  Synthetic polypeptide
GASLPGHPSSEMWGAPLPHRPVWDVRSASARPRPRLGVTPDYVPPLGNFDVETLDITPHTVTAISAKIRKKGKIERKQKTDGSKTSSSDTLSEEKNSECDPTPSHRGQLNKEFTGKEEKTSLLLHNSHAFFRELDIEVFSILHCGLVTKFILDTEMHTEATEVVQLGPPELLFLLEDLSQKLESMLTPPIARRVPFLKNKGSRNIGFSHLQQRSAQEIVHCVFQLLTPMCNHLENIHNYFQCLAAENHGVVDGPGVKVQEYHIMSSCYQRLLQIFHGLFAWSGFSQPENQNLLYSALHVLSSRLKQGEHSQPLEELLSQSVHYLQNFHQSIPSFQCALYLIRLLMVILEKSTASAQNKEKIASLARQFLCRVWPSGDKEKSNISNDQLHALLCIYLEHTESILKAIEEIAGVGVPELINSPKDASSSTFPTLTRFMKRNSSTGTWLFETSVSSST

SEQ ID NO: 20661 - protein, 455 aa, Artificial Sequence; identical to SEQ ID NO: 20660
  Synthetic polypeptide

SEQ ID NO: 20662 - protein, 657 aa, Artificial Sequence
  Synthetic polypeptide
GASLPGHPSSEMWGAPLPHRPVWDVRSASARPRPRLGVTPDYVPPLGNFDVETLDITPHTVTAISAKIRKKGKIERKQKTDGSKTSSSDTLSEEKNSECDPTPSHRGQLNKEFTGKEEKTSLLLHNSHAFFRELDIEVFSILHCGLVTKFILDTEMHTEATEVVQLGPPELLFLLEDLSQKLESMLTPPIARRVPFLKNKGSRNIGFSHLQQRSAQEIVHCVFQLLTPMCNHLENIHNYFQCLAAENHGVVDGPGVKVQEYHIMSSCYQRLLQIFHGLFAWSGFSQPENQNLLYSALHVLSSRLKQGEHSQPLEELLSQSVHYLQNFHQSIPSFQCALYLIRLLMVILEKSTASAQNKEKIASLARQFLCRVWPSGDKEKSNISNDQLHALLCIYLEHTESILKAIEEIAGVGVPELINSPKDASSSTFPTLTRHTFVVFFRVMMAELEKTVKKIEPGTAADSQQIHEEKLLYWNMAVRDFSILINLIKVFDSHPVLHVCLKYGRLFVEAFLKQCMPLLDFSFRKHREDVLSLLETFQLDTRLLHHLCGHSKIHQDTRLTQHVPLLKKTLELLVCRVKAMLTLNNCREAFWLGNLKNRDLQGEEIKSQNSQESTADESEDDMSSQASKSKATEDGEEDEVSAGEKEQDSDESYDDSD

SEQ ID NO: 20663 - protein, 657 aa, Artificial Sequence; identical to SEQ ID NO: 20662
  Synthetic polypeptide

SEQ ID NO: 20664 - protein, 60 aa, Artificial Sequence
  Synthetic polypeptide
EYGEKRTFVHCWWECQLVQALWRTVWSFLKKLKIESPYDPGMPLSPQTMSLLLETLMWKL

SEQ ID NO: 20665 - protein, 60 aa, Artificial Sequence; identical to SEQ ID NO: 20664
  Synthetic polypeptide

SEQ ID NO: 20666 - protein, 60 aa, Artificial Sequence; identical to SEQ ID NO: 20664
  Synthetic polypeptide

SEQ ID NO: 20667 - protein, 60 aa, Artificial Sequence; identical to SEQ ID NO: 20664
  Synthetic polypeptide

SEQ ID NO: 20668 - protein, 60 aa, Artificial Sequence; identical to SEQ ID NO: 20664
  Synthetic polypeptide

SEQ ID NO: 20669 - protein, 21 aa, Artificial Sequence
  Synthetic polypeptide
NHHMIQECHCHPRLCPSSWKL

SEQ ID NO: 20670 - protein, 21 aa, Artificial Sequence
  Synthetic polypeptide
NHHMIQECHCHPRLCPSSWKL

SEQ ID NO: 20671 - protein, 21 aa, Artificial Sequence
  Synthetic polypeptide
NHHMIQECHCHPRLCPSSWKL

SEQ ID NO: 20672 - protein, 21 aa, Artificial Sequence
  Synthetic polypeptide
NHHMIQECHCHPRLCPSSWKL

SEQ ID NO: 20673 - protein, 21 aa, Artificial Sequence
  Synthetic polypeptide
NHHMIQECHCHPRLCPSSWKL

SEQ ID NO: 20674 - protein, 645 aa, Artificial Sequence
  Synthetic polypeptide
SRNATVTPDYVPPLGNFDVETLDITPHTVTAISAKIRKKGKIERKQKTDGSKTSSSDTLSEEKNSECDPTPSHRGQLNKEFTGKEEKTSLLLHNSHAFFRELDIEVFSILHCGLVTKFILDTEMHTEATEVVQLGPPELLFLLEDLSQKLESMLTPPIARRVPFLKNKGSRNIGFSHLQQRSAQEIVHCVFQLLTPMCNHLENIHNYFQCLAAENHGVVDGPGVKVQEYHIMSSCYQRLLQIFHGLFAWSGFSQPENQNLLYSALHVLSSRLKQGEHSQPLEELLSQSVHYLQNFHQSIPSFQCALYLIRLLMVILEKSTASAQNKEKIASLARQFLCRVWPSGDKEKSNISNDQLHALLCIYLEHTESILKAIEEIAGVGVPELINSPKDASSSTFPTLTRHTFVVFFRVMMAELEKTVKKIEPGTAADSQQIHEEKLLYWNMAVRDFSILINLIKVFDSHPVLHVCLKYGRLFVEAFLKQCMPLLDFSFRKHREDVLSLLETFQLDTRLLHHLCGHSKIHQDTRLTQHVPLLKKTLELLVCRVKAMLTLNNCREAFWLGNLKNRDLQGEEIKSQNSQESTADESEDDMSSQASKSKATEVSLQNPPESGTDGCILLIVLSWWSRTLPTYVYCQMLLCPFPFPP

SEQ ID NO: 20675 - protein, 423 aa, Artificial Sequence
  Synthetic polypeptide
SRNATVTPDYVPPLGNFDVETLDITPHTVTAISAKIRKKGKIERKQKTDGSKTSSSDTLSEEKNSECDPTPSHRGQLNKEFTGKEEKTSLLLHNSHAFFRELDIEVFSILHCGLVTKFILDTEMHTEATEVVQLGPPELLFLLEDLSQKLESMLTPPIARRVPFLKNKGSRNIGFSHLQQRSAQEIVHCVFQLLTPMCNHLENIHNYFQCLAAENHGVVDGPGVKVQEYHIMSSCYQRLLQIFHGLFAWSGFSQPENQNLLYSALHVLSSRLKQGEHSQPLEELLSQSVHYLQNFHQSIPSFQCALYLIRLLMVILEKSTASAQNKEKIASLARQFLCRVWPSGDKEKSNISNDQLHALLCIYLEHTESILKAIEEIAGVGVPELINSPKDASSSTFPTLTRFMKRNSSTGTWLFETSVSSST

SEQ ID NO: 20676 - protein, 423 aa, Artificial Sequence; identical to SEQ ID NO: 20675
  Synthetic polypeptide

SEQ ID NO: 20677 - protein, 625 aa, Artificial Sequence
  Synthetic polypeptide
SRNATVTPDYVPPLGNFDVETLDITPHTVTAISAKIRKKGKIERKQKTDGSKTSSSDTLSEEKNSECDPTPSHRGQLNKEFTGKEEKTSLLLHNSHAFFRELDIEVFSILHCGLVTKFILDTEMHTEATEVVQLGPPELLFLLEDLSQKLESMLTPPIARRVPFLKNKGSRNIGFSHLQQRSAQEIVHCVFQLLTPMCNHLENIHNYFQCLAAENHGVVDGPGVKVQEYHIMSSCYQRLLQIFHGLFAWSGFSQPENQNLLYSALHVLSSRLKQGEHSQPLEELLSQSVHYLQNFHQSIPSFQCALYLIRLLMVILEKSTASAQNKEKIASLARQFLCRVWPSGDKEKSNISNDQLHALLCIYLEHTESILKAIEEIAGVGVPELINSPKDASSSTFPTLTRHTFVVFFRVMMAELEKTVKKIEPGTAADSQQIHEEKLLYWNMAVRDFSILINLIKVFDSHPVLHVCLKYGRLFVEAFLKQCMPLLDFSFRKHREDVLSLLETFQLDTRLLHHLCGHSKIHQDTRLTQHVPLLKKTLELLVCRVKAMLTLNNCREAFWLGNLKNRDLQGEEIKSQNSQESTADESEDDMSSQASKSKATEDGEEDEVSAGEKEQDSDESYDDSD

SEQ ID NO: 20678 - protein, 625 aa, Artificial Sequence; identical to SEQ ID NO: 20677
  Synthetic polypeptide

SEQ ID NO: 20679 - protein, 232 aa, Artificial Sequence
  Synthetic polypeptide
GPLRDPFCFTLTVFFKNTKLPTIITEKFPIQICVSGVFQKICRSGLTAAFPSNCPPEGGMYIFQLFDSYAASGMCLLFVAIFECICIGWVYGSNRFYDNIEDMIGYRPPSLIKWCWMIMTPGICAGIFIFFLIKYKPLKYNNIYTYPAWGYGIGWLMALSSMLCIPLWICITVWKTEGTLPEKLQKLTTPSTDLKMRGKLGVSPRMVTVNDCDAKLKSDGTIAAITEKETHF

SEQ ID NO: 20680 - protein, 78 aa, Artificial Sequence
  Synthetic polypeptide
QKNFPYKSAFLVSSRKSADLASQLHSPATALQRVACTSSSSLTPMPPVGCAFSSWPSLSASASAGCMEATGSMITLKT

SEQ ID NO: 20681 - protein, 50 aa, Artificial Sequence
  Synthetic polypeptide
KHEVANNYNRKISHTNLRFWCLPENLQIWPHSCIPQQLPSRGWHVHLPAL

SEQ ID NO: 20682 - protein, 49 aa, Artificial Sequence
  Synthetic polypeptide
IDTAVETVRQPLEHRPLLLQLQHGQHYQHDQRCGGVLGAQHASDDGRAG

SEQ ID NO: 20683 - protein, 479 aa, Artificial Sequence
  Synthetic polypeptide
RITSSSQRDICTLLFTAALFTVGKRWKQAKRSLINELTLPWKQCDNPWNTDRCFSNYSMVNTTNMTSAVVEFWERNMHQMTDGLDKPGQIRWPLAITLAIAWILVYFCIWKGVGWTGKVVYFSATYPYIMLIILFFRGVTLPGAKEGILFYITPNFRKLSDSEVWLDAATQIFFSYGLGLGSLIALGSYNSFHNNVYRDSIIVCCINSCTSMFAGFVIFSIVGFMAHVTKRSIADVAASGPGLAFLAYPEAVTQLPISPLWAILFFSMLLMLGIDSQFCTVEGFITALVDEYPRLLRNRRELFIAAVCIISYLIGLSNITQGGIYVFKLFDYYSASGMSLLFLVFFECVSISWFYGVNRFYDNIQEMVGSRPCIWWKLCWSFFTPIIVAGVFIFSAVQMTPLTMGNYVFPKWGQGVGWLMALSSMVLIPGYMAYMFLTLKGSLKQRIQVMVQPSEDIVRPENGPEQPQAGSSTSKEAYI

SEQ ID NO: 20684 - protein, 4 aa, Artificial Sequence
  Synthetic polypeptide
SCWH

SEQ ID NO: 20685 - protein, 26 aa, Artificial Sequence
  Synthetic polypeptide
RQPIVRLCDHAGTDPSLSFEIQQKIL

SEQ ID NO: 20686 - protein, 20 aa, Artificial Sequence
  Synthetic polypeptide
DFVIMLALIPVYPLRFSRRS

SEQ ID NO: 20687 - protein, 265 aa, Artificial Sequence
  Synthetic polypeptide
PGRAAGKESCDVQLYIKRQSEHSILAGDPFELECPVKYCANRPHVTWCKLNGTTCVKLEDRQTSWKEEKNISFFILHFEPVLPNDNGSYRCSANFQSNLIESHSTTLYVTDVKSASERPSKDEMASRPWLLYRLLPLGGLPLLITTCFCLFCCLRRHQGKQNELSDTAGREINLVDAHLKSEQTEASTRQNSQVLLSETGIYDNDPDLCFRMQEGSEVYSNPCLEENKPGIVYASLNHSVIGPNSRLARNVKEAPTEYASICVRS

SEQ ID NO: 20688 - protein, 18 aa, Artificial Sequence
  Synthetic polypeptide
SISLGELQGKNHVMYSFI

SEQ ID NO: 20689 - protein, 18 aa, Artificial Sequence
  Synthetic polypeptide
SISLGELQGKNHVMYSFI

SEQ ID NO: 20690 - protein, 14 aa, Artificial Sequence
  Synthetic polypeptide
PEALAWESCRERIM

SEQ ID NO: 20691 - protein, 14 aa, Artificial Sequence
  Synthetic polypeptide
PEALAWESCRERIM

SEQ ID NO: 20692 - protein, 217 aa, Artificial Sequence
  Synthetic polypeptide
PGRAAGKESCDVQLYIKRQSEHSILAGDPFELECPVKYCANRPHVTWCKLNGTTCVKLEDRQTSWKEEKNISFFILHFEPVLPNDNGSYRCSANFQSNLIESHSTTLYVTGKQNELSDTAGREINLVDAHLKSEQTEASTRQNSQVLLSETGIYDNDPDLCFRMQEGSEVYSNPCLEENKPGIVYASLNHSVIGPNSRLARNVKEAPTEYASICVRS

SEQ ID NO: 20693 - protein, 12 aa, Artificial Sequence
  Synthetic polypeptide
YAQHRAGSSWEM

SEQ ID NO: 20694 - protein, 12 aa, Artificial Sequence
  Synthetic polypeptide
YAQHRAGSSWEM

SEQ ID NO: 20695 - protein, 12 aa, Artificial Sequence
  Synthetic polypeptide
YAQHRAGSSWEM

SEQ ID NO: 20696 - protein, 12 aa, Artificial Sequence
  Synthetic polypeptide
YAQHRAGSSWEM

SEQ ID NO: 20697 - protein, 12 aa, Artificial Sequence
  Synthetic polypeptide
YAQHRAGSSWEM

SEQ ID NO: 20698 - protein, 12 aa, Artificial Sequence
  Synthetic polypeptide
YAQHRAGSSWEM

SEQ ID NO: 20699 - protein, 20 aa, Artificial Sequence
  Synthetic polypeptide
AIDMHNTGPDRAGRCDTTQY

SEQ ID NO: 20700 - protein, 20 aa, Artificial Sequence
  Synthetic polypeptide
AIDMHNTGPDRAGRCDTTQY

SEQ ID NO: 20701 - protein, 20 aa, Artificial Sequence
  Synthetic polypeptide
AIDMHNTGPDRAGRCDTTQY

SEQ ID NO: 20702 - protein, 20 aa, Artificial Sequence
  Synthetic polypeptide
AIDMHNTGPDRAGRCDTTQY

SEQ ID NO: 20703 - protein, 20 aa, Artificial Sequence
  Synthetic polypeptide
AIDMHNTGPDRAGRCDTTQY

SEQ ID NO: 20704 - protein, 20 aa, Artificial Sequence
  Synthetic polypeptide
AIDMHNTGPDRAGRCDTTQY

SEQ ID NO: 20705 - protein, 202 aa, Artificial Sequence
  Synthetic polypeptide
NCKQLLFNKRINLQYIHIMEYHSALTRNELLICTTPGRIELGDVTPHNIKQLKRLNQVIFPVSYNDKFYKDVLEVGELAKLAYFNDIAVGAVCCRVDHSQNQKRLYIMTLGCLAPYRRLGIGTKMLNHVLNICEKDGTFDNIYLHVQISNESAIDFYRKFGFEIIETKKNYYKRIEPADAHVLQKNLKVPSGQNADVQKTDN

SEQ ID NO: 20706 - protein, 202 aa, Artificial Sequence; identical to SEQ ID NO: 20705
  Synthetic polypeptide

SEQ ID NO: 20707 - protein, 162 aa, Artificial Sequence
  Synthetic polypeptide
NCKQLLFNKRINLQYIHIMEYHSALTRNELLICTTPGRIELGDVTPHNIKQLKRLNQVIFPVSYNDKFYKDVLEVGELAKLGTKMLNHVLNICEKDGTFDNIYLHVQISNESAIDFYRKFGFEIIETKKNYYKRIEPADAHVLQKNLKVPSGQNADVQKTDN

SEQ ID NO: 20708 - protein, 92 aa, Artificial Sequence
  Synthetic polypeptide
NCKQLLFNKRINLQYIHIMEYHSALTRNELLICTTPGRIELGDVTPHNIKQLKRLNQVIFPVSYNDKFYKDVLEKNLKVPSGQNADVQKTDN

SEQ ID NO: 20709 - protein, 81 aa, Artificial Sequence
  Synthetic polypeptide
NCKQLLFNKRINLQYIHIMEYHSALTRNELLICTTPGRIELGDVTPHNIKQLKRLNQVIFPVSYNDKFYKDVLEPISMILL

SEQ ID NO: 20710 - protein, 91 aa, Artificial Sequence
  Synthetic polypeptide
NCKQLLFNKRINLQYIHIMEYHSALTRNELLICTTPGRIELGDVTPHNIKQLKRLNQVIFPVSYNDKFYKDVLEVGELAKLGAVCCRVDHS

SEQ ID NO: 20711 - protein, 230 aa, Artificial Sequence
  Synthetic polypeptide
CWVEKNDDDQKIEQDGIKPEDKAHKAATKIQASFRGHITRKKLKGEKKDDVQAAEAEANKKDEAPVADGVEKKGEGTTTAEAAPATGSKPDEPGKAGETPSEEKKGEGDAATEQAAPQAPASSEEKAGSAETESATKASTDNSPSSKAEDAPAKEEPKQADVPAAVTAAAATTPAAEDAAAKATAQPPTETGESSQAEENIEAVDETKPKESARQDEGKEEEPEADQEHA

SEQ ID NO: 20712 - protein, 230 aa, Artificial Sequence; identical to SEQ ID NO: 20711
  Synthetic polypeptide

SEQ ID NO: 20713 - protein, 51 aa, Artificial Sequence
  Synthetic polypeptide
MGSRPGSANCLSCDVGLKKMMTTKRLNKMVSNQKIKLIRPQPKFRLASVDT

SEQ ID NO: 20714 - protein, 51 aa, Artificial Sequence; identical to SEQ ID NO: 20713
  Synthetic polypeptide

SEQ ID NO: 20715 - protein, 16 aa, Artificial Sequence
  Synthetic polypeptide
WVLDLVLPIACHVMLG

SEQ ID NO: 20716 - protein, 16 aa, Artificial Sequence
  Synthetic polypeptide
WVLDLVLPIACHVMLG

SEQ ID NO: 20717 - protein, 23 aa, Artificial Sequence
  Synthetic polypeptide
RLMLPNCLGNTVDHHGRRASGAL

SEQ ID NO: 20718 - protein, 23 aa, Artificial Sequence
  Synthetic polypeptide
RLMLPNCLGNTVDHHGRRASGAL

SEQ ID NO: 20719 - protein, 23 aa, Artificial Sequence
  Synthetic polypeptide
RLMLPNCLGNTVDHHGRRASGAL

SEQ ID NO: 20720 - protein, 23 aa, Artificial Sequence
  Synthetic polypeptide
RLMLPNCLGNTVDHHGRRASGAL

SEQ ID NO: 20721 - protein, 31 aa, Artificial Sequence
  Synthetic polypeptide
TITDAELQVRCRRQELKGGLVEPFWHHFCWT

SEQ ID NO: 20722 - protein, 31 aa, Artificial Sequence; identical to SEQ ID NO: 20721
  Synthetic polypeptide

SEQ ID NO: 20723 - protein, 31 aa, Artificial Sequence; identical to SEQ ID NO: 20721
  Synthetic polypeptide

SEQ ID NO: 20724 - protein, 31 aa, Artificial Sequence; identical to SEQ ID NO: 20721
  Synthetic polypeptide

SEQ ID NO: 20725 - protein, 301 aa, Artificial Sequence
  Synthetic polypeptide
LPRKHRRPSRTPSFRCVVEDKNSKVAWLNRSGIIFAGHDKWSLDPRVELEKRHSLEYSLRIQKVDVYDEGSYTCSVQTQHEPKTSQVYLIVQVPPKISNISSDVTVNEGSNVTLVCMANGRPEPVITWRHLTPTGREFEGEEEYLEILGITREQSGKYECKAANEVSSADVKQVKVTVNYPPTITESKSNEATTGRQASLKCEASAVPAPDFEWYRDDTRINSANGLEIKSTEGQSSLTVTNVTEEHYGNYTCVAANKLGVTNASLVLFRPGSVRGINGSISLAVPLWLLAASLLCLLSKC

SEQ ID NO: 20726 - protein, 324 aa, Artificial Sequence
  Synthetic polypeptide
LPRKHRRPSRTPSFRCVVEDKNSKVAWLNRSGIIFAGHDKWSLDPRVELEKRHSLEYSLRIQKVDVYDEGSYTCSVQTQHEPKTSQVYLIVQVPPKISNISSDVTVNEGSNVTLVCMANGRPEPVITWRHLTPTGREFEGEEEYLEILGITREQSGKYECKAANEVSSADVKQVKVTVNYPPTITESKSNEATTGRQASLKCEASAVPAPDFEWYRDDTRINSANGLEIKSTEGQSSLTVTNVTEEHYGNYTCVAANKLGVTNASLVLFKRVLPTIPHPIQEIGTTVHFKQKGPGSVRGINGSISLAVPLWLLAASLLCLLSKC

SEQ ID NO: 20727 - protein, 324 aa, Artificial Sequence; identical to SEQ ID NO: 20726
  Synthetic polypeptide

SEQ ID NO: 20728 - protein, 134 aa, Artificial Sequence
  Synthetic polypeptide
LPRKHRRPSRTPSFRCVVEDKNSKVAWLNRSGIIFAGHDKWSLDPRVELEKRHSLEYSLRIQKVDVYDEGSYTCSVQTQHEPKTSQVYLIVQVPPKISNISSDVTVNEGSNVTLVCMANGRPEPVITWRHLTPT

SEQ ID NO: 20729 - protein, 310 aa, Artificial Sequence
  Synthetic polypeptide
ERSTYDLRSSDRPAQEISHQFQIWCVVEDKNSKVAWLNRSGIIFAGHDKWSLDPRVELEKRHSLEYSLRIQKVDVYDEGSYTCSVQTQHEPKTSQVYLIVQVPPKISNISSDVTVNEGSNVTLVCMANGRPEPVITWRHLTPTGREFEGEEEYLEILGITREQSGKYECKAANEVSSADVKQVKVTVNYPPTITESKSNEATTGRQASLKCEASAVPAPDFEWYRDDTRINSANGLEIKSTEGQSSLTVTNVTEEHYGNYTCVAANKLGVTNASLVLFRPGSVRGINGSISLAVPLWLLAASLLCLLSKC

SEQ ID NO: 20730 - protein, 47 aa, Artificial Sequence
  Synthetic polypeptide
LGSGDLPWEINPLFSCSLLREKDPPMTSGPQTDQPKKYLTNFKSGAL

SEQ ID NO: 20731 - protein, 47 aa, Artificial Sequence; identical to SEQ ID NO: 20730
  Synthetic polypeptide

SEQ ID NO: 20732 - protein, 47 aa, Artificial Sequence; identical to SEQ ID NO: 20730
  Synthetic polypeptide

SEQ ID NO: 20733 - protein, 47 aa, Artificial Sequence; identical to SEQ ID NO: 20730
  Synthetic polypeptide

SEQ ID NO: 20734 - protein, 41 aa, Artificial Sequence
  Synthetic polypeptide
PQVLRPTSPRNISPISNLVRCRRQELKGGLVEPFWHHFCWT

SEQ ID NO: 20735 - protein, 41 aa, Artificial Sequence; identical to SEQ ID NO: 20734
  Synthetic polypeptide

SEQ ID NO: 20736 - protein, 41 aa, Artificial Sequence; identical to SEQ ID NO: 20734
  Synthetic polypeptide

SEQ ID NO: 20737 - protein, 41 aa, Artificial Sequence; identical to SEQ ID NO: 20734
  Synthetic polypeptide

SEQ ID NO: 20738 - protein, 333 aa, Artificial Sequence
  Synthetic polypeptide
ERSTYDLRSSDRPAQEISHQFQIWCVVEDKNSKVAWLNRSGIIFAGHDKWSLDPRVELEKRHSLEYSLRIQKVDVYDEGSYTCSVQTQHEPKTSQVYLIVQVPPKISNISSDVTVNEGSNVTLVCMANGRPEPVITWRHLTPTGREFEGEEEYLEILGITREQSGKYECKAANEVSSADVKQVKVTVNYPPTITESKSNEATTGRQASLKCEASAVPAPDFEWYRDDTRINSANGLEIKSTEGQSSLTVTNVTEEHYGNYTCVAANKLGVTNASLVLFKRVLPTIPHPIQEIGTTVHFKQKGPGSVRGINGSISLAVPLWLLAASLLCLLSKC

SEQ ID NO: 20739 - protein, 333 aa, Artificial Sequence; identical to SEQ ID NO: 20738
  Synthetic polypeptide

SEQ ID NO: 20740 - protein, 143 aa, Artificial Sequence
  Synthetic polypeptide
ERSTYDLRSSDRPAQEISHQFQIWCVVEDKNSKVAWLNRSGIIFAGHDKWSLDPRVELEKRHSLEYSLRIQKVDVYDEGSYTCSVQTQHEPKTSQVYLIVQVPPKISNISSDVTVNEGSNVTLVCMANGRPEPVITWRHLTPT

SEQ ID NO: 20741 - protein, 46 aa, Artificial Sequence
  Synthetic polypeptide
LEDLGRSCSQGRTQNTDPAGGLCPQQSPHRPSPNQPQQEEVQHGAR

SEQ ID NO: 20742 - protein, 46 aa, Artificial Sequence; identical to SEQ ID NO: 20741
  Synthetic polypeptide

SEQ ID NO: 20743 - protein, 46 aa, Artificial Sequence; identical to SEQ ID NO: 20741
  Synthetic polypeptide

SEQ ID NO: 20744 - protein, 46 aa, Artificial Sequence; identical to SEQ ID NO: 20741
  Synthetic polypeptide

SEQ ID NO: 20745 - protein, 46 aa, Artificial Sequence; identical to SEQ ID NO: 20741
  Synthetic polypeptide

SEQ ID NO: 20746 - protein, 46 aa, Artificial Sequence; identical to SEQ ID NO: 20741
  Synthetic polypeptide

SEQ ID NO: 20747 - protein, 46 aa, Artificial Sequence; identical to SEQ ID NO: 20741
  Synthetic polypeptide

SEQ ID NO: 20748 - protein, 46 aa, Artificial Sequence; identical to SEQ ID NO: 20741
  Synthetic polypeptide

SEQ ID NO: 20749 - protein, 276 aa, Artificial Sequence
  Synthetic polypeptide
PVNWRILGEAALRGEPRIQTLPVASALSSHRTGPPPISPSKRKFSMEPGDEDLDCDNDHVSKMSRIFNPHLNKTANGDCRRDPRERSRSPIERAVAPTMSLHGSHLYTSLPSLGLEQPLALTKNSLDASRPAGLSPTLTPGERQQNRPSVITCASAGARNCNLSHCPIAHSGCAAPGPASYRRPPSAATTCDPVVEEHFRRSLGKNYKEPEPAPNSVSITGSVDDHFAKALGDTWLQIKAAKDGASSSPESASRRGQPASPSAHMVSHSHSPSVVS

SEQ ID NO: 20750 - protein, 276 aa, Artificial Sequence; identical to SEQ ID NO: 20749
  Synthetic polypeptide

SEQ ID NO: 20751 - protein, 276 aa, Artificial Sequence; identical to SEQ ID NO: 20749
  Synthetic polypeptide

SEQ ID NO: 20752 - protein, 61 aa, Artificial Sequence
  Synthetic polypeptide
GHGFLPPANLLTGGSWAKLLSGENPEYRPCRWPLPSAVTAPALPQSAPARGSSAWSQVTRT

SEQ ID NO: 20753 - protein, 61 aa, Artificial Sequence; identical to SEQ ID NO: 20752
  Synthetic polypeptide

SEQ ID NO: 20754 - protein, 61 aa, Artificial Sequence; identical to SEQ ID NO: 20752
  Synthetic polypeptide

SEQ ID NO: 20755 - protein, 61 aa, Artificial Sequence; identical to SEQ ID NO: 20752
  Synthetic polypeptide

SEQ ID NO: 20756 - protein, 61 aa, Artificial Sequence; identical to SEQ ID NO: 20752
  Synthetic polypeptide

SEQ ID NO: 20757 - protein, 61 aa, Artificial Sequence; identical to SEQ ID NO: 20752
  Synthetic polypeptide

SEQ ID NO: 20758 - protein, 61 aa, Artificial Sequence; identical to SEQ ID NO: 20752
  Synthetic polypeptide

SEQ ID NO: 20759 - protein, 61 aa, Artificial Sequence; identical to SEQ ID NO: 20752
  Synthetic polypeptide

SEQ ID NO: 20760 - protein, 209 aa, Artificial Sequence
  Synthetic polypeptide
PVNWRILGEAALRGEPRIQTLPVASALSSHRTGPPPISPSKRKFSMEPGDEDLDCDNDHVSKMSRIFNPHLNKTANGDCRRDPRERSRSPIERAVAPTMSLHGSHLYTSLPSLGLEQPLALTKNSLDASRPAGLSPTLTPGERQQNRPSVITCASAGARNCNLSHCPIAHSGCAAPGPASYRRPPSAATTCDPVVEEHFRRSLGKNYKE

SEQ ID NO: 20761 - protein, 186 aa, Artificial Sequence
  Synthetic polypeptide
PVNWRILGEAALRGEPRIQTLPVASALSSHRTGPPPISPSKRKFSMEPGDEDLDCDNDHVSKMSRIFNPHLNKTANGDCRRDPRERSRSPIERAVAPTMSLHGSHLYTSLPSLGLEQPLALTKNSLDASRPAGLSPTLTPGERQQNRPSVITCASAGARNCNLSHCPIAHSGCAAPGPASYRRPPS

SEQ ID NO: 20762 - protein, 180 aa, Artificial Sequence
  Synthetic polypeptide
PVNWRILGEAALRGEPRIQTLPVASALSSHRTGPPPISPSKRKFSMEPGDEDLDCDNDHVSKMSRIFNPHLNKTANGDCRRDPRERSRSPIERAVAPTMSLHGSHLYTSLPSLGLEQPLALTKNSLDASRPAGLSPTLTPGERQQNRPSVITCASAGARNCNLSHCPIAHSGCAAPGPAS

SEQ ID NO: 20763 - protein, 155 aa, Artificial Sequence
  Synthetic polypeptide
PVNWRILGEAALRGEPRIQTLPVASALSSHRTGPPPISPSKRKFSMEPGDEDLDCDNDHVSKMSRIFNPHLNKTANGDCRRDPRERSRSPIERAVAPTMSLHGSHLYTSLPSLGLEQPLALTKNSLDASRPAGLSPTLTPGERQQVGLCLGGWRG

SEQ ID NO: 20764 - protein, 113 aa, Artificial Sequence
  Synthetic polypeptide
PVNWRILGEAALRGEPRIQTLPVASALSSHRTGPPPISPSKRKFSMEPGDEDLDCDNDHVSKMSRIFNPHLNKTANGDCRRDPRERSRSPIERAVAPTMSLHGSHLYTSLPSL

SEQ ID NO: 20765 - protein, 68 aa, Artificial Sequence
  Synthetic polypeptide
GAPPPGSHPVWEVNMSNLLSQRKQKKLSCLYNNLQSSVTWCLIGQHDTGMLNTFRRSFMASRYDSEWG

SEQ ID NO: 20766 - protein, 68 aa, Artificial Sequence; identical to SEQ ID NO: 20765
  Synthetic polypeptide

SEQ ID NO: 20767 - protein, 28 aa, Artificial Sequence
  Synthetic polypeptide
EVRSPSARQPPRLRSEEPLRPAATPSGK

SEQ ID NO: 20768 - protein, 28 aa, Artificial Sequence
  Synthetic polypeptide
EVRSPSARQPPRLRSEEPLRPAATPSGK

SEQ ID NO: 20769 - protein, 218 aa, Artificial Sequence
  Synthetic polypeptide
EVRSPSARQPPRLGSEHVKPFKPEKAKEIIMSLQQPAIFCNMVFDWPARHWNAKYLSQVLHGKQIRFRMGMKSMSTVPQFETTCNYVEATLEEFLTWNCDQSSISGPFRDYDHSKFWAYADYKYFVSLFEDKTDLFQDVKWSDFGFPGRNGQESTLWIGSLGAHTPCHLDSYGCNLVFQVQGRLECNGMIIAPGPQAILLPQPLKYLGLQETMASLSS

SEQ ID NO: 20770 - protein, 481 aa, Artificial Sequence
  Synthetic polypeptide
EVRSPSARQPPRLGSEHVKPFKPEKAKEIIMSLQQPAIFCNMVFDWPARHWNAKYLSQVLHGKQIRFRMGMKSMSTVPQFETTCNYVEATLEEFLTWNCDQSSISGPFRDYDHSKFWAYADYKYFVSLFEDKTDLFQDVKWSDFGFPGRNGQESTLWIGSLGAHTPCHLDSYGCNLVFQVQGRKRWHLFPPEDTPFLYPTRIPYEESSVFSKINVVNPDLKRFPQFRKAQRHAVTLSPGQVLFVPRHWWHYVESIDPVTVSINSWIELEEDHLARVEEAITRMLVCALKTAENPQNTRAWLNPTEVEETSHAVNCCYLNAAVSAFFDRCRTSEVVEIQALRTDGEHMKKEELNVCNHMEVGQTGSQNLTTGTDKPEAASPFGPDLVPVAQRSEEPPSERGGIFGSDGKDFVDKDGEHFGKLHCAKRQQIMSNSENAIEEQIASNTTTTPQTFISTDDLLDCLVNPQVTRIVAQLLIQGRSL

SEQ ID NO: 20771 - protein, 57 aa, Artificial Sequence
  Synthetic polypeptide
EVNMSNLLSQRKQKKLSCLYNNLQSSVTWCLIGQHDTGMLNTFRRSFMASRYDSEWG

SEQ ID NO: 20772 - protein, 57 aa, Artificial Sequence; identical to SEQ ID NO: 20771
  Synthetic polypeptide

SEQ ID NO: 20773 - protein, 28 aa, Artificial Sequence
  Synthetic polypeptide
EVRRPSAWQPPRLRSEEPLRPAAAPSEK

SEQ ID NO: 20774 - protein, 28 aa, Artificial Sequence
  Synthetic polypeptide
EVRRPSAWQPPRLRSEEPLRPAAAPSEK

SEQ ID NO: 20775 - protein, 218 aa, Artificial Sequence
  Synthetic polypeptide
EVRSPSARQPPRLRSEHVKPFKPEKAKEIIMSLQQPAIFCNMVFDWPARHWNAKYLSQVLHGKQIRFRMGMKSMSTVPQFETTCNYVEATLEEFLTWNCDQSSISGPFRDYDHSKFWAYADYKYFVSLFEDKTDLFQDVKWSDFGFPGRNGQESTLWIGSLGAHTPCHLDSYGCNLVFQVQGRLECNGMIIAPGPQAILLPQPLKYLGLQETMASLSS

SEQ ID NO: 20776 - protein, 481 aa, Artificial Sequence
  Synthetic polypeptide
EVRSPSARQPPRLRSEHVKPFKPEKAKEIIMSLQQPAIFCNMVFDWPARHWNAKYLSQVLHGKQIRFRMGMKSMSTVPQFETTCNYVEATLEEFLTWNCDQSSISGPFRDYDHSKFWAYADYKYFVSLFEDKTDLFQDVKWSDFGFPGRNGQESTLWIGSLGAHTPCHLDSYGCNLVFQVQGRKRWHLFPPEDTPFLYPTRIPYEESSVFSKINVVNPDLKRFPQFRKAQRHAVTLSPGQVLFVPRHWWHYVESIDPVTVSINSWIELEEDHLARVEEAITRMLVCALKTAENPQNTRAWLNPTEVEETSHAVNCCYLNAAVSAFFDRCRTSEVVEIQALRTDGEHMKKEELNVCNHMEVGQTGSQNLTTGTDKPEAASPFGPDLVPVAQRSEEPPSERGGIFGSDGKDFVDKDGEHFGKLHCAKRQQIMSNSENAIEEQIASNTTTTPQTFISTDDLLDCLVNPQVTRIVAQLLIQGRSL

SEQ ID NO: 20777 - protein, 218 aa, Artificial Sequence
  Synthetic polypeptide
EVRRPSAWQPPRLRSEHVKPFKPEKAKEIIMSLQQPAIFCNMVFDWPARHWNAKYLSQVLHGKQIRFRMGMKSMSTVPQFETTCNYVEATLEEFLTWNCDQSSISGPFRDYDHSKFWAYADYKYFVSLFEDKTDLFQDVKWSDFGFPGRNGQESTLWIGSLGAHTPCHLDSYGCNLVFQVQGRLECNGMIIAPGPQAILLPQPLKYLGLQETMASLSS

SEQ ID NO: 20778 - protein, 57 aa, Artificial Sequence; identical to SEQ ID NO: 20771
  Synthetic polypeptide

SEQ ID NO: 20779 - protein, 57 aa, Artificial Sequence; identical to SEQ ID NO: 20771
  Synthetic polypeptide

SEQ ID NO: 20780 - protein, 38 aa, Artificial Sequence
  Synthetic polypeptide
GVPLPGRDPVWEVRSVSARPPRLRSEETLCLATAPSEK

SEQ ID NO: 20781 - protein, 38 aa, Artificial Sequence; identical to SEQ ID NO: 20780
  Synthetic polypeptide

SEQ ID NO: 20782 - protein, 481 aa, Artificial Sequence
  Synthetic polypeptide
EVRRPSAWQPPRLRSEHVKPFKPEKAKEIIMSLQQPAIFCNMVFDWPARHWNAKYLSQVLHGKQIRFRMGMKSMSTVPQFETTCNYVEATLEEFLTWNCDQSSISGPFRDYDHSKFWAYADYKYFVSLFEDKTDLFQDVKWSDFGFPGRNGQESTLWIGSLGAHTPCHLDSYGCNLVFQVQGRKRWHLFPPEDTPFLYPTRIPYEESSVFSKINVVNPDLKRFPQFRKAQRHAVTLSPGQVLFVPRHWWHYVESIDPVTVSINSWIELEEDHLARVEEAITRMLVCALKTAENPQNTRAWLNPTEVEETSHAVNCCYLNAAVSAFFDRCRTSEVVEIQALRTDGEHMKKEELNVCNHMEVGQTGSQNLTTGTDKPEAASPFGPDLVPVAQRSEEPPSERGGIFGSDGKDFVDKDGEHFGKLHCAKRQQIMSNSENAIEEQIASNTTTTPQTFISTDDLLDCLVNPQVTRIVAQLLIQGRSL

SEQ ID NO: 20783 - protein, 57 aa, Artificial Sequence; identical to SEQ ID NO: 20771
  Synthetic polypeptide

SEQ ID NO: 20784 - protein, 57 aa, Artificial Sequence; identical to SEQ ID NO: 20771
  Synthetic polypeptide

SEQ ID NO: 20785 - protein, 50 aa, Artificial Sequence
  Synthetic polypeptide
GASLPGRPSSEMWGPPLPRRPVWDVRSASARPRPRLGGEERLCPAAPSEK

SEQ ID NO: 20786 - protein, 50 aa, Artificial Sequence; identical to SEQ ID NO: 20785
  Synthetic polypeptide

SEQ ID NO: 20787 - protein, 228 aa, Artificial Sequence
  Synthetic polypeptide
GVPLPGRDPVWEVRSVSARPPRLRSEHVKPFKPEKAKEIIMSLQQPAIFCNMVFDWPARHWNAKYLSQVLHGKQIRFRMGMKSMSTVPQFETTCNYVEATLEEFLTWNCDQSSISGPFRDYDHSKFWAYADYKYFVSLFEDKTDLFQDVKWSDFGFPGRNGQESTLWIGSLGAHTPCHLDSYGCNLVFQVQGRLECNGMIIAPGPQAILLPQPLKYLGLQETMASLSS

SEQ ID NO: 20788 - protein, 491 aa, Artificial Sequence
  Synthetic polypeptide
GVPLPGRDPVWEVRSVSARPPRLRSEHVKPFKPEKAKEIIMSLQQPAIFCNMVFDWPARHWNAKYLSQVLHGKQIRFRMGMKSMSTVPQFETTCNYVEATLEEFLTWNCDQSSISGPFRDYDHSKFWAYADYKYFVSLFEDKTDLFQDVKWSDFGFPGRNGQESTLWIGSLGAHTPCHLDSYGCNLVFQVQGRKRWHLFPPEDTPFLYPTRIPYEESSVFSKINVVNPDLKRFPQFRKAQRHAVTLSPGQVLFVPRHWWHYVESIDPVTVSINSWIELEEDHLARVEEAITRMLVCALKTAENPQNTRAWLNPTEVEETSHAVNCCYLNAAVSAFFDRCRTSEVVEIQALRTDGEHMKKEELNVCNHMEVGQTGSQNLTTGTDKPEAASPFGPDLVPVAQRSEEPPSERGGIFGSDGKDFVDKDGEHFGKLHCAKRQQIMSNSENAIEEQIASNTTTTPQTFISTDDLLDCLVNPQVTRIVAQLLIQGRSL

SEQ ID NO: 20789 - protein, 23 aa, Artificial Sequence
  Synthetic polypeptide
IKKEGNMRFGKQERKEGHRVGLQ

SEQ ID NO: 20790 - protein, 23 aa, Artificial Sequence
  Synthetic polypeptide
IKKEGNMRFGKQERKEGHRVGLQ

SEQ ID NO: 20791 - protein, 23 aa, Artificial Sequence
  Synthetic polypeptide
IKKEGNMRFGKQERKEGHRVGLQ

SEQ ID NO: 20792 - protein, 23 aa, Artificial Sequence
  Synthetic polypeptide
IKKEGNMRFGKQERKEGHRVGLQ

SEQ ID NO: 20793 - protein, 23 aa, Artificial Sequence
  Synthetic polypeptide
IKKEGNMRFGKQERKEGHRVGLQ

SEQ ID NO: 20794 - protein, 1012 aa, Artificial Sequence
  Synthetic polypeptide
ANKSRKRETCDSESRRGKKATEWASSEDTRRSCQSKGKTEEECQNYVRVLIVAGRKVFMCGTNAFSPMCTSRQVGNLSRTIEKINGVARCPYDPRHNSTAVISSQGELYAATVIDFSGRDPAIYRSLGSGPPLRTAQYNSKWLNEPNFVAAYDIGLFAYFFLRENAVEHDCGRTVYSRVARVCKNDVGGRFLLEDTWTTFMKARLNCSRPGEVPFYYNELQSAFHLPEQDLIYGVFTTNVNSIAASAVCAFNLSAISQAFNGPFRYQENPRAAWLPIANPIPNFQCGTLPETGPNENLTERSLQDAQRLFLMSEAVQPVTPEPCVTQDSVRFSHLVVDLVQAKDTLYHVLYIGTESGTILKALSTASRSLHGCYLEELHVLPPGRREPLRSLRILHSARALFVGLRDGVLRVPLERCAAYRSQGACLGARDPYCGWDGKQQRCSTLEDSSNMSLWTQNITACPVRNVTRDGGFGPWSPWQPCEHLDGDNSGSCLCRARSCDSPRPRCGGLDCLGPAIHIANCSRNGAWTPWSSWALCSTSCGIGFQVRQRSCSNPAPRHGGRICVGKSREERFCNENTPCPVPIFWASWGSWSKCSSNCGGGMQSRRRACENGNSCLGCGVEFKTCNPEGCPEVRRNTPWTPWLPVNVTQGGARQEQRFRFTCRAPLADPHGLQFGRRRTETRTCPADGSGSCDTDALVEVLLRSGSTSPHTVSGGWAAWGPWSSCSRDCELGFRVRKRTCTNPEPRNGGLPCVGDAAEYQDCNPQACPVRGAWSCWTSWSPCSASCGGGHYQRTRSCTSPAPSPGEDICLGLHTEEALCATQACPEGWSPWSEWSKCTDDGAQSRSRHCEELLPGSSACAGNSSQSRPCPYSEIPVILPASSMEEATDCAGFNLIHLVATGISCFLGSGLLTLAVYLSCQHCQRQSQESTLVHPATPNHLHYKGGGTPKNEKYTPMEFKTLNKNNLIPDDRANFYPLQQTNVYTTTYYPSPLNKHSFRPEASPGQRCFPNS

SEQ ID NO: 20795 - protein, 1012 aa, Artificial Sequence; identical to SEQ ID NO: 20794
  Synthetic polypeptide

SEQ ID NO: 20796 - protein, 60 aa, Artificial Sequence
  Synthetic polypeptide
EDTGDVFHQNKRINQERGKHAIRKAGEERRPQSGPPVRTRAAPAKAKGRLRRSVRTTCES

SEQ ID NO: 20797 - protein, 60 aa, Artificial Sequence; identical to SEQ ID NO: 20796
  Synthetic polypeptide

SEQ ID NO: 20798 - protein, 60 aa, Artificial Sequence; identical to SEQ ID NO: 20796
  Synthetic polypeptide

SEQ ID NO: 20799 - protein, 60 aa, Artificial Sequence; identical to SEQ ID NO: 20796
  Synthetic polypeptide

SEQ ID NO: 20800 - protein, 60 aa, Artificial Sequence; identical to SEQ ID NO: 20796
  Synthetic polypeptide

SEQ ID NO: 20801 - protein, 955 aa, Artificial Sequence
  Synthetic polypeptide
ANKSRKRETCDSESRRGKKATEWASSEDTRRSCQSKGKTEEECQNYVRVLIVAGRKVFMCGTNAFSPMCTSRQVGNLSRTIEKINGVARCPYDPRHNSTAVISSQGELYAATVIDFSGRDPAIYRSLGSGPPLRTAQYNSKWLNEPNFVAAYDIGLFAYFFLRENAVEHDCGRTVYSRVARVCKNDVGGRFLLEDTWTTFMKARLNCSRPGEVPFYYNELQSAFHLPEQDLIYGVFTTNVNSIAASAVCAFNLSAISQAFNGPFRYQENPRAAWLPIANPIPNFQCGTLPETGPNENLTERSLQDAQRLFLMSEAVQPVTPEPCVTQDSVRFSHLVVDLVQAKDTLYHVLYIGTESGTILKALSTASRSLHGCYLEELHVLPPGRREPLRSLRILHSARALFVGLRDGVLRVPLERCAAYRSQGACLGARDPYCGWDGKQQRCSTLEDSSNMSLWTQNITACPVRNVTRDGGFGPWSPWQPCEHLDGDNSGSCLCRARSCDSPRPRCGGLDCLGPAIHIANCSRNGAWTPWSSWALCSTSCGIGFQVRQRSCSNPAPRHGGRICVGKSREERFCNENTPCPVPIFWASWGSWSKCSSNCGGGMQSRRRACENGNSCLGCGVEFKTCNPEGCPEVRRNTPWTPWLPVNVTQGGARQEQRFRFTCRAPLADPHGLQFGRRRTETRTCPADGSGSCDTDALVEVLLRSGSTSPHTVSGGWAAWGPWSSCSRDCELGFRVRKRTCTNPEPRNGGLPCVGDAAEYQDCNPQACPVRGAWSCWTSWSPCSASCGGGHYQRTRSCTSPAPSPGEDICLGLHTEEALCATQACPEGWSPWSEWSKCTDDGAQSRSRHCEELLPGSSACAGNSSQSRPCPYSEIPVILPASSMEEATDCAGKRNRTYLMLRSSQPSGTPLQSLDSFHILLQTAKLCWGPHCFEMGSISSTWWPRASPASWALGS

SEQ ID NO: 20802 - protein, 953 aa, Artificial Sequence
  Synthetic polypeptide
ANKSRKRETCDSESRRGKKATEWASSEDTRRSCQSKGKTEEECQNYVRVLIVAGRKVFMCGTNAFSPMCTSRQVGNLSRTIEKINGVARCPYDPRHNSTAVISSQGELYAATVIDFSGRDPAIYRSLGSGPPLRTAQYNSKWLNEPNFVAAYDIGLFAYFFLRENAVEHDCGRTVYSRVARVCKNDVGGRFLLEDTWTTFMKARLNCSRPGEVPFYYNELQSAFHLPEQDLIYGVFTTNVNSIAASAVCAFNLSAISQAFNGPFRYQENPRAAWLPIANPIPNFQCGTLPETGPNENLTERSLQDAQRLFLMSEAVQPVTPEPCVTQDSVRFSHLVVDLVQAKDTLYHVLYIGTESGTILKALSTASRSLHGCYLEELHVLPPGRREPLRSLRILHSARALFVGLRDGVLRVPLERCAAYRSQGACLGARDPYCGWDGKQQRCSTLEDSSNMSLWTQNITACPVRNVTRDGGFGPWSPWQPCEHLDGDNSGSCLCRARSCDSPRPRCGGLDCLGPAIHIANCSRNGAWTPWSSWALCSTSCGIGFQVRQRSCSNPAPRHGGRICVGKSREERFCNENTPCPVPIFWASWGSWSKCSSNCGGGMQSRRRACENGNSCLGCGEFKTCNPEGCPEVRRNTPWTPWLPVNVTQGGARQEQRFRFTCRAPLADPHGLQFGRRRTETRTCPADGSGSCDTDALVEVLLRSGSTSPHTVSGGWAAWGPWSSCSRDCELGFRVRKRTCTNPEPRNGGLPCVGDAAEYQDCNPQACPVRGAWSCWTSWSPCSASCGGGHYQRTRSCTSPAPSPGEDICLGLHTEEALCATQACPGWSPWSEWSKCTDDGAQSRSRHCEELLPGSSACAGNSSQSRPCPYSEIPVILPASSMEEATDCAGKRNRTYLMLRSSQPSGTPLQSLDSFHILLQTAKLCWGPHCFEMGSISSTWWPRASPASWALGS

SEQ ID NO: 20803 - protein, 949 aa, Artificial Sequence
  Synthetic polypeptide
ANKSRKRETCDSESRRGKKATEWASSEDTRRSCQSKGKTEEECQNYVRVLIVAGRKVFMCGTNAFSPMCTSRQVGNLSRTIEKINGVARCPYDPRHNSTAVISSQGELYAATVIDFSGRDPAIYRSLGSGPPLRTAQYNSKWLNEPNFVAAYDIGLFAYFFLRENAVEHDCGRTVYSRVARVCKNDVGGRFLLEDTWTTFMKARLNCSRPGEVPFYYNELQSAFHLPEQDLIYGVFTTNVNSIAASAVCAFNLSAISQAFNGPFRYQENPRAAWLPIANPIPNFQCGTLPETGPNENLTERSLQDAQRLFLMSEAVQPVTPEPCVTQDSVRFSHLVVDLVQAKDTLYHVLYIGTESGTILKALSTASRSLHGCYLEELHVLPPGRREPLRSLRILHSARALFVGLRDGVLRVPLERCAAYRSQGACLGARDPYCGWDGKQQRCSTLEDSSNMSLWTQNITACPVRNVTRDGGFGPWSPWQPCEHLDGDNSGSCLCRARSCDSPRPRCGGLDCLGPAIHIANCSRNGAWTPWSSWALCSTSCGIGFQVRQRSCSNPAPRHGGRICVGKSREERFCNENTPCPVPIFWASWGSWSKCSSNCGGGMQSRRRACENGNSCLGCGVEFKTCNPEGCPEVRRNTPWTPWLPVNVTQGGARQEQRFRFTCRAPLADPHGLQFGRRRTETRTCPADGSGSCDTDALVEVLLRSGSTSPHTVSGGWAAWGPWSSCSRDCELGFRVRKRTCTNPEPRNGGLPCVGDAAEYQDCNPQACPVRGAWSCWTSWSPCSASCGGGHYQRTRSCTSPAPSPGEDICLGLHTEEALCATQACPEGWSPWSEWSKCTDDGAQSRSRHCEELLPGSSACAGNSSQSRPCPYSEIPVILPASSMEEATDCAGFNLIHLVATGISCFLGSGLLTLAVYLSCQHCQRQSQESTLVHPATPNHLHYKGGGTP

SEQ ID NO: 20804 - protein, 40 aa, Artificial Sequence
  Synthetic polypeptide
KSTKKISRAWWRVPVVPATWEAEAGEWHEPRRRSLRVWPL

SEQ ID NO: 20805 - protein, 40 aa, Artificial Sequence; identical to SEQ ID NO: 20804
  Synthetic polypeptide

SEQ ID NO: 20806 - protein, 25 aa, Artificial Sequence
  Synthetic polypeptide
SQLRGRLKQENGMNPGGGACGCGHC

SEQ ID NO: 20807 - protein, 12 aa, Artificial Sequence
  Synthetic polypeptide
TQEAELAGVATV

SEQ ID NO: 20808 - protein, 236 aa, Artificial Sequence
  Synthetic polypeptide
SQLRGRLKQENGMNPGGGACGCGHCKKMKPEFEKAAEALHGEADSSGVLAAVDATVNKALAERFHISEFPTLKYFKNGEKYAVPVLRTKKKFLEWMQNPEAPPPPEPTWEEQQTSVLHLVGDNFRETLKKKKHTLVMFYAPWCPHCKKVIPHFTATADAFKDDRKIACAAVDCVKDKNQDLCQQEAVKGYPTFHYYHYGKFAEKYDSDRTELGFTNYIRALREGDHERLGKKKEEL

SEQ ID NO: 20809 - protein, 14 aa, Artificial Sequence
  Synthetic polypeptide
TQEAELAGVATVRK

SEQ ID NO: 20810 - protein, 34 aa, Artificial Sequence
  Synthetic polypeptide
FYHSLVVSGCWQTDHPCRGAGPDVESGESPNRSV

SEQ ID NO: 20811 - protein, 34 aa, Artificial Sequence; identical to SEQ ID NO: 20810
  Synthetic polypeptide

SEQ ID NO: 20812 - protein, 34 aa, Artificial Sequence; identical to SEQ ID NO: 20810
  Synthetic polypeptide

SEQ ID NO: 20813 - protein, 34 aa, Artificial Sequence; identical to SEQ ID NO: 20810
  Synthetic polypeptide

SEQ ID NO: 20814 - protein, 137 aa, Artificial Sequence
  Synthetic polypeptide
WSQVAGRLIIRAEELAQMWKVVNLPTDLFNSVMNVGRFTEEIEWLKFLALACSALGVTITKTLKIVCEVLSCDHNGGSPRIPFSTFQFLYTYIAKVDGEISASHVSRMLNYMEQEVIGPDGIITVNDFTQNPRVQLE

SEQ ID NO: 20815 - protein, 137 aa, Artificial Sequence; identical to SEQ ID NO: 20814
  Synthetic polypeptide

SEQ ID NO: 20816 - protein, 22 aa, Artificial Sequence
  Synthetic polypeptide
EETDLCLVLILPFISGLRLLAD

SEQ ID NO: 20817 - protein, 22 aa, Artificial Sequence
  Synthetic polypeptide
EETDLCLVLILPFISGLRLLAD

SEQ ID NO: 20818 - protein, 22 aa, Artificial Sequence
  Synthetic polypeptide
EETDLCLVLILPFISGLRLLAD

SEQ ID NO: 20819 - protein, 22 aa, Artificial Sequence
  Synthetic polypeptide
EETDLCLVLILPFISGLRLLAD

SEQ ID NO: 20820 - protein, 54 aa, Artificial Sequence
  Synthetic polypeptide
WSQVAGRLIIRAEELAQMWKVVNLPTDLFNSVMNVGRFTEEIEWLKFLALACSA

SEQ ID NO: 20821 - protein, 41 aa, Artificial Sequence
  Synthetic polypeptide
WSQVAGRLIIRAEELAQMWKVVNLPTDLFNSVMNVGRFTEE

SEQ ID NO: 20822 - protein, 42 aa, Artificial Sequence
  Synthetic polypeptide
SQAWWCMPVVPATQEAEPSGLGGCHRPRRRSCWRRSPVISTS

SEQ ID NO: 20823 - protein, 42 aa, Artificial Sequence; identical to SEQ ID NO: 20822
  Synthetic polypeptide

SEQ ID NO: 20824 - protein, 42 aa, Artificial Sequence; identical to SEQ ID NO: 20822
  Synthetic polypeptide

SEQ ID NO: 20825 - protein, 42 aa, Artificial Sequence; identical to SEQ ID NO: 20822
  Synthetic polypeptide

SEQ ID NO: 20826 - protein, 42 aa, Artificial Sequence; identical to SEQ ID NO: 20822
  Synthetic polypeptide

SEQ ID NO: 20827 - protein, 42 aa, Artificial Sequence; identical to SEQ ID NO: 20822
  Synthetic polypeptide

SEQ ID NO: 20828 - protein, 42 aa, Artificial Sequence; identical to SEQ ID NO: 20822
  Synthetic polypeptide

SEQ ID NO: 20829 - protein, 42 aa, Artificial Sequence; identical to SEQ ID NO: 20822
  Synthetic polypeptide

SEQ ID NO: 20830 - protein, 37 aa, Artificial Sequence
  Synthetic polypeptide
AKRGGACLWSQLLRRLSHQVWADATGREGEAVGGDLQ

SEQ ID NO: 20831 - protein, 37 aa, Artificial Sequence; identical to SEQ ID NO: 20830
  Synthetic polypeptide

SEQ ID NO: 20832 - protein, 37 aa, Artificial Sequence; identical to SEQ ID NO: 20830
  Synthetic polypeptide

SEQ ID NO: 20833 - protein, 37 aa, Artificial Sequence; identical to SEQ ID NO: 20830
  Synthetic polypeptide

SEQ ID NO: 20834 - protein, 37 aa, Artificial Sequence; identical to SEQ ID NO: 20830
  Synthetic polypeptide

SEQ ID NO: 20835 - protein, 37 aa, Artificial Sequence; identical to SEQ ID NO: 20830
  Synthetic polypeptide

SEQ ID NO: 20836 - protein, 37 aa, Artificial Sequence; identical to SEQ ID NO: 20830
  Synthetic polypeptide

SEQ ID NO: 20837 - protein, 37 aa, Artificial Sequence; identical to SEQ ID NO: 20830
  Synthetic polypeptide

SEQ ID NO: 20838 - protein, 118 aa, Artificial Sequence
  Synthetic polypeptide
ENRNYVIYLCSLCCACPGACVTSCFQIASPPLGSAICCLSQTEWTASMRKFGNRGCPGTEMPLRGALMQYSRQPSARRRLAGERMHCICWCSQQMMCPTSHWMENWEAWCSHTMASAT

SEQ ID NO: 20839 - protein, 118 aa, Artificial Sequence; identical to SEQ ID NO: 20838
  Synthetic polypeptide

SEQ ID NO: 20840 - protein, 47 aa, Artificial Sequence
  Synthetic polypeptide
RTGTMLFIFALSAVPVLGHVLQVVSKLRPLLWVPPSAASHRQSGQLQ

SEQ ID NO: 20841 - protein, 47 aa, Artificial Sequence; identical to SEQ ID NO: 20840
  Synthetic polypeptide

SEQ ID NO: 20842 - protein, 47 aa, Artificial Sequence; identical to SEQ ID NO: 20840
  Synthetic polypeptide

SEQ ID NO: 20843 - protein, 47 aa, Artificial Sequence; identical to SEQ ID NO: 20840
  Synthetic polypeptide

SEQ ID NO: 20844 - protein, 615 aa, Artificial Sequence
  Synthetic polypeptide
EQELCYLSLLSLLCLSWGMCYKLFPNCVPSFGFRHLLPLTDRVDSFNEEVRKQRVSRNRDAPEGGFDAVLQAAVCKEKIGWRKDALHLLVFTTDDVPHIALDGKLGGLVQPHDGQCHLNEANEYTASNQMDYPSLALLGEKLAENNINLIFAVTKNHYMLYKNFTALIPGTTVEILDGDSKNIIQLIINAYNSIRSKVELSVWDQPEDLNLFFTATCQDGVSYPGQRKCEGLKIGDTASFEVSLEARSCPSRHTEHVFALRPVGFRDSLEVGVTYNCTCGCSVGLEPNSARCNGSGTYVCGLCECSPGYLGTRCECQDGENQSVYQNLCREAEGKPLCSGRGDCSCNQCSCFESEFGKIYGPFCECDNFSCARNKGVLCSGHGECHCGECKCHAGYIGDNCNCSTDISTCRGRDGQICSERGHCLCGQCQCTEPGAFGEMCEKCPTCPDACSTKRDCVECLLLHSGKPDNQTCHSLCRDEVITWVDTIVKDDQEAVLCFYKTAKDCVMMFTYVELPSGKSNLTVLREPECGNTPNAMTILLAVVGSILLVGLALLAIWKLLVTIHDRREFAKFQSERSRARYEMASNPLYRKPISTHTVDFTFNKFNKSYNGTVD

SEQ ID NO: 20845 - protein, 116 aa, Artificial Sequence
  Synthetic polypeptide
ENRNYVIYLCSLCCACPGACVTSCFQIASPPLGSAICCLSQTEWTASMRKFGNRGCPGTEMPLRGALMQYSRQPSARVSGLKWSCQSGISLRILISSLLLPAKMGYPILVRGSVRV

SEQ ID NO: 20846 - protein, 295 aa, Artificial Sequence
  Synthetic polypeptide
EQELCYLSLLSLLCLSWGMCYKLFPNCVPSFGFRHLLPLTDRVDSFNEEVRKQRVSRNRDAPEGGFDAVLQAAVCKSIRSKVELSVWDQPEDLNLFFTATCQDGVSYPGQRKCEGLKIGDTASFEVSLEARSCPSRHTEHVFALRPVGFRDSLEVGVTYNCTCGCSVGLEPNSARCNGSGTYVCGLCECSPGYLGTRCECQDGENQSVYQNLCREAEGKPLCSGRGDCSCNQCSCFESEFGKIYGPFCECDNFSCARNKGVLCSGHGECHCGECKCHAGYIGDNCNCSTDISTCR

SEQ ID NO: 20847 - protein, 282 aa, Artificial Sequence
  Synthetic polypeptide
EQELCYLSLLSLLCLSWGMCYKLFPNCVPSFGFRHLLPLTDRVDSFNEEVRKQRVSRNRDAPEGGFDAVLQAAVCKEKIGWRKDALHLLVFTTDDVPHIALDGKLGGLVQPHDGQCHLNEANEYTASNQMDYPSLALLGEKLAENNINLIFAVTKNHYMLYKSIRSKVELSVWDQPEDLNLFFTATCQDGVSYPGQRKCEGLKIGDTASFEVSLEARSCPSRHTEHVFALRPVGFRDSLEVGVTYNCTCGCSVGLEPNSARCNGSGTYVCGLCECSPGYLGT

SEQ ID NO: 20848 - protein, 64 aa, Artificial Sequence
  Synthetic polypeptide
ENRNYVIYLCSLCCACPGACVTSCFQIASPPLGSAICCLSQTEWTASMRKFGNRGCPGTEMPLR

SEQ ID NO: 20849 - protein, 63 aa, Artificial Sequence
  Synthetic polypeptide
EQELCYLSLLSLLCLSWGMCYKLFPNCVPSFGFRHLLPLTDRVDSFNEEVRKQRVSRNRDAPE

SEQ ID NO: 20850 - protein, 27 aa, Artificial Sequence
  Synthetic polypeptide
ILEYLSGTWYPAHCEFLDIKGWSQHMH

SEQ ID NO: 20851 - protein, 797 aa, Artificial Sequence
  Synthetic polypeptide
SWSTCLVPGTRHTVSSWTSRAGLNICTSGSATSCEECLLIHPKCAWCSKEDFGSPRSITSRCDLRANLVKNGCGGEIESPASSFHVLRSLPLSSKGSGSAGWDVIQMTPQEIAVNLRPGDKTTFQLQVRQVEDYPVDLYYLMDLSLSMKDDLDNIRSLGTKLAEEMRKLTSNFRLGFGSFVDKDISPFSYTAPRYQTNPCIGYKLFPNCVPSFGFRHLLPLTDRVDSFNEEVRKQRVSRNRDAPEGGFDAVLQAAVCKEKIGWRKDALHLLVFTTDDVPHIALDGKLGGLVQPHDGQCHLNEANEYTASNQMDYPSLALLGEKLAENNINLIFAVTKNHYMLYKNFTALIPGTTVEILDGDSKNIIQLIINAYNSIRSKVELSVWDQPEDLNLFFTATCQDGVSYPGQRKCEGLKIGDTASFEVSLEARSCPSRHTEHVFALRPVGFRDSLEVGVTYNCTCGCSVGLEPNSARCNGSGTYVCGLCECSPGYLGTRCECQDGENQSVYQNLCREAEGKPLCSGRGDCSCNQCSCFESEFGKIYGPFCECDNFSCARNKGVLCSGHGECHCGECKCHAGYIGDNCNCSTDISTCRGRDGQICSERGHCLCGQCQCTEPGAFGEMCEKCPTCPDACSTKRDCVECLLLHSGKPDNQTCHSLCRDEVITWVDTIVKDDQEAVLCFYKTAKDCVMMFTYVELPSGKSNLTVLREPECGNTPNAMTILLAVVGSILLVGLALLAIWKLLVTIHDRREFAKFQSERSRARYEMASNPLYRKPISTHTVDFTFNKFNKSYNGTVD

SEQ ID NO: 20852 - protein, 24 aa, Artificial Sequence
  Synthetic polypeptide
VPGHQGLVSTYALVEVPPHVKNVC

SEQ ID NO: 20853 - protein, 58 aa, Artificial Sequence
  Synthetic polypeptide
EFKTSLGNMPTSVRNPELERNGLYPAYTGLPGSRHSCIFPGQYNPSFISDESRRRDYF

SEQ ID NO: 20854 - protein, 58 aa, Artificial Sequence; identical to SEQ ID NO: 20853
  Synthetic polypeptide

SEQ ID NO: 20855 - protein, 26 aa, Artificial Sequence
  Synthetic polypeptide
SLWEAKIGGLLDPRSSRPAWATCLQV

SEQ ID NO: 20856 - protein, 26 aa, Artificial Sequence
  Synthetic polypeptide
SLWEAKIGGLLDPRSSRPAWATCLQV

SEQ ID NO: 20857 - protein, 43 aa, Artificial Sequence
  Synthetic polypeptide
PGTVAHADNPCNHFGRPRSGDCLTLGVQDQPGQHAYKCKESRT

SEQ ID NO: 20858 - protein, 43 aa, Artificial Sequence; identical to SEQ ID NO: 20857
  Synthetic polypeptide

SEQ ID NO: 20859 - protein, 459 aa, Artificial Sequence
  Synthetic polypeptide
PFRILFLSVPQEEASLPFIGWFLYIIFVFLLGAICTREALRYDFLIAEKVSLMGFLFLLGLYISSLASCMGGLYGAPRILQCIAQEKVIPALACLGQGKGPNKTPVAAICLTSLVTMAFVFVGQVNVLAPIVTINFMLTYVAVDYSYFSLSMCSCSLTPVPEPVLREGAEGLHCSEHLLLEKAPSYGSEGPAQRVLEGTLLEFTKDMDQLLQLTRKLESSQPRQGEGNRTPESQKRKSKKATKQTLQDSFLLDLKSPPSFPVEISDRLPAASWEGQESCWNKQTSKSEGTQPEGTYGEQLVPELCNQSESSGEDFFLKSRLQEQDVWRRSTSFYTHMCNPWVSLLGAVGSLLIMFVIQWVYTLVNMGVAAIVYFYIGRASPGLHLGSASNFSFFRWMRSLLLPSCRSLRSPQEQIILAPSLAKVDMEMTQLTQENADFATRDRYHHSSLVNREQLMPHY

SEQ ID NO: 20860 - protein, 459 aa, Artificial Sequence; identical to SEQ ID NO: 20859
  Synthetic polypeptide

SEQ ID NO: 20861 - protein, 459 aa, Artificial Sequence; identical to SEQ ID NO: 20859
  Synthetic polypeptide

SEQ ID NO: 20862 - protein, 459 aa, Artificial Sequence; identical to SEQ ID NO: 20859
  Synthetic polypeptide

SEQ ID NO: 20863 - protein, 65 aa, Artificial Sequence
  Synthetic polypeptide
GFSSHCATHTSRLGNLGSISDLLEYCFSLYHRKKLLCPSLGGFCTSSSSSSWAPSALERPFAMTS

SEQ ID NO: 20864 - protein, 65 aa, Artificial Sequence; identical to SEQ ID NO: 20863
  Synthetic polypeptide

SEQ ID NO: 20865 - protein, 65 aa, Artificial Sequence; identical to SEQ ID NO: 20863
  Synthetic polypeptide

SEQ ID NO: 20866 - protein, 65 aa, Artificial Sequence; identical to SEQ ID NO: 20863
  Synthetic polypeptide

SEQ ID NO: 20867 - protein, 65 aa, Artificial Sequence; identical to SEQ ID NO: 20863
  Synthetic polypeptide

SEQ ID NO: 20868 - protein, 65 aa, Artificial Sequence; identical to SEQ ID NO: 20863
  Synthetic polypeptide

SEQ ID NO: 20869 - protein, 39 aa, Artificial Sequence
  Synthetic polypeptide
NIVSLCTTGRSFSALHWVVSVHHLRLPPGRHLHSRGPSL

SEQ ID NO: 20870 - protein, 39 aa, Artificial Sequence; identical to SEQ ID NO: 20869
  Synthetic polypeptide

SEQ ID NO: 20871 - protein, 39 aa, Artificial Sequence; identical to SEQ ID NO: 20869
  Synthetic polypeptide

SEQ ID NO: 20872 - protein, 39 aa, Artificial Sequence; identical to SEQ ID NO: 20869
  Synthetic polypeptide

SEQ ID NO: 20873 - protein, 39 aa, Artificial Sequence; identical to SEQ ID NO: 20869
  Synthetic polypeptide

SEQ ID NO: 20874 - protein, 39 aa, Artificial Sequence; identical to SEQ ID NO: 20869
  Synthetic polypeptide

SEQ ID NO: 20875 - protein, 367 aa, Artificial Sequence
  Synthetic polypeptide
PFRILFLSVPQEEASLPFIGWFLYIIFVFLLGAICTREALRYDFLIAEKVSLMGFLFLLGLYISSLASCMGGLYGAPRILQCIAQEKVIPALACLGQGKGPNKTPVAAICLTSLVTMAFVFVGQVNVLAPIVTINFMLTYVAVDYSYFSLSMCSCSLTPVPEPVLREGAEGLHCSEHLLLEKAPSYGSEGPAQRVLEGTLLEFTKDMDQLLQLTRKLESSQPRQGEGNRTPESQKRKSKKATKQTLQDSFLLDLKSPPSFPVEISDRLPAASWEGQESCWNKQTSKSEGTQPEGTYGEQLVPELCNQSESSGEGDLRSPQEQIILAPSLAKVDMEMTQLTQENADFATRDRYHHSSLVNREQLMPHY

SEQ ID NO: 20876 - protein, 70 aa, Artificial Sequence
  Synthetic polypeptide
PFRILFLSVPQEEASLPFIGWFLYIIFVFLLGAICTREALRYDFLIAEKVSLMGFLFLLGLYISSLASCM

SEQ ID NO: 20877 - protein, 420 aa, Artificial Sequence
  Synthetic polypeptide
FVMPPQPCGTVSLMGFLFLLGLYISSLASCMGGLYGAPRILQCIAQEKVIPALACLGQGKGPNKTPVAAICLTSLVTMAFVFVGQVNVLAPIVTINFMLTYVAVDYSYFSLSMCSCSLTPVPEPVLREGAEGLHCSEHLLLEKAPSYGSEGPAQRVLEGTLLEFTKDMDQLLQLTRKLESSQPRQGEGNRTPESQKRKSKKATKQTLQDSFLLDLKSPPSFPVEISDRLPAASWEGQESCWNKQTSKSEGTQPEGTYGEQLVPELCNQSESSGEDFFLKSRLQEQDVWRRSTSFYTHMCNPWVSLLGAVGSLLIMFVIQWVYTLVNMGVAAIVYFYIGRASPGLHLGSASNFSFFRWMRSLLLPSCRSLRSPQEQIILAPSLAKVDMEMTQLTQENADFATRDRYHHSSLVNREQLMPHY

SEQ ID NO: 20878 - protein, 420 aa, Artificial Sequence; identical to SEQ ID NO: 20877
  Synthetic polypeptide

SEQ ID NO: 20879 - protein, 420 aa, Artificial Sequence; identical to SEQ ID NO: 20877
  Synthetic polypeptide

SEQ ID NO: 20880 - protein, 420 aa, Artificial Sequence; identical to SEQ ID NO: 20877
  Synthetic polypeptide

SEQ ID NO: 20881 - protein, 46 aa, Artificial Sequence
  Synthetic polypeptide
CLLSHVELYPSWASCSFWAYTSRPWLPAWEDFMELPASCSALPRRK

SEQ ID NO: 20882 - protein, 46 aa, Artificial Sequence; identical to SEQ ID NO: 20881
  Synthetic polypeptide

SEQ ID NO: 20883 - protein, 46 aa, Artificial Sequence; identical to SEQ ID NO: 20881
  Synthetic polypeptide

SEQ ID NO: 20884 - protein, 46 aa, Artificial Sequence; identical to SEQ ID NO: 20881
  Synthetic polypeptide

SEQ ID NO: 20885 - protein, 46 aa, Artificial Sequence; identical to SEQ ID NO: 20881
  Synthetic polypeptide

SEQ ID NO: 20886 - protein, 149 aa, Artificial Sequence
  Synthetic polypeptide
IGVPLHKLSLACCHARRDFASPSPSAMICDASSAMWNCIPHGLPVPFGLIHLVPGFLHGRTLWSSPHPAVHCPGESDPCTCLSGTREGAKQNTRGCHLPDQLGDHGLCFCGSSERSGPHRHHQLHADIRCSGLLLLLPVHVFLQPDPGA

SEQ ID NO: 20887 - protein, 149 aa, Artificial Sequence; identical to SEQ ID NO: 20886
  Synthetic polypeptide

SEQ ID NO: 20888 - protein, 149 aa, Artificial Sequence; identical to SEQ ID NO: 20886
  Synthetic polypeptide

SEQ ID NO: 20889 - protein, 149 aa, Artificial Sequence; identical to SEQ ID NO: 20886
  Synthetic polypeptide

SEQ ID NO: 20890 - protein, 149 aa, Artificial Sequence; identical to SEQ ID NO: 20886
  Synthetic polypeptide

SEQ ID NO: 20891 - protein, 328 aa, Artificial Sequence
  Synthetic polypeptide
FVMPPQPCGTVSLMGFLFLLGLYISSLASCMGGLYGAPRILQCIAQEKVIPALACLGQGKGPNKTPVAAICLTSLVTMAFVFVGQVNVLAPIVTINFMLTYVAVDYSYFSLSMCSCSLTPVPEPVLREGAEGLHCSEHLLLEKAPSYGSEGPAQRVLEGTLLEFTKDMDQLLQLTRKLESSQPRQGEGNRTPESQKRKSKKATKQTLQDSFLLDLKSPPSFPVEISDRLPAASWEGQESCWNKQTSKSEGTQPEGTYGEQLVPELCNQSESSGEGDLRSPQEQIILAPSLAKVDMEMTQLTQENADFATRDRYHHSSLVNREQLMPHY

SEQ ID NO: 20892 - protein, 31 aa, Artificial Sequence
  Synthetic polypeptide
FVMPPQPCGTVSLMGFLFLLGLYISSLASCM

SEQ ID NO: 20893 - protein, 29 aa, Artificial Sequence
  Synthetic polypeptide
CLLSHVELYPSWASCSFWAYTSRPWLPAW

SEQ ID NO: 20894 - protein, 58 aa, Artificial Sequence
  Synthetic polypeptide
IGVPLHKLSLACCHARRDFASPSPSAMICDASSAMWNCIPHGLPVPFGLIHLVPGFLH

SEQ ID NO: 20895 - protein, 64 aa, Artificial Sequence
  Synthetic polypeptide
FVMPPQPCGTESWPASTWGATSGSLPPAFPRAPWQLLASRGFCTSSSSSSWAPSALERPFAMTS

SEQ ID NO: 20896 - protein, 64 aa, Artificial Sequence; identical to SEQ ID NO: 20895
  Synthetic polypeptide

SEQ ID NO: 20897 - protein, 64 aa, Artificial Sequence; identical to SEQ ID NO: 20895
  Synthetic polypeptide

SEQ ID NO: 20898 - protein, 64 aa, Artificial Sequence; identical to SEQ ID NO: 20895
  Synthetic polypeptide

SEQ ID NO: 20899 - protein, 64 aa, Artificial Sequence; identical to SEQ ID NO: 20895
  Synthetic polypeptide

SEQ ID NO: 20900 - protein, 59 aa, Artificial Sequence
  Synthetic polypeptide
CLLSHVELSHGRLQHGGRPQGACRQHSPGLPGSCWHLVVSVHHLRLPPGRHLHSRGPSL

SEQ ID NO: 20901 - protein, 59 aa, Artificial Sequence; identical to SEQ ID NO: 20900
  Synthetic polypeptide

SEQ ID NO: 20902 - protein, 59 aa, Artificial Sequence; identical to SEQ ID NO: 20900
  Synthetic polypeptide

SEQ ID NO: 20903 - protein, 59 aa, Artificial Sequence; identical to SEQ ID NO: 20900
  Synthetic polypeptide

SEQ ID NO: 20904 - protein, 59 aa, Artificial Sequence; identical to SEQ ID NO: 20900
  Synthetic polypeptide

SEQ ID NO: 20905 - protein, 15 aa, Artificial Sequence
  Synthetic polypeptide
NPVSTKNTKKLARYP

SEQ ID NO: 20906 - protein, 197 aa, Artificial Sequence
  Synthetic polypeptide
LGILSLLEHGEEYTFSLPCAYARSILTVPWVELGGKVSVNCAKTGYSASITFHTKPFYGGKLHRVTAEVKHNITNTVVCRVQGEWNSVLEFTYSNGETKYVDLTKLAVTKKRVRPLEKQDPFESRRLWKNVTDSLRESEIDKATEHKHTLEERQRTEERHRTETGTPWKTKYFIKEGDGWVYHKPLWKIIPTTQPAE

SEQ ID NO: 20907 - protein, 629 aa, Artificial Sequence
  Synthetic polypeptide
SQHFGRPRWMDHELLVKNIQLEDGKMILASNFFKGAASSVLELTEAELVTAEAVRSVWQRILPKVLEVEDSTDFFKSGAASVDVVRLVEEVKELCDGLELENEDVYMASTFGDFIQLLVRKLRGDDEEGECSIDYVEMAVNKRTVRMPHQLFIGGEFVDAEGAKTSETINPTDGSVICQVSLAQVTDVDKAVAAAKDAFENGRWGKISARDRGRLMYRLADLMEQHQEELATIEALDAGAVYTLALKTHVGMSIQTFRYFAGWCDKIQGSTIPINQARPNRNLTLTRKEPVGVCGIIIPWNYPLMMLSWKTAACLAAGNTVVIKPAQVTPLTALKFAELTLKAGIPKGVVNVLPGSGSLVGQRLSDHPDVRKIGFTGSTEVGKHIMKSCAISNVKKVSLELGGKSPLIIFADCDLNKAVQMGMSSVFFNKGENCIAAGRLFVEDSIHDEFVRRVVEEVRKMKVGNPLDRDTDHGPQNHHAHLVKLMEYCQHGVKEGATLVCGGNQVPRPGFFFEPTVFTDVEDHMFIAKEESFGPVMIISRFADGDLDAVLSRANATEFGLASGVFTRDINKALYVSDKLQAGTVFVNTYNKTDVAAPFGGFKQSGFGKDLGEAALNEYLRVKTVTFEY

SEQ ID NO: 20908 - protein, 629 aa, Artificial Sequence; identical to SEQ ID NO: 20907
  Synthetic polypeptide

SEQ ID NO: 20909 - protein, 629 aa, Artificial Sequence; identical to SEQ ID NO: 20907
  Synthetic polypeptide

SEQ ID NO: 20910 - protein, 629 aa, Artificial Sequence; identical to SEQ ID NO: 20907
  Synthetic polypeptide

SEQ ID NO: 20911 - protein, 24 aa, Artificial Sequence
  Synthetic polypeptide
PGAVAHACNPSTLGGQGGWIMSCW

SEQ ID NO: 20912 - protein, 24 aa, Artificial Sequence
  Synthetic polypeptide
PGAVAHACNPSTLGGQGGWIMSCW

SEQ ID NO: 20913 - protein, 24 aa, Artificial Sequence
  Synthetic polypeptide
PGAVAHACNPSTLGGQGGWIMSCW

SEQ ID NO: 20914 - protein, 24 aa, Artificial Sequence
  Synthetic polypeptide
PGAVAHACNPSTLGGQGGWIMSCW

SEQ ID NO: 20915 - protein, 24 aa, Artificial Sequence
  Synthetic polypeptide
PGAVAHACNPSTLGGQGGWIMSCW

SEQ ID NO: 20916 - protein, 232 aa, Artificial Sequence
  Synthetic polypeptide
SQHFGRPRWMDHELLVKNIQLEDGKMILASNFFKGAASSVLELTEAELVTAEAVRSVWQRILPKVLEVEDSTDFFKSGAASVDVVRLVEEVKELCDGLELENEDVYMASTFGDFIQLLVRKLRGDDEEGECSIDYVEMAVNKRTVRMPHQLFIGGEFVDAEGAKTSETINPTDGSVICQVSLAQVTDVDKAVAAAKDAFENGRWGKISARDRGRLMYRAPPSPSTRPDPTAT

SEQ ID NO: 20917 - protein, 916 aa, Artificial Sequence
  Synthetic polypeptide
AWALVSGPSNPPATMKIAVIGQSLFGQEVYCHLRKEGHEVVGVFTVPDKDGKADPLGLEAEKDGVPVFKYSRWRAKGQALPDVVAKYQALGAELNVLPFCSQFIPMEIISAPRHGSIIYHPSLLPRHRGASAINWTLIHGDKKGGFSIFWADDGLDTGDLLLQKECEVLPDDTVSTLYNRFLFPEGIKGMVQAVRLIAEGKAPRLPQPEEGATYEGIQKKETAKINWDQPAEAIHNWIRGNDKVPGAWTEACEQKLTFFNSTLNTSGLVPEGDALPIPGAHRPGVVTKAGLILFGNDDKMLLVKNIQLEDGKMILASNFFKGAASSVLELTEAELVTAEAVRSVWQRILPKVLEVEDSTDFFKSGAASVDVVRLVEEVKELCDGLELENEDVYMASTFGDFIQLLVRKLRGDDEEGECSIDYVEMAVNKRTVRMPHQLFIGGEFVDAEGAKTSETINPTDGSVICQVSLAQVTDVDKAVAAAKDAFENGRWGKISARDRGRLMYRLADLMEQHQEELATIEALDAGAVYTLALKTHVGMSIQTFRYFAGWCDKIQGSTIPINQARPNRNLTLTRKEPVGVCGIIIPWNYPLMMLSWKTAACLAAGNTVVIKPAQVTPLTALKFAELTLKAGIPKGVVNVLPGSGSLVGQRLSDHPDVRKIGFTGSTEVGKHIMKSCAISNVKKVSLELGGKSPLIIFADCDLNKAVQMGMSSVFFNKGENCIAAGRLFVEDSIHDEFVRRVVEEVRKMKVGNPLDRDTDHGPQNHHAHLVKLMEYCQHGVKEGATLVCGGNQVPRPGFFFEPTVFTDVEDHMFIAKEESFGPVMIISRFADGDLDAVLSRANATEFGLASGVFTRDINKALYVSDKLQAGTVFVNTYNKTDVAAPFGGFKQSGFGKDLGEAALNEYLRVKTVTFEY

SEQ ID NO: 20918 - protein, 14 aa, Artificial Sequence
  Synthetic polypeptide
HGLWCQVLPTLLLP

SEQ ID NO: 20919 - protein, 59 aa, Artificial Sequence
  Synthetic polypeptide
MGSGVRSFQPSCYHEDCSDWTEPVWPGSLLPPEEGGPRSGGCVHCSRQGWKGRPPGSGS

SEQ ID NO: 20920 - protein, 74 aa, Artificial Sequence
  Synthetic polypeptide
LVSENAEMYKLSSEQFHEAASKMESTIKPRRVEPVCSGLQAQILHCYRDRPHEVLLCSDLVKAYQRCVSAAHKG

SEQ ID NO: 20921 - protein, 49 aa, Artificial Sequence
  Synthetic polypeptide
IPRGGCGNPNSKPIGQKFRRSCDWYLRMLRCINCLQSNSMRQPQRWRAQ

SEQ ID NO: 20922 - protein, 49 aa, Artificial Sequence; identical to SEQ ID NO: 20921
  Synthetic polypeptide

SEQ ID NO: 20923 - protein, 49 aa, Artificial Sequence; identical to SEQ ID NO: 20921
  Synthetic polypeptide

SEQ ID NO: 20924 - protein, 94 aa, Artificial Sequence
  Synthetic polypeptide
LVSENAEMYKLSSEQFHEAASKMESTIKPRRVEPVCSGLQAQILHCYRDRPHEVLLCSDLVKAYQRCVSAAHKVRPCLPPRFPRALGGRRGTSI

SEQ ID NO: 20925 - protein, 71 aa, Artificial Sequence
  Synthetic polypeptide
LVSENAEMYKLSSEQFHEAASKMESTIKVEPVCSGLQAQILHCYRDRPHEVLLCSDLVKAYQRCVSAAHKG

SEQ ID NO: 20926 - protein, 1217 aa, Artificial Sequence
  Synthetic polypeptide
AVIDPRRPTPLQASCQSQSQARSSQDCPQILPSTQIYVPVGVVKPITLAARNLPQPQSGQRGYECLFHIPGSPARVTALRFNSSSLQCQNSSYSYEGNDVSDLPVNLSVVWNGNFVIDNPQNIQAHLYKCPALRESCGLCLKADPRFECGWCVAERRCSLRHHCAADTPASWMHARHGSSRCTDPKILKLSPETGPRQGGTRLTITGENLGLRFEDVRLGVRVGKVLCSPVESEYISAEQIVCEIGDASSVRAHDALVEVCVRDCSPHYRALSPKRFTFVTPTFYRVSPSRGPLSGGTWIGIEGSHLNAGSDVAVSVGGRPCSFSWRNSREIRCLTPPGQSPGSAPIIININRAQLTNPEVKYNYTEDPTILRIDPEWSINSGGTLLTVTGTNLATVREPRIRAKYGGIERENGCLVYNDTTMVCRAPSVANPVRSPPELGERPDELGFVMDNVRSLLVLNSTSFLYYPDPVLEPLSPTGLLELKPSSPLILKGRNLLPPAPGNSRLNYTVLIGSTPCTLTVSETQLLCEAPNLTGQHKVTVRAGGFEFSPGTLQVYSDSLLTLPAIVGIGGGGGLLLLVIVAVLIAYKRKSRDADRTLKRLQLQMDNLESRVALECKEAFAELQTDIHELTNDLDGAGIPFLDYRTYAMRVLFPGIEDHPVLKEMEVQANVEKSLTLFGQLLTKKHFLLTFIRTLEAQRSFSMRDRGNVASLIMTALQGEMEYATGVLKQLLSDLIEKNLESKNHPKLLLRRTESVAEKMLTNWFTFLLYKFLKECAGEPLFMLYCAIKQQMEKGPIDAITGEARYSLSEDKLIRQQIDYKTLTLNCVNPENENAPEVPVKGLDCDTVTQAKEKLLDAAYKGVPYSQRPKAADMDLEWRQGRMARIILQDEDVTTKIDNDWKRLNTLAHYQVTDGSSVALVPKQTSAYNISNSSTFTKSLSRYESMLRTASSPDSLRSRTPMITPDLESGTKLWHLVKNHDHLDQREGDRGSKMVSEIYLTRLLATKGTLQKFVDDLFETIFSTAHRGSALPLAIKYMFDFLDEQADKHQIHDADVRHTWKSNCLPLRFWVNVIKNPQFVFDIHKNSITDACLSVVAQTFMDSCSTSEHKLGKDSPSNKLLYAKDIPNYKSWVERYYADIAKMPAISDQDMSAYLAEQSRLHLSQFNSMSALHEIYSYITKYKDEILAALEKDEQARRQRLRSKLEQVVDTMALSS

SEQ ID NO: 20927 - protein, 1217 aa, Artificial Sequence; identical to SEQ ID NO: 20926
  Synthetic polypeptide

SEQ ID NO: 20928 - protein, 54 aa, Artificial Sequence
  Synthetic polypeptide
SEPLGTTGPGSELSLIPGDPRHCRPPVRVRVRPGRVRTAHRSCPPRRSTCQWEW

SEQ ID NO: 20929 - protein, 54 aa, Artificial Sequence; identical to SEQ ID NO: 20928
  Synthetic polypeptide

SEQ ID NO: 20930 - protein, 59 aa, Artificial Sequence
  Synthetic polypeptide
SQETHATAGLLSESESGQVESGLPTDPALHADLRASGSGKTHHPGRTEPATATVRPAWI

SEQ ID NO: 20931 - protein, 59 aa, Artificial Sequence; identical to SEQ ID NO: 20930
  Synthetic polypeptide

SEQ ID NO: 20932 - protein, 413 aa, Artificial Sequence
  Synthetic polypeptide
GWAQWLMLVIPALWEVKDTFKVHYENNSPFLTITSMTRVIEVSHWGNIAVEENVDLKHTGAVLKGPFSRYDYQRQPDSGISSIRSFKTILPAAAQDVYYRDEIGNVSTSHLLILDDSVEMEIRPRFPLFGGWKTHYIVGYNLPSYEYLYNLGDQYALKMRFVDHVFDEQVIDSLTVKIILPEGAKNIEIDSPYEISRAPDELHYTYLDTFGRPVIVAYKKNLVEQHIQDIVVHYTFNKVLMLQEPLLVVAAFYILFFTVIIYVRLDFSITKDPAAEARMKVACITEQVLTLVNKRIGLYRHFDETVNRYKQSRDISTLNSGKKSLETEHKALTSEIALLQSRLKTEGSDLCDRVSEMQKLDAQVKELVLKSAVEAERLVAGKLKKDTYIENEKLISGKRQELVTKIDHILDAL

SEQ ID NO: 20933 - protein, 413 aa, Artificial Sequence; identical to SEQ ID NO: 20932
  Synthetic polypeptide

SEQ ID NO: 20934 - protein, 21 aa, Artificial Sequence
  Synthetic polypeptide
SQHFGRSRILLKYIMRTTALS

SEQ ID NO: 20935 - protein, 21 aa, Artificial Sequence
  Synthetic polypeptide
SQHFGRSRILLKYIMRTTALS

SEQ ID NO: 20936 - protein, 19 aa, Artificial Sequence
  Synthetic polypeptide
MGTVAYACNPSTLGGQGYF

SEQ ID NO: 20937 - protein, 19 aa, Artificial Sequence
  Synthetic polypeptide
MGTVAYACNPSTLGGQGYF

SEQ ID NO: 20938 - protein, 517 aa, Artificial Sequence
  Synthetic polypeptide
MSSLLLIEKPSLAGASTFCGRFFTVKLPVALDPGAKISVIVETVYTHVLHPYPTQITQSEKQFVVFEGNHYFYSPYPTKTQTMRVKLASRNVESYTKLGNPTRSEDLLDYGPFRDVPAYSQDTFKVHYENNSPFLTITSMTRVIEVSHWGNIAVEENVDLKHTGAVLKGPFSRYDYQRQPDSGISSIRSFKTILPAAAQDVYYRDEIGNVSTSHLLILDDSVEMEIRPRFPLFGGWKTHYIVGYNLPSYEYLYNLGDQYALKMRFVDHVFDEQVIDSLTVKIILPEGAKNIEIDSPYEISRAPDELHYTYLDTFGRPVIVAYKKNLVEQHIQDIVVHYTFNKVLMLQEPLLVVAAFYILFFTVIIYVRLDFSITKDPAAEARMKVACITEQVLTLVNKRIGLYRHFDETVNRYKQSRDISTLNSGKKSLETEHKALTSEIALLQSRLKTEGSDLCDRVSEMQKLDAQVKELVLKSAVEAERLVAGKLKKDTYIENEKLISGKRQELVTKIDHILDAL

SEQ ID NO: 20939 - protein, 72 aa, Artificial Sequence
  Synthetic polypeptide
LVLPHFVGDSSQSSSQLLLILGPRFQSLWKQSTPMCFIRIQPRSPSQRNSLWCLRGTIISTLPIQRRHKPCV

SEQ ID NO: 20940 - protein, 23 aa, Artificial Sequence
  Synthetic polypeptide
KTFISWCFHILWEILHSQAPSCS

SEQ ID NO: 20941 - protein, 20 aa, Artificial Sequence
  Synthetic polypeptide
CQSTPGGRDIPKDCEAVARR

SEQ ID NO: 20942 - protein, 20 aa, Artificial Sequence
  Synthetic polypeptide
CQSTPGGRDIPKDCEAVARR

SEQ ID NO: 20943 - protein, 20 aa, Artificial Sequence
  Synthetic polypeptide
CQSTPGGRDIPKDCEAVARR

SEQ ID NO: 20944 - protein, 261 aa, Artificial Sequence
  Synthetic polypeptide
VSLPQEAGISLKTVKPWHEGDKAWVSWEQTFNITVTKELLKKINFHKITLRLWNTKDKMSRKVRYYRLKTAGFTDDVGAFHKSEVRHLVLNQRKLSEQGIENTNIVREESNQEHPPGKQEKTEKHPKSLQGSHQAEPETSSKNSEEYEKSLKMDDSSTIQWSVSRTPTISLAGASMMEIKELIESESLSSLTNILDRQRSQIKGKDSEGRRKIQRRHKKPLAEEEADPTLTGPRKQSAFSIQLAVMPLLAVRKKKGNSPIS

SEQ ID NO: 20945 - protein, 270 aa, Artificial Sequence
  Synthetic polypeptide
VSLPQEAGISLKTVKPWHEGDKAWVSWEQTFNITVTKELLKKINFHKITLRLWNTKDKMSRKVRYYRLKTAGFTDDVGAFHKSEVRHLVLNQRKLSEQGIENTNIVREESNQEHPPGKQEKTEKHPKSLQGSHQAEPETSSKNSEEYEKSLKMDDSSTIQWSVSRTPTISLAGASMMEIKELIESESLSSLTNILDRQRSQIKGKDSEGRRKIQRRHKKPLAEEEADPTLTGPRKQSAFSIQLAVMPLLAGTHCLPCSQQLLLVLWPERP

SEQ ID NO: 20946 - protein, 270 aa, Artificial Sequence; identical to SEQ ID NO: 20945
  Synthetic polypeptide

SEQ ID NO: 20947 - protein, 29 aa, Artificial Sequence
  Synthetic polypeptide
GQAQWLTPVIPALWDAEDACHIRWRGGSF

SEQ ID NO: 20948 - protein, 29 aa, Artificial Sequence
  Synthetic polypeptide
GQAQWLTPVIPALWDAEDACHIRWRGGSF

SEQ ID NO: 20949 - protein, 29 aa, Artificial Sequence
  Synthetic polypeptide
GQAQWLTPVIPALWDAEDACHIRWRGGSF

SEQ ID NO: 20950 - protein, 29 aa, Artificial Sequence
  Synthetic polypeptide
GQAQWLTPVIPALWDAEDACHIRWRGGSF

SEQ ID NO: 20951 - protein, 29 aa, Artificial Sequence
  Synthetic polypeptide
GQAQWLTPVIPALWDAEDACHIRWRGGSF

SEQ ID NO: 20952 - protein, 29 aa, Artificial Sequence
  Synthetic polypeptide
GQAQWLTPVIPALWDAEDACHIRWRGGSF

SEQ ID NO: 20953 - protein, 29 aa, Artificial Sequence
  Synthetic polypeptide
GQAQWLTPVIPALWDAEDACHIRWRGGSF

SEQ ID NO: 20954 - protein, 29 aa, Artificial Sequence
  Synthetic polypeptide
GQAQWLTPVIPALWDAEDACHIRWRGGSF

SEQ ID NO: 20955 - protein, 126 aa, Artificial Sequence
  Synthetic polypeptide
SQHFGTPRMPAILDGEEAVSKWLDFGEVSTQEALKLIHPTENITFHAVSSVVNNSRNNTPECLAPVDLVVKKELRASGSSQRMLQWLATKSPKKEDSKTPQKEESDVPQWSSQFLQKSPLPTKRGT

SEQ ID NO: 20956 - protein, 21 aa, Artificial Sequence
  Synthetic polypeptide
PGAVAHTCNPSTLGRRGCLPY

SEQ ID NO: 20957 - protein, 21 aa, Artificial Sequence
  Synthetic polypeptide
PGAVAHTCNPSTLGRRGCLPY

SEQ ID NO: 20958 - protein, 21 aa, Artificial Sequence
  Synthetic polypeptide
PGAVAHTCNPSTLGRRGCLPY

SEQ ID NO: 20959 - protein, 21 aa, Artificial Sequence
  Synthetic polypeptide
PGAVAHTCNPSTLGRRGCLPY

SEQ ID NO: 20960 - protein, 21 aa, Artificial Sequence
  Synthetic polypeptide
PGAVAHTCNPSTLGRRGCLPY

SEQ ID NO: 20961 - protein, 21 aa, Artificial Sequence
  Synthetic polypeptide
PGAVAHTCNPSTLGRRGCLPY

SEQ ID NO: 20962 - protein, 21 aa, Artificial Sequence
  Synthetic polypeptide
PGAVAHTCNPSTLGRRGCLPY

SEQ ID NO: 20963 - protein, 21 aa, Artificial Sequence
  Synthetic polypeptide
PGAVAHTCNPSTLGRRGCLPY

SEQ ID NO: 20964 - protein, 150 aa, Artificial Sequence
  Synthetic polypeptide
SQHFGTPRMPAILDGEEAVSKWLDFGEVSTQEALKLIHPTENITFHAVSSVVNNSRNNTPECLAPVDLVVKKELRASGSSQRMLQWLATKSPKKEDSKTPQKEESDVPQWSSQFLQKSPLPTKRGTAGLLEQWLKREKEEEPVAKRPYSQ

SEQ ID NO: 20965 - protein, 150 aa, Artificial Sequence; identical to SEQ ID NO: 20964
  Synthetic polypeptide

SEQ ID NO: 20966 - protein, 150 aa, Artificial Sequence; identical to SEQ ID NO: 20964
  Synthetic polypeptide

SEQ ID NO: 20967 - protein, 150 aa, Artificial Sequence; identical to SEQ ID NO: 20964
  Synthetic polypeptide

SEQ ID NO: 20968 - protein, 69 aa, Artificial Sequence
  Synthetic polypeptide
SQHFGTPRMPAILDGEEAVSKWLDFGEVSTQEALKLIHPTENITFHAVSSVVNNSRNNTPECLAPVDLV

SEQ ID NO: 20969 - protein, 29 aa, Artificial Sequence
  Synthetic polypeptide
SQHFGTPRMPAILDGEEAVSKWLDFGEVS

SEQ ID NO: 20970 - protein, 26 aa, Artificial Sequence
  Synthetic polypeptide
SQHFGTPRMPAILDGEEAVSKWLDFG

SEQ ID NO: 20971 - protein, 64 aa, Artificial Sequence
  Synthetic polypeptide
GASLPGRPSSEMWGAPLPCRPVWDVRSVSARPLRLRSEETLCLATAPSEKLHVFKKYLMVKMRQ

SEQ ID NO: 20972 - protein, 64 aa, Artificial Sequence; identical to SEQ ID NO: 20971
  Synthetic polypeptide

SEQ ID NO: 20973 - protein, 64 aa, Artificial Sequence; identical to SEQ ID NO: 20971
  Synthetic polypeptide

SEQ ID NO: 20974 - protein, 64 aa, Artificial Sequence; identical to SEQ ID NO: 20971
  Synthetic polypeptide

SEQ ID NO: 20975 - protein, 64 aa, Artificial Sequence; identical to SEQ ID NO: 20971
  Synthetic polypeptide

SEQ ID NO: 20976 - protein, 64 aa, Artificial Sequence; identical to SEQ ID NO: 20971
  Synthetic polypeptide

SEQ ID NO: 20977 - protein, 64 aa, Artificial Sequence; identical to SEQ ID NO: 20971
  Synthetic polypeptide

SEQ ID NO: 20978 - protein, 64 aa, Artificial Sequence; identical to SEQ ID NO: 20971
  Synthetic polypeptide

SEQ ID NO: 20979 - protein, 64 aa, Artificial Sequence; identical to SEQ ID NO: 20971
  Synthetic polypeptide

SEQ ID NO: 20980 - protein, 64 aa, Artificial Sequence; identical to SEQ ID NO: 20971
  Synthetic polypeptide

SEQ ID NO: 20981 - protein, 22 aa, Artificial Sequence
  Synthetic polypeptide
EVRKPSAWQPPRLRSCTFSKNT

SEQ ID NO: 20982 - protein, 22 aa, Artificial Sequence
  Synthetic polypeptide
EVRKPSAWQPPRLRSCTFSKNT

SEQ ID NO: 20983 - protein, 22 aa, Artificial Sequence
  Synthetic polypeptide
EVRKPSAWQPPRLRSCTFSKNT

SEQ ID NO: 20984 - protein, 22 aa, Artificial Sequence
  Synthetic polypeptide
EVRKPSAWQPPRLRSCTFSKNT

SEQ ID NO: 20985 - protein, 22 aa, Artificial Sequence
  Synthetic polypeptide
EVRKPSAWQPPRLRSCTFSKNT

SEQ ID NO: 20986 - protein, 22 aa, Artificial Sequence
  Synthetic polypeptide
EVRKPSAWQPPRLRSCTFSKNT

SEQ ID NO: 20987 - protein, 22 aa, Artificial Sequence
  Synthetic polypeptide
EVRKPSAWQPPRLRSCTFSKNT

SEQ ID NO: 20988 - protein, 22 aa, Artificial Sequence
  Synthetic polypeptide
EVRKPSAWQPPRLRSCTFSKNT

SEQ ID NO: 20989 - protein, 22 aa, Artificial Sequence
  Synthetic polypeptide
EVRKPSAWQPPRLRSCTFSKNT

SEQ ID NO: 20990 - protein, 22 aa, Artificial Sequence
  Synthetic polypeptide
EVRKPSAWQPPRLRSCTFSKNT

SEQ ID NO: 20991 - protein, 938 aa, Artificial Sequence
  Synthetic polypeptide
EVARFQKIPNGENETMIPVLTSKKASELPVSEVASILQADLQNGLNKCEVSHRRAFHGWNEFDISEDEPLWKKYISQFKNPLIMLLLASAVISVLMHQFDDAVSITVAILIVVTVAFVQEYRSEKSLEELSKLVPPECHCVREGKLEHTLARDLVPGDTVCLSVGDRVPADLRLFEAVDLSIDESSLTGETTPCSKVTAPQPAATNGDLASRSNIAFMGTLVRCGKAKGVVIGTGENSEFGEVFKMMQAEEAPKTPLQKSMDLLGKQLSFYSFGIIGIIMLVGWLLGKDILEMFTISVSLAVAAIPEGLPIVVTVTLALGVMRMVKKRAIVKKLPIVETLGCCNVICSDKTGTLTKNEMTVTHIFTSDGLHAEVTGVGYNQFGEVIVDGDVVHGFYNPAVSRIVEAGCVCNDAVIRNNTLMGKPTEGALIALAMKMGLDGLQQDYIRKAEYPFSSEQKWMAVKCVHRTQQDRPEICFMKGAYEQVIKYCTTYQSKGQTLTLTQQQRDVYQQEKARMGSAGLRVLALASGPELGQLTFLGLVGIIDPPRTGVKEAVTTLIASGVSIKMITGDSQETAVAIASRLGLYSKTSQSVSGEEIDAMDVQQLSQIVPKVAVFYRASPRHKMKIIKSLQKNGSVVAMTGDGVNDAVALKAADIGVAMGQTGTDVCKEAADMILVDDDFQTIMSAIEEGKGIYNNIKNFVRFQLSTSIAALTLISLATLMNFPNPLNAMQILWINIIMDGPPAQSLGVEPVDKDVIRKPPRNWKDSILTKNLILKILVSSIIIVCGTLFVFWRELRDNVITPRDTTMTFTCFVFFDMFNALSSRSQTKSVFEIGLCSNRMFCYAVLGSIMGQLLVIYFPPLQKVFQTESLSILDLLFLLGLTSSVCIVAEIIKKVERSREKIQKHVWLWERSGQQLVEIHPHLETGLPLTEDVSCV

SEQ ID NO: 20992 - protein, 938 aa, Artificial Sequence; identical to SEQ ID NO: 20991
  Synthetic polypeptide

SEQ ID NO: 20993 - protein, 909 aa, Artificial Sequence
  Synthetic polypeptide
EVARFQKIPNGENETMIPVLTSKKASELPVSEVASILQFKNPLIMLLLASAVISVLMHQFDDAVSITVAILIVVTVAFVQEYRSEKSLEELSKLVPPECHCVREGKLEHTLARDLVPGDTVCLSVGDRVPADLRLFEAVDLSIDESSLTGETTPCSKVTAPQPAATNGDLASRSNIAFMGTLVRCGKAKGVVIGTGENSEFGEVFKMMQAEEAPKTPLQKSMDLLGKQLSFYSFGIIGIIMLVGWLLGKDILEMFTISVSLAVAAIPEGLPIVVTVTLALGVMRMVKKRAIVKKLPIVETLGCCNVICSDKTGTLTKNEMTVTHIFTSDGLHAEVTGVGYNQFGEVIVDGDVVHGFYNPAVSRIVEAGCVCNDAVIRNNTLMGKPTEGALIALAMKMGLDGLQQDYIRKAEYPFSSEQKWMAVKCVHRTQQDRPEICFMKGAYEQVIKYCTTYQSKGQTLTLTQQQRDVYQQEKARMGSAGLRVLALASGPELGQLTFLGLVGIIDPPRTGVKEAVTTLIASGVSIKMITGDSQETAVAIASRLGLYSKTSQSVSGEEIDAMDVQQLSQIVPKVAVFYRASPRHKMKIIKSLQKNGSVVAMTGDGVNDAVALKAADIGVAMGQTGTDVCKEAADMILVDDDFQTIMSAIEEGKGIYNNIKNFVRFQLSTSIAALTLISLATLMNFPNPLNAMQILWINIIMDGPPAQSLGVEPVDKDVIRKPPRNWKDSILTKNLILKILVSSIIIVCGTLFVFWRELRDNVITPRDTTMTFTCFVFFDMFNALSSRSQTKSVFEIGLCSNRMFCYAVLGSIMGQLLVIYFPPLQKVFQTESLSILDLLFLLGLTSSVCIVAEIIKKVERSREKIQKHVSSTSSSFLEVWLWERSGQQLVEIHPHLETGLPLTEDVSCV

SEQ ID NO: 20994 - protein, 918 aa, Artificial Sequence
  Synthetic polypeptide
EVARFQKIPNGENETMIPVLTSKKASELPVSEVASILQADLQNGLNKCEVSHRRAFHGWNEFDISEDEPLWKKYISQFKNPLIMLLLASAVISVLMHQFDDAVSITVAILIVVTVAFVQEYRSEKSLEELSKLVPPECHCVREGKLEHTLARDLVPGDTVCLSVGDRVPADLRLFEAVDLSIDESSLTGETTPCSKVTAPQPAATNGDLASRSNIAFMGTLVRCGKAKGVVIGTGENSEFGEVFKMMQAEEAPKTPLQKSMDLLGKQLSFYSFGIIGIIMLVGWLLGKDILEMFTISVSLAVAAIPEGLPIVVTVTLALGVMRMVKKRAIVKKLPIVETLGCCNVICSDKTGTLTKNEMTVTHIFTSDGLHAEVTGVGYNQFGEVIVDGDVVHGFYNPAVSRIVEAGCVCNDAVIRNNTLMGKPTEGALIALAMKMGLDGLQQDYIRKAEYPFSSEQKWMAVKCVHRTQQDRPEICFMKGAYEQVIKYCTTYQSKGQTLTLTQQQRDVYQQEKARMGSAGLRVLALASGPELGQLTFLGLVGIIDPPRTGVKEAVTTLIASGVSIKMITGDSQETAVAIASRLGLYSKTSQSVSGEEIDAMDVQQLSQIVPKVAVFYRASPRHKMKIIKSLQKNGSVVAMTGDGVNDAVALKAADIGVAMGQTGTDVCKEAADMILVDDDFQTIMSAIEEGKGIYNNIKNFVRFQLSTSIAALTLISLATLMNFPNPLNAMQILWINIIMDGPPAQSLGVEPVDKDVIRKPPRNWKDSILTKNLILKILVSSIIIVCGTLFVFWRELRDNVITPRDTTMTFTCFVFFDMFNALSSRSQTKSVFEIGLCSNRMFCYAVLGSIMGQLLVIYFPPLQKVFQTESLSILDLLFLLGLTSSVCIVAEIIKKVERSREKIQKHVSSTSSSFLEV

SEQ ID NO: 20995 - protein, 918 aa, Artificial Sequence; identical to SEQ ID NO: 20994
  Synthetic polypeptide

SEQ ID NO: 20996 - protein, 918 aa, Artificial Sequence; identical to SEQ ID NO: 20994
  Synthetic polypeptide

SEQ ID NO: 20997 - protein, 119 aa, Artificial Sequence
  Synthetic polypeptide
EVARFQKIPNGENETMIPVLTSKKASELPVSEVASILQADLQNGLNKCEVSHRRAFHGWNEFDISEDEPLWKKYISQFKNPLIMLLLASAVISVLMHQFDDAVSITVAILIVVTVAFVQ

SEQ ID NO: 20998 - protein, 101 aa, Artificial Sequence
  Synthetic polypeptide
EVARFQKIPNGENETMIPVLTSKKASELPVSEVASILQADLQNGLNKCEVSHRRAFHGWNEFDISEDEPLWKKYISQFKNPLIMLLLASAVISVLMHQFDD

SEQ ID NO: 20999 - protein, 887 aa, Artificial Sequence
  Synthetic polypeptide
EVARFQKIPNGENETMIPVLTSKKASELPVSEVASILQADLQNGLNKCEVSHRRAFHGWNEFDISEDEPLWKKYISQFKNPLIMLLLASAVISVLMHQFDDAVSITVAILIVVTVAFVQEYRSEKSLEELSKLVPPECHCVREGKLEHTLARDLVPGDTVCLSVGDRVPADLRLFEAVDLSIDESSLTGETTPCSKVTAPQPAATNGDLASRSNIAFMGTLVRCGKAKGVVIGTGENSEFGEVFKMMQAEEAPKTPLQKSMDLLGKQLSFYSFGIIGIIMLVGWLLGKDILEMFTISVSLAVAAIPEGLPIVVTVTLALGVMRMVKKRAIVKKLPIVETLGCCNVICSDKTGTLTKNEMTVTHIFTSDGLHAEVTGVGYNQFGEVIVDGDVVHGFYNPAVSRIVEAGCVCNDAVIRNNTLMGKPTEGALIALAMKMGLDGLQQDYIRKAEYPFSSEQKWMAVKCVHRTQQDRPEICFMKGAYEQVIKYCTTYQSKGQTLTLTQQQRDVYQQEKARMGSAGLRVLALASGPELGQLTFLGLVGIIDPPRTGVKEAVTTLIASGVSIKMITGDSQETAVAIASRLGLYSKTSQSVSGEEIDAMDVQQLSQIVPKVAVFYRASPRHKMKIIKSLQKNGSVVAMTGDGVNDAVALKAADIGVAMGQTGTDVCKEAADMILVDDDFQTIMSAIEEGKGIYNNIKNFVRFQLSTSIAALTLISLATLMNFPNPLNAMQILWINIIMDGPPAQSLGVEPVDKDVIRKPPRNWKDSILTKNLILKILVSSIIIVCGTLFVFWRELRDNVITPRDTTMTFTCFVFFDMFNALSSRSQTKSVFEIGLCSNRMFCYAVLGSIMGQLLVIYFPPLQKVFQTESLSILGLALGEEWTAAG

SEQ ID NO: 21000 - protein, 948 aa, Artificial Sequence
  Synthetic polypeptide
EVARFQKIPNGENETMIPVLTSKKASELPVSEVASILQADLQNGLNKCEVSHRRAFHGWNEFDISEDEPLWKKYISQFKNPLIMLLLASAVISVLMHQFDDAVSITVAILIVVTVAFVQEYRSEKSLEELSKLVPPECHCVREGKLEHTLARDLVPGDTVCLSVGDRVPADLRLFEAVDLSIDESSLTGETTPCSKVTAPQPAATNGDLASRSNIAFMGTLVRCGKAKGVVIGTGENSEFGEVFKMMQAEEAPKTPLQKSMDLLGKQLSFYSFGIIGIIMLVGWLLGKDILEMFTISVSLAVAAIPEGLPIVVTVTLALGVMRMVKKRAIVKKLPIVETLGCCNVICSDKTGTLTKNEMTVTHIFTSDGLHAEVTGVGYNQFGEVIVDGDVVHGFYNPAVSRIVEAGCVCNDAVIRNNTLMGKPTEGALIALAMKMGLDGLQQDYIRKAEYPFSSEQKWMAVKCVHRTQQDRPEICFMKGAYEQVIKYCTTYQSKGQTLTLTQQQRDVYQQEKARMGSAGLRVLALASGPELGQLTFLGLVGIIDPPRTGVKEAVTTLIASGVSIKMITGDSQETAVAIASRLGLYSKTSQSVSGEEIDAMDVQQLSQIVPKVAVFYRASPRHKMKIIKSLQKNGSVVAMTGDGVNDAVALKAADIGVAMGQTGTDVCKEAADMILVDDDFQTIMSAIEEGKGIYNNIKNFVRFQLSTSIAALTLISLATLMNFPNPLNAMQILWINIIMDGPPAQSLGVEPVDKDVIRKPPRNWKDSILTKNLILKILVSSIIIVCGTLFVFWRELRDNVITPRDTTMTFTCFVFFDMFNALSSRSQTKSVFEIGLCSNRMFCYAVLGSIMGQLLVIYFPPLQKVFQTESLSILDLLFLLGLTSSVCIVAEIIKKVERSREKIQKHVSSTSSSFLEVWLWERSGQQLVEIHPHLETGLPLTEDVSCV

SEQ ID NO: 21001 - protein, 949 aa, Artificial Sequence
  Synthetic polypeptide
GAPPSGNHPVWEVARFQKIPNGENETMIPVLTSKKASELPVSEVASILQADLQNGLNKCEVSHRRAFHGWNEFDISEDEPLWKKYISQFKNPLIMLLLASAVISVLMHQFDDAVSITVAILIVVTVAFVQEYRSEKSLEELSKLVPPECHCVREGKLEHTLARDLVPGDTVCLSVGDRVPADLRLFEAVDLSIDESSLTGETTPCSKVTAPQPAATNGDLASRSNIAFMGTLVRCGKAKGVVIGTGENSEFGEVFKMMQAEEAPKTPLQKSMDLLGKQLSFYSFGIIGIIMLVGWLLGKDILEMFTISVSLAVAAIPEGLPIVVTVTLALGVMRMVKKRAIVKKLPIVETLGCCNVICSDKTGTLTKNEMTVTHIFTSDGLHAEVTGVGYNQFGEVIVDGDVVHGFYNPAVSRIVEAGCVCNDAVIRNNTLMGKPTEGALIALAMKMGLDGLQQDYIRKAEYPFSSEQKWMAVKCVHRTQQDRPEICFMKGAYEQVIKYCTTYQSKGQTLTLTQQQRDVYQQEKARMGSAGLRVLALASGPELGQLTFLGLVGIIDPPRTGVKEAVTTLIASGVSIKMITGDSQETAVAIASRLGLYSKTSQSVSGEEIDAMDVQQLSQIVPKVAVFYRASPRHKMKIIKSLQKNGSVVAMTGDGVNDAVALKAADIGVAMGQTGTDVCKEAADMILVDDDFQTIMSAIEEGKGIYNNIKNFVRFQLSTSIAALTLISLATLMNFPNPLNAMQILWINIIMDGPPAQSLGVEPVDKDVIRKPPRNWKDSILTKNLILKILVSSIIIVCGTLFVFWRELRDNVITPRDTTMTFTCFVFFDMFNALSSRSQTKSVFEIGLCSNRMFCYAVLGSIMGQLLVIYFPPLQKVFQTESLSILDLLFLLGLTSSVCIVAEIIKKVERSREKIQKHVWLWERSGQQLVEIHPHLETGLPLTEDVSCV

SEQ ID NO: 21002 - protein, 949 aa, Artificial Sequence; identical to SEQ ID NO: 21001
  Synthetic polypeptide

SEQ ID NO: 21003 - protein, 42 aa, Artificial Sequence
  Synthetic polypeptide
EVRKPSAWQPPRLRSEEPLRPATTPSGKLHVFKKYLMVKMRQ

SEQ ID NO: 21004 - protein, 42 aa, Artificial Sequence; identical to SEQ ID NO: 21003
  Synthetic polypeptide

SEQ ID NO: 21005 - protein, 42 aa, Artificial Sequence; identical to SEQ ID NO: 21003
  Synthetic polypeptide

SEQ ID NO: 21006 - protein, 42 aa, Artificial Sequence; identical to SEQ ID NO: 21003
  Synthetic polypeptide

SEQ ID NO: 21007 - protein, 42 aa, Artificial Sequence; identical to SEQ ID NO: 21003
  Synthetic polypeptide

SEQ ID NO: 21008 - protein, 42 aa, Artificial Sequence; identical to SEQ ID NO: 21003
  Synthetic polypeptide

SEQ ID NO: 21009 - protein, 42 aa, Artificial Sequence; identical to SEQ ID NO: 21003
  Synthetic polypeptide

SEQ ID NO: 21010 - protein, 42 aa, Artificial Sequence; identical to SEQ ID NO: 21003
  Synthetic polypeptide

SEQ ID NO: 21011 - protein, 42 aa, Artificial Sequence; identical to SEQ ID NO: 21003
  Synthetic polypeptide

SEQ ID NO: 21012 - protein, 42 aa, Artificial Sequence; identical to SEQ ID NO: 21003
  Synthetic polypeptide

SEQ ID NO: 21013 - protein, 22 aa, Artificial Sequence
  Synthetic polypeptide
EVRSPSVRQPPRLGSCTFSKNT

SEQ ID NO: 21014 - protein, 22 aa, Artificial Sequence
  Synthetic polypeptide
EVRSPSVRQPPRLGSCTFSKNT

SEQ ID NO: 21015 - protein, 22 aa, Artificial Sequence
  Synthetic polypeptide
EVRSPSVRQPPRLGSCTFSKNT

SEQ ID NO: 21016 - protein, 22 aa, Artificial Sequence
  Synthetic polypeptide
EVRSPSVRQPPRLGSCTFSKNT

SEQ ID NO: 21017 - protein, 22 aa, Artificial Sequence
  Synthetic polypeptide
EVRSPSVRQPPRLGSCTFSKNT

SEQ ID NO: 21018 - protein, 22 aa, Artificial Sequence
  Synthetic polypeptide
EVRSPSVRQPPRLGSCTFSKNT

SEQ ID NO: 21019 - protein, 22 aa, Artificial Sequence
  Synthetic polypeptide
EVRSPSVRQPPRLGSCTFSKNT

SEQ ID NO: 21020 - protein, 22 aa, Artificial Sequence
  Synthetic polypeptide
EVRSPSVRQPPRLGSCTFSKNT

SEQ ID NO: 21021 - protein, 22 aa, Artificial Sequence
  Synthetic polypeptide
EVRSPSVRQPPRLGSCTFSKNT

SEQ ID NO: 21022 - protein, 22 aa, Artificial Sequence
  Synthetic polypeptide
EVRSPSVRQPPRLGSCTFSKNT

SEQ ID NO: 21023 - protein, 920 aa, Artificial Sequence
  Synthetic polypeptide
GAPPSGNHPVWEVARFQKIPNGENETMIPVLTSKKASELPVSEVASILQFKNPLIMLLLASAVISVLMHQFDDAVSITVAILIVVTVAFVQEYRSEKSLEELSKLVPPECHCVREGKLEHTLARDLVPGDTVCLSVGDRVPADLRLFEAVDLSIDESSLTGETTPCSKVTAPQPAATNGDLASRSNIAFMGTLVRCGKAKGVVIGTGENSEFGEVFKMMQAEEAPKTPLQKSMDLLGKQLSFYSFGIIGIIMLVGWLLGKDILEMFTISVSLAVAAIPEGLPIVVTVTLALGVMRMVKKRAIVKKLPIVETLGCCNVICSDKTGTLTKNEMTVTHIFTSDGLHAEVTGVGYNQFGEVIVDGDVVHGFYNPAVSRIVEAGCVCNDAVIRNNTLMGKPTEGALIALAMKMGLDGLQQDYIRKAEYPFSSEQKWMAVKCVHRTQQDRPEICFMKGAYEQVIKYCTTYQSKGQTLTLTQQQRDVYQQEKARMGSAGLRVLALASGPELGQLTFLGLVGIIDPPRTGVKEAVTTLIASGVSIKMITGDSQETAVAIASRLGLYSKTSQSVSGEEIDAMDVQQLSQIVPKVAVFYRASPRHKMKIIKSLQKNGSVVAMTGDGVNDAVALKAADIGVAMGQTGTDVCKEAADMILVDDDFQTIMSAIEEGKGIYNNIKNFVRFQLSTSIAALTLISLATLMNFPNPLNAMQILWINIIMDGPPAQSLGVEPVDKDVIRKPPRNWKDSILTKNLILKILVSSIIIVCGTLFVFWRELRDNVITPRDTTMTFTCFVFFDMFNALSSRSQTKSVFEIGLCSNRMFCYAVLGSIMGQLLVIYFPPLQKVFQTESLSILDLLFLLGLTSSVCIVAEIIKKVERSREKIQKHVSSTSSSFLEVWLWERSGQQLVEIHPHLETGLPLTEDVSCV

SEQ ID NO: 21024 - protein, 929 aa, Artificial Sequence
  Synthetic polypeptide
GAPPSGNHPVWEVARFQKIPNGENETMIPVLTSKKASELPVSEVASILQADLQNGLNKCEVSHRRAFHGWNEFDISEDEPLWKKYISQFKNPLIMLLLASAVISVLMHQFDDAVSITVAILIVVTVAFVQEYRSEKSLEELSKLVPPECHCVREGKLEHTLARDLVPGDTVCLSVGDRVPADLRLFEAVDLSIDESSLTGETTPCSKVTAPQPAATNGDLASRSNIAFMGTLVRCGKAKGVVIGTGENSEFGEVFKMMQAEEAPKTPLQKSMDLLGKQLSFYSFGIIGIIMLVGWLLGKDILEMFTISVSLAVAAIPEGLPIVVTVTLALGVMRMVKKRAIVKKLPIVETLGCCNVICSDKTGTLTKNEMTVTHIFTSDGLHAEVTGVGYNQFGEVIVDGDVVHGFYNPAVSRIVEAGCVCNDAVIRNNTLMGKPTEGALIALAMKMGLDGLQQDYIRKAEYPFSSEQKWMAVKCVHRTQQDRPEICFMKGAYEQVIKYCTTYQSKGQTLTLTQQQRDVYQQEKARMGSAGLRVLALASGPELGQLTFLGLVGIIDPPRTGVKEAVTTLIASGVSIKMITGDSQETAVAIASRLGLYSKTSQSVSGEEIDAMDVQQLSQIVPKVAVFYRASPRHKMKIIKSLQKNGSVVAMTGDGVNDAVALKAADIGVAMGQTGTDVCKEAADMILVDDDFQTIMSAIEEGKGIYNNIKNFVRFQLSTSIAALTLISLATLMNFPNPLNAMQILWINIIMDGPPAQSLGVEPVDKDVIRKPPRNWKDSILTKNLILKILVSSIIIVCGTLFVFWRELRDNVITPRDTTMTFTCFVFFDMFNALSSRSQTKSVFEIGLCSNRMFCYAVLGSIMGQLLVIYFPPLQKVFQTESLSILDLLFLLGLTSSVCIVAEIIKKVERSREKIQKHVSSTSSSFLEV

SEQ ID NO: 21025 - protein, 929 aa, Artificial Sequence; identical to SEQ ID NO: 21024
  Synthetic polypeptide

SEQ ID NO: 21026 - protein, 929 aa, Artificial Sequence; identical to SEQ ID NO: 21024
  Synthetic polypeptide

SEQ ID NO: 21027 - protein, 130 aa, Artificial Sequence
  Synthetic polypeptide
GAPPSGNHPVWEVARFQKIPNGENETMIPVLTSKKASELPVSEVASILQADLQNGLNKCEVSHRRAFHGWNEFDISEDEPLWKKYISQFKNPLIMLLLASAVISVLMHQFDDAVSITVAILIVVTVAFVQ

SEQ ID NO: 21028 - protein, 112 aa, Artificial Sequence
  Synthetic polypeptide
GAPPSGNHPVWEVARFQKIPNGENETMIPVLTSKKASELPVSEVASILQADLQNGLNKCEVSHRRAFHGWNEFDISEDEPLWKKYISQFKNPLIMLLLASAVISVLMHQFDD

SEQ ID NO: 21029 - protein, 898 aa, Artificial Sequence
  Synthetic polypeptide
GAPPSGNHPVWEVARFQKIPNGENETMIPVLTSKKASELPVSEVASILQADLQNGLNKCEVSHRRAFHGWNEFDISEDEPLWKKYISQFKNPLIMLLLASAVISVLMHQFDDAVSITVAILIVVTVAFVQEYRSEKSLEELSKLVPPECHCVREGKLEHTLARDLVPGDTVCLSVGDRVPADLRLFEAVDLSIDESSLTGETTPCSKVTAPQPAATNGDLASRSNIAFMGTLVRCGKAKGVVIGTGENSEFGEVFKMMQAEEAPKTPLQKSMDLLGKQLSFYSFGIIGIIMLVGWLLGKDILEMFTISVSLAVAAIPEGLPIVVTVTLALGVMRMVKKRAIVKKLPIVETLGCCNVICSDKTGTLTKNEMTVTHIFTSDGLHAEVTGVGYNQFGEVIVDGDVVHGFYNPAVSRIVEAGCVCNDAVIRNNTLMGKPTEGALIALAMKMGLDGLQQDYIRKAEYPFSSEQKWMAVKCVHRTQQDRPEICFMKGAYEQVIKYCTTYQSKGQTLTLTQQQRDVYQQEKARMGSAGLRVLALASGPELGQLTFLGLVGIIDPPRTGVKEAVTTLIASGVSIKMITGDSQETAVAIASRLGLYSKTSQSVSGEEIDAMDVQQLSQIVPKVAVFYRASPRHKMKIIKSLQKNGSVVAMTGDGVNDAVALKAADIGVAMGQTGTDVCKEAADMILVDDDFQTIMSAIEEGKGIYNNIKNFVRFQLSTSIAALTLISLATLMNFPNPLNAMQILWINIIMDGPPAQSLGVEPVDKDVIRKPPRNWKDSILTKNLILKILVSSIIIVCGTLFVFWRELRDNVITPRDTTMTFTCFVFFDMFNALSSRSQTKSVFEIGLCSNRMFCYAVLGSIMGQLLVIYFPPLQKVFQTESLSILGLALGEEWTAAG

SEQ ID NO: 21030 - protein, 959 aa, Artificial Sequence
  Synthetic polypeptide
GAPPSGNHPVWEVARFQKIPNGENETMIPVLTSKKASELPVSEVASILQADLQNGLNKCEVSHRRAFHGWNEFDISEDEPLWKKYISQFKNPLIMLLLASAVISVLMHQFDDAVSITVAILIVVTVAFVQEYRSEKSLEELSKLVPPECHCVREGKLEHTLARDLVPGDTVCLSVGDRVPADLRLFEAVDLSIDESSLTGETTPCSKVTAPQPAATNGDLASRSNIAFMGTLVRCGKAKGVVIGTGENSEFGEVFKMMQAEEAPKTPLQKSMDLLGKQLSFYSFGIIGIIMLVGWLLGKDILEMFTISVSLAVAAIPEGLPIVVTVTLALGVMRMVKKRAIVKKLPIVETLGCCNVICSDKTGTLTKNEMTVTHIFTSDGLHAEVTGVGYNQFGEVIVDGDVVHGFYNPAVSRIVEAGCVCNDAVIRNNTLMGKPTEGALIALAMKMGLDGLQQDYIRKAEYPFSSEQKWMAVKCVHRTQQDRPEICFMKGAYEQVIKYCTTYQSKGQTLTLTQQQRDVYQQEKARMGSAGLRVLALASGPELGQLTFLGLVGIIDPPRTGVKEAVTTLIASGVSIKMITGDSQETAVAIASRLGLYSKTSQSVSGEEIDAMDVQQLSQIVPKVAVFYRASPRHKMKIIKSLQKNGSVVAMTGDGVNDAVALKAADIGVAMGQTGTDVCKEAADMILVDDDFQTIMSAIEEGKGIYNNIKNFVRFQLSTSIAALTLISLATLMNFPNPLNAMQILWINIIMDGPPAQSLGVEPVDKDVIRKPPRNWKDSILTKNLILKILVSSIIIVCGTLFVFWRELRDNVITPRDTTMTFTCFVFFDMFNALSSRSQTKSVFEIGLCSNRMFCYAVLGSIMGQLLVIYFPPLQKVFQTESLSILDLLFLLGLTSSVCIVAEIIKKVERSREKIQKHVSSTSSSFLEVWLWERSGQQLVEIHPHLETGLPLTEDVSCV

SEQ ID NO: 21031 - protein, 25 aa, Artificial Sequence
  Synthetic polypeptide
WTEQLGSWAPQGLEPTTRRGRGPQQ

SEQ ID NO: 21032 - protein, 25 aa, Artificial Sequence
  Synthetic polypeptide
WTEQLGSWAPQGLEPTTRRGRGPQQ

SEQ ID NO: 21033 - protein, 25 aa, Artificial Sequence
  Synthetic polypeptide
WTEQLGSWAPQGLEPTTRRGRGPQQ

SEQ ID NO: 21034 - protein, 945 aa, Artificial Sequence
  Synthetic polypeptide
SPQRVEGEAPSSETGTSLDSPSAYPQGPLVPGSSLSPDHYEHTSVGAYGLYSGPPGQQQRTRRPKLQHSTSILRKQAEEEAIKRSRSLSESYELSSDLQDKQVEMLERKYGGRLVTRHAARTIQTAFRQYQMNKNFERLRSSMSENRMSRRIVLSNMRMQFSFEGPEKVHSSYFEGKQVSVTNDGSQLGALVSPECGDLSEPTTLKSPAPSSDFADAITELEDAFSRQVKSLAESIDDALNCRSLHTEEAPALDAARARDTEPQTALHGMDHRKLDEMTASYSDVTLYIDEEELSPPLPLSQAGDRPSSTESDLRLRAGGAAPDYWALAHKEDKADTDTSCRSTPSLERQEQRLRVEHLPLLTIEPPSDSSVDLSDRSERGSLKRQSAYERSLGGQQGSPKHGPHSGAPKSLPREEPELRPRPPRPLDSHLAINGSANRQSKSESDYSDGDNDSINSTSNSNDTINCSSESSSRDSLREQTLSKQTYHKEARNSWDSPAFSNDVIRKRHYRIGLNLFNKKPEKGVQYLIERGFVPDTPVGVAHFLLQRKGLSRQMIGEFLGNRQKQFNRDVLDCVVDEMDFSTMELDEALRKFQAHIRVQGEAQKVERLIEAFSQRYCICNPGVVRQFRNPDTIFILAFAIILLNTDMYSPNVKPERKMKLEDFIKNLRGVDDGEDIPREMLMGIYERIRKRELKTNEDHVSQVQKVEKLIVGKKPIGSLHPGLGCVLSLPHRRLVCYCRLFEVPDPNKPQKLGLHQREIFLFNDLLVVTKIFQKKKNSVTYSFRQSFSLYGMQVLLFENQYYPNGIRLTSSVPGADIKVLINFNAPNPQDRKKFTDDLRESIAEVQEMEKHRIESELEKQKGVVRPSMSQCSSLKKESGNGTLSRACLDDSYASGEGLKRSALSSSLRDLSEAGKRGRRSSAGSLESNVEFQPFEPLQPSVLCS

SEQ ID NO: 21035 - protein, 47 aa, Artificial Sequence
  Synthetic polypeptide
DRTAWELGTPGFRAHNASRARPPAVRLAHPWTAPQPTPRAPWCPVPA

SEQ ID NO: 21036 - protein, 47 aa, Artificial Sequence; identical to SEQ ID NO: 21035
  Synthetic polypeptide

SEQ ID NO: 21037 - protein, 47 aa, Artificial Sequence; identical to SEQ ID NO: 21035
  Synthetic polypeptide

SEQ ID NO: 21038 - protein, 918 aa, Artificial Sequence
  Synthetic polypeptide
SPQRVEGEAPSSETGTSLDSPSAYPQGPLVPGSSLSPDHYEHTSVGAYGLYSGPPGQQQRTRRPKLQHSTSILRKQAEEEAIKRSRSLSESYELSSDLQDKQVEMLERKYGGRLVTRHAARTIQTAFRQYQMNKNFERLRSSMSENRMSRRIVLSNMRMQFSFEGPEKVHSSYFEGKQVSVTNDGSQLGALVSPECGDLSEPTTLKSPAPSSDFADAITELEDAFSRQVKSLAESIDDALNCRSLHTEEAPALDAARARDTEPQTALHGMDHRKLDEMTASYSDVTLYIDEEELSPPLPLSQAGDRPSSTESDLRLRAGGAAPDYWALAHKEDKADTDTSCRSTPSLERQEQRLRVEHLPLLTIEPPSDSSVDLSDRSERGSLKRQSAYERSLGGQQGSPKHGPHSGAPKSLPREEPELRPRPPRPLDSHLAINGSANRQSKSESDYSDGDNDSINSTSNSNDTINCSSESSSRDSLREQTLSKQTYHKEARNSWDSPAFSNDVIRKRHYRIGLNLFNKKPEKGVQYLIERGFVPDTPVGVAHFLLQRKGLSRQMIGEFLGNRQKQFNRDVLDCVVDEMDFSTMELDEALRKFQAHIRVQGEAQKVERLIEAFSQRYCICNPGVVRQFRNPDTIFILAFAIILLNTDMYSPNVKPERKMKLEDFIKNLRGVDDGEDIPREMLMGIYERIRKRELKTNEDHVSQVQKVEKLIVGKKPIGSLHPGLGCVLSLPHRRLVCYCRLFEVPDPNKPQKLGLHQREIFLFNDLLVVTKIFQKKKNSVTYSFRQSFSLYGMQVLLFENQYYPNGIRLTSSVPGADIKVLINFNAPNPQDRKKFTDDLRESIAEVQEMEKHRIESELEKQKGVVRPSMSQCSSLKKESGNGTLSRACLDDSYASGEGLKRSALSSSLRDLSEAGVHH

SEQ ID NO: 21039 - protein, 1156 aa, Artificial Sequence
  Synthetic polypeptide
SPQRVEGEAPSSETGTSLDSPSAYPQGPLVPGSSLSPDHYEHTSVGAYGLYSGPPGQQQRTRRPKLQHSTSILRKQAEEEAIKRSRSLSESYELSSDLQDKQVEMLERKYGGRLVTRHAARTIQTAFRQYQMNKNFERLRSSMSENRMSRRIVLSNMRMQFSFEGPEKVHSSYFEGKQVSVTNDGSQLGALVSPECGDLSEPTTLKSPAPSSDFADAITELEDAFSRQVKSLAESIDDALNCRSLHTEEAPALDAARARDTEPQTALHGMDHRKLDEMTASYSDVTLYIDEEELSPPLPLSQAGDRPSSTESDLRLRAGGAAPDYWALAHKEDKADTDTSCRSTPSLERQEQRLRVEHLPLLTIEPPSDSSVDLSDRSERGSLKRQSAYERSLGGQQGSPKHGPHSGAPKSLPREEPELRPRPPRPLDSHLAINGSANRQSKSESDYSDGDNDSINSTSNSNDTINCSSESSSRDSLREQTLSKQTYHKEARNSWDSPAFSNDVIRKRHYRIGLNLFNKKPEKGVQYLIERGFVPDTPVGVAHFLLQRKGLSRQMIGEFLGNRQKQFNRDVLDCVVDEMDFSTMELDEALRKFQAHIRVQGEAQKVERLIEAFSQRYCICNPGVVRQFRNPDTIFILAFAIILLNTDMYSPNVKPERKMKLEDFIKNLRGVDDGEDIPREMLMGIYERIRKRELKTNEDHVSQVQKVEKLIVGKKPIGSLHPGLGCVLSLPHRRLVCYCRLFEVPDPNKPQKLGLHQREIFLFNDLLVVTKIFQKKKNSVTYSFRQSFSLYGMQVLLFENQYYPNGIRLTSSVPGADIKVLINFNAPNPQDRKKFTDDLRESIAEVQEMEKHRIESELEKQKGVVRPSMSQCSSLKKESGNGTLSRACLDDSYASGEGLKRSALSSSLRDLSEAGKRGRRSSAGSLESNVEGSIISSPHMRRRATSTRECPSRPHQTMPNSSSLLGSLFGSKRGKPPPQAHLPSAPALATPPPTGGPASLAALCGWPPPGAPRGAAAGRHARASHPVLPHAEPSPVPPSPPPPPTPAHPARTPVPPRPPWGPPSLRGPCPRPPAAALGPRGAHSAPPWAAPCPAAPHQQQGQTQRHQHNCVDSLGRGPRLPETPAHHTGHARGSPAAHQTRGTSVAISPLCPSRPN

SEQ ID NO: 21040 - protein, 389 aa, Artificial Sequence
  Synthetic polypeptide
PCLPAESSDFLLFPKPDASFHSFCPWTSESRFFGLWTLGLASVASWGLSDLQPQTEACTCIVWDWDSNGKHDFIGEFTSTFKEMRGAMEGKQVQWECINPKYKAKKKNYKNSGTVILNLCKIHKMHSFLDYIMGGCQIQFTVAIDFTASNGDPRNSCSLHYIHPYQPNEYLKALVAVGEICQDYDSDKMFPAFGFGARIPPEYTVSHDFAINFNEDNPECAGIQGVVEAYQSCLPKLQLYGPTNIAPIIQKVAKSASEETNTKEASQYFILLILTDGVITDMADTREAIVHASHLPMSVIIVGVGNADFSDMQMLDGDDGILRSPKGEPVLRDIVQFVPFRNFKHASPAALAKSVLAEVPNQVVDYYNGKGIKPKCSSEMYESSRTLAP

SEQ ID NO: 21041 - protein, 389 aa, Artificial Sequence; identical to SEQ ID NO: 21040
  Synthetic polypeptide

SEQ ID NO: 21042 - protein, 389 aa, Artificial Sequence; identical to SEQ ID NO: 21040
  Synthetic polypeptide

SEQ ID NO: 21043 - protein, 389 aa, Artificial Sequence; identical to SEQ ID NO: 21040
  Synthetic polypeptide

SEQ ID NO: 21044 - protein, 389 aa, Artificial Sequence; identical to SEQ ID NO: 21040
  Synthetic polypeptide

SEQ ID NO: 21045 - protein, 22 aa, Artificial Sequence
  Synthetic polypeptide
DLHQWLPGGSQTFSHRLKPALA

SEQ ID NO: 21046 - protein, 22 aa, Artificial Sequence
  Synthetic polypeptide
DLHQWLPGGSQTFSHRLKPALA

SEQ ID NO: 21047 - protein, 22 aa, Artificial Sequence
  Synthetic polypeptide
DLHQWLPGGSQTFSHRLKPALA

SEQ ID NO: 21048 - protein, 22 aa, Artificial Sequence
  Synthetic polypeptide
DLHQWLPGGSQTFSHRLKPALA

SEQ ID NO: 21049 - protein, 22 aa, Artificial Sequence
  Synthetic polypeptide
DLHQWLPGGSQTFSHRLKPALA

SEQ ID NO: 21050 - protein, 15 aa, Artificial Sequence
  Synthetic polypeptide
SLHLHSMGLGLQWQA

SEQ ID NO: 21051 - protein, 15 aa, Artificial Sequence
  Synthetic polypeptide
SLHLHSMGLGLQWQA

SEQ ID NO: 21052 - protein, 15 aa, Artificial Sequence
  Synthetic polypeptide
SLHLHSMGLGLQWQA

SEQ ID NO: 21053 - protein, 15 aa, Artificial Sequence
  Synthetic polypeptide
SLHLHSMGLGLQWQA

SEQ ID NO: 21054 - protein, 15 aa, Artificial Sequence
  Synthetic polypeptide
SLHLHSMGLGLQWQA

SEQ ID NO: 21055 - protein, 25 aa, Artificial Sequence
  Synthetic polypeptide
TPGRTWHLESGHLKLGVSAWRPKSH

SEQ ID NO: 21056 - protein, 25 aa, Artificial Sequence
  Synthetic polypeptide
TPGRTWHLESGHLKLGVSAWRPKSH

SEQ ID NO: 21057 - protein, 25 aa, Artificial Sequence
  Synthetic polypeptide
TPGRTWHLESGHLKLGVSAWRPKSH

SEQ ID NO: 21058 - protein, 25 aa, Artificial Sequence
  Synthetic polypeptide
TPGRTWHLESGHLKLGVSAWRPKSH

SEQ ID NO: 21059 - protein, 348 aa, Artificial Sequence
  Synthetic polypeptide
NLVFRHGDRSPIDTFPTDPIKESSWPQGFGQLTQLGMEQHYELGEYIRKRYRKFLNESYKHEQVYIRSTDVDRTLMSAMTNLAALFPPEGVSIWNPILLWQPIPVHTVPLSEDQLLYLPFRNCPRFQELESETLKSEEFQKRLHPYKDFIATLGKLSGLHGQDLFGIWSKVYDPLYCESVHNFTLPSWATEDTMTKLRELSELSLLSLYGIHKQKEKSRLQGGVLVNEILNHMKRATQIPSYKKLIMYSAHDTTVSGLQMALDVYNGLLPPYASCHLTELYFEKGEYFVEMYYRNETQHEPYPLMLPGCSPSCPLERFAELVGPVIPQDWSTECMTTNSHQGTEDSTD

SEQ ID NO: 21060 - protein, 68 aa, Artificial Sequence
  Synthetic polypeptide
ATRILRALPCRQLPQWNASPEQCMAGPCGGSTQRLNTRKDMALGVWTSETWCFGMETEVPLTPFPLTP

SEQ ID NO: 21061 - protein, 68 aa, Artificial Sequence; identical to SEQ ID NO: 21060
  Synthetic polypeptide

SEQ ID NO: 21062 - protein, 68 aa, Artificial Sequence; identical to SEQ ID NO: 21060
  Synthetic polypeptide

SEQ ID NO: 21063 - protein, 68 aa, Artificial Sequence; identical to SEQ ID NO: 21060
  Synthetic polypeptide

SEQ ID NO: 21064 - protein, 127 aa, Artificial Sequence
  Synthetic polypeptide
NLVFRHGDRSPIDTFPTDPIKESSWPQGFGQLTQVYIRSTDVDRTLMSAMTNLAALFPPEGVSIWNPILLWQPIPVHTVPLSEDQLLYLPFRNCPRFQELESETLKSEEFQKRLHPYKDFIATLGKL

SEQ ID NO: 21065 - protein, 315 aa, Artificial Sequence
  Synthetic polypeptide
NLVFRHGDRSPIDTFPTDPIKESSWPQGFGQLTQLGMEQHYELGEYIRKRYRKFLNESYKHEQVYIRSTDVDRTLMSAMTNLAALFPPEGVSIWNPILLWQPIPVHTVPLSEDQDFIATLGKLSGLHGQDLFGIWSKVYDPLYCESVHNFTLPSWATEDTMTKLRELSELSLLSLYGIHKQKEKSRLQGGVLVNEILNHMKRATQIPSYKKLIMYSAHDTTVSGLQMALDVYNGLLPPYASCHLTELYFEKGEYFVEMYYRNETQHEPYPLMLPGCSPSCPLERFAELVGPVIPQDWSTECMTTNSHQGTEDSTD

SEQ ID NO: 21066 - protein, 380 aa, Artificial Sequence
  Synthetic polypeptide
NLVFRHGDRSPIDTFPTDPIKESSWPQGFGQLTQLGMEQHYELGEYIRKRYRKFLNESYKHEQVYIRSTDVDRTLMSAMTNLAALFPPEGVSIWNPILLWQPIPVHTVPLSEDQLLYLPFRNCPRFQELESETLKSEEFQKRLHPYKDFIATLGKLSGLHGQDLFGIWSKVYDPLYCESVHNFTLPSWATEDTMTKLRELSELSLLSLYGIHKQKEKSRLQGGVLVNEILNHMKRATQIPSYKKLIMYSAHDTTVSGLQMALDVYNGLLPPYASCHLTELYFEKGEYFVEMYYRNETQHEPYPLMLPGCSPSCPLERFAELVGPVIPQDWSTECMTTNSHQVLKVIFAVAFCLISAVLMVLLFIHIRRGLCWQRESYGNI

SEQ ID NO: 21067 - protein, 20 aa, Artificial Sequence
  Synthetic polypeptide
SQLLGSLSWAWSSIMNLESI

SEQ ID NO: 21068 - protein, 20 aa, Artificial Sequence
  Synthetic polypeptide
SQLLGSLSWAWSSIMNLESI

SEQ ID NO: 21069 - protein, 20 aa, Artificial Sequence
  Synthetic polypeptide
SQLLGSLSWAWSSIMNLESI

SEQ ID NO: 21070 - protein, 341 aa, Artificial Sequence
  Synthetic polypeptide
NPLSTKNTKISQDWWWAPVIPATRESELGMEQHYELGEYIRKRYRKFLNESYKHEQVYIRSTDVDRTLMSAMTNLAALFPPEGVSIWNPILLWQPIPVHTVPLSEDQLLYLPFRNCPRFQELESETLKSEEFQKRLHPYKDFIATLGKLSGLHGQDLFGIWSKVYDPLYCESVHNFTLPSWATEDTMTKLRELSELSLLSLYGIHKQKEKSRLQGGVLVNEILNHMKRATQIPSYKKLIMYSAHDTTVSGLQMALDVYNGLLPPYASCHLTELYFEKGEYFVEMYYRNETQHEPYPLMLPGCSPSCPLERFAELVGPVIPQDWSTECMTTNSHQGTEDSTD

SEQ ID NO: 21071 - protein, 308 aa, Artificial Sequence
  Synthetic polypeptide
NPLSTKNTKISQDWWWAPVIPATRESELGMEQHYELGEYIRKRYRKFLNESYKHEQVYIRSTDVDRTLMSAMTNLAALFPPEGVSIWNPILLWQPIPVHTVPLSEDQDFIATLGKLSGLHGQDLFGIWSKVYDPLYCESVHNFTLPSWATEDTMTKLRELSELSLLSLYGIHKQKEKSRLQGGVLVNEILNHMKRATQIPSYKKLIMYSAHDTTVSGLQMALDVYNGLLPPYASCHLTELYFEKGEYFVEMYYRNETQHEPYPLMLPGCSPSCPLERFAELVGPVIPQDWSTECMTTNSHQGTEDSTD

SEQ ID NO: 21072 - protein, 373 aa, Artificial Sequence
  Synthetic polypeptide
NPLSTKNTKISQDWWWAPVIPATRESELGMEQHYELGEYIRKRYRKFLNESYKHEQVYIRSTDVDRTLMSAMTNLAALFPPEGVSIWNPILLWQPIPVHTVPLSEDQLLYLPFRNCPRFQELESETLKSEEFQKRLHPYKDFIATLGKLSGLHGQDLFGIWSKVYDPLYCESVHNFTLPSWATEDTMTKLRELSELSLLSLYGIHKQKEKSRLQGGVLVNEILNHMKRATQIPSYKKLIMYSAHDTTVSGLQMALDVYNGLLPPYASCHLTELYFEKGEYFVEMYYRNETQHEPYPLMLPGCSPSCPLERFAELVGPVIPQDWSTECMTTNSHQVLKVIFAVAFCLISAVLMVLLFIHIRRGLCWQRESYGNI

SEQ ID NO: 21073 - protein, 53 aa, Artificial Sequence
  Synthetic polypeptide
GQVRWLMPVIPALWKAEAGRSPEVRSSRPAWLTCCYTCLSGTALVFKNLRVRL

SEQ ID NO: 21074 - protein, 53 aa, Artificial Sequence; identical to SEQ ID NO: 21073
  Synthetic polypeptide

SEQ ID NO: 21075 - protein, 53 aa, Artificial Sequence; identical to SEQ ID NO: 21073
  Synthetic polypeptide

SEQ ID NO: 21076 - protein, 16 aa, Artificial Sequence
  Synthetic polypeptide
HVAIPAFQELPSFSRT

SEQ ID NO: 21077 - protein, 16 aa, Artificial Sequence
  Synthetic polypeptide
HVAIPAFQELPSFSRT

SEQ ID NO: 21078 - protein, 16 aa, Artificial Sequence
  Synthetic polypeptide
HVAIPAFQELPSFSRT

SEQ ID NO: 21079 - protein, 245 aa, Artificial Sequence
  Synthetic polypeptide
GQEFETSLANMLLYLPFRNCPRFQELESETLKSEEFQKRLHPYKDFIATLGKLSGLHGQDLFGIWSKVYDPLYCESVHNFTLPSWATEDTMTKLRELSELSLLSLYGIHKQKEKSRLQGGVLVNEILNHMKRATQIPSYKKLIMYSAHDTTVSGLQMALDVYNGLLPPYASCHLTELYFEKGEYFVEMYYRNETQHEPYPLMLPGCSPSCPLERFAELVGPVIPQDWSTECMTTNSHQGTEDSTD

SEQ ID NO: 21080 - protein, 53 aa, Artificial Sequence
  Synthetic polypeptide
GQEFETSLANMLLYLPFRNCPRFQELESETLKSEEFQKRLHPYKDFIATLGKL

SEQ ID NO: 21081 - protein, 277 aa, Artificial Sequence
  Synthetic polypeptide
GQEFETSLANMLLYLPFRNCPRFQELESETLKSEEFQKRLHPYKDFIATLGKLSGLHGQDLFGIWSKVYDPLYCESVHNFTLPSWATEDTMTKLRELSELSLLSLYGIHKQKEKSRLQGGVLVNEILNHMKRATQIPSYKKLIMYSAHDTTVSGLQMALDVYNGLLPPYASCHLTELYFEKGEYFVEMYYRNETQHEPYPLMLPGCSPSCPLERFAELVGPVIPQDWSTECMTTNSHQVLKVIFAVAFCLISAVLMVLLFIHIRRGLCWQRESYGNI

SEQ ID NO: 21082 - protein, 47 aa, Artificial Sequence
  Synthetic polypeptide
LTLVIPALWEAEARGSLESRKVQSNLLSPEGLSNICAQEKTTRFTSS

SEQ ID NO: 21083 - protein, 47 aa, Artificial Sequence; identical to SEQ ID NO: 21082
  Synthetic polypeptide

SEQ ID NO: 21084 - protein, 47 aa, Artificial Sequence; identical to SEQ ID NO: 21082
  Synthetic polypeptide

SEQ ID NO: 21085 - protein, 47 aa, Artificial Sequence; identical to SEQ ID NO: 21082
  Synthetic polypeptide

SEQ ID NO: 21086 - protein, 640 aa, Artificial Sequence
  Synthetic polypeptide
SQHFGRPRHVDHLRAGKSNPTFYLQKGFQTYVLRKKPPGSLLPKAHQIDREFKVQKALFSIGFPVPKPILYCSDTSVIGTEFYVMEHVQGRIFRDLTIPGLSPAERSAIYVATVETLAQLRSLNIQSLQLEGYGIGAGYCKRQVSTWTKQYQAAAHQDIPAMQQLSEWLMKNLPDNDNEENLIHGDFRLDNIVFHPKECRVIAVLDWELSTIGHPLSDLAHFSLFYFWPRTVPMINQGSYSENSGIPSMEELISIYCRCRGINSILPNWNFFLALSYFKMAGIAQGVYSRYLLGNNSSEDSFLFANIVQPLAETGLQLSKRTFSTVLPQIDTTGQLFVQTRKGQEVLIKVKHFMKQHILPAEKEVTEFYVQNENSVDKWGKPLVIDKLKEMAKVEGLWNLFLPAVSGLSHVDYALIAEETGKCFFAPDVFNCQAPDTGNMEVLHLYGSEEQKKQWLEPLLQGNITSCFCMTEPDVASSDATNIECSIQRDEDSYVINGKKWWSSGAGNPKCKIAIVLGRTQNTSLSREVVAHWIAESRIAIEKIRLLTLKAAHSMDTLGSAGAKKEIAMIKVAAPRAVSKIVDWAIQVCGGAGVSQDYPLANMYAITRVLRLADGPDEVHLSAIATMELRDQAKRLTAKI

SEQ ID NO: 21087 - protein, 744 aa, Artificial Sequence
  Synthetic polypeptide
SQHFGRPRHVDHLRAGKSNPTFYLQKGFQTYVLRKKPPGSLLPKAHQIDREFKVQKALFSIGFPVPKPILYCSDTSVIGTEFYVMEHVQGRIFRDLTIPGLSPAERSAIYVATVETLAQLRSLNIQSLQLEGYGIGAGYCKRQVSTWTKQYQAAAHQDIPAMQQLSEWLMKNLPDNDNEENLIHGDFRLDNIVFHPKECRVIAVLDWELSTIGHPLSDLAHFSLFYFWPRTVPMINQGSYSENSGIPSMEELISIYCRCRGINSILPNWNFFLALSYFKMAGIAQGVYSRYLLGNNSSEDSFLFANIVQPLAETGLQLSKRTFSTVLPQIDTTGQLFVQTRKGQEVLIKVKHFMKQHILPAEKEVTEFYVQNENSVDKWGKPLVIDKLKEMAKVEGLWNLFLPAVSGLSHVDYALIAEETGKCFFAPDVFNCQAPDTGNMEVLHLYGSEEQKKQWLEPLLQGNITSCFCMTEPDVASSDATNIECSIQRDEDSYVINGKKWWSSGAGNPKCKIAIVLGRTQNTSLSRHKQHSMILVPMNTPGVKIIRPLSVFGYTDNFHGGHFEIHFNQVRVPATNLILGEGRGFEISQGRLGPGRIHHCMRTVGLAERALQIMCERATQRIAFKKKLYAHEVVAHWIAESRIAIEKIRLLTLKAAHSMDTLGSAGAKKEIAMIKVAAPRAVSKIVDWAIQVCGGAGVSQDYPLANMYAITRVLRLADGPDEVHLSAIATMELRDQAKRLTAKI

SEQ ID NO: 21088 - protein, 397 aa, Artificial Sequence
  Synthetic polypeptide
SQHFGRPRHVDHLRAGKSNPTFYLQKGFQTYVLRKKPPGSLLPKAHQIDREFKVQKALFSIGFPVPKPILYCSDTSVIGTEFYVMEHVQGRIFRDLTIPGLSPAERSAIYVATVETLAQLRSLNIQSLQLEGYGIGAGYCKRQVSTWTKQYQAAAHQDIPAMQQLSEWLMKNLPDNDNEENLIHGDFRLDNIVFHPKECRVIAVLDWELSTIGHPLSDLAHFSLFYFWPRTVPMINQGSYSENSGIPSMEELISIYCRCRGINSILPNWNFFLALSYFKMAGIAQGVYSRYLLGNNSSEDSFLFANIVQPLAETGLQLSKRTFSTVLPQIDTTGQLFVQTRKGQEVLIKVKHFMKQHILPAEKTQGIWRFCTCMEVRNRRNSGLSLFFKGTLPLASV

SEQ ID NO: 21089 - protein, 440 aa, Artificial Sequence
  Synthetic polypeptide
SQHFGRPRHVDHLRAGKSNPTFYLQKGFQTYVLRKKPPGSLLPKAHQIDREFKVQKALFSIGFPVPKPILYCSDTSVIGTEFYVMEHVQGRIFRDLTIPGLSPAERSAIYVATVETLAQLRSLNIQSLQLEGYGIGAGYCKRQVSTWTKQYQAAAHQDIPAMQQLSEWLMKNLPDNDNEENLIHGDFRLDNIVFHPKECRVIAVLDWELSTIGHPLSDLAHFSLFYFWPRTVPMINQGSYSENSGIPSMEELISIYCRCRGINSILPNWNFFLALSYFKMAGIAQGVYSRYLLGNNSSEDSFLFANIVQPLAETGLQLSKRTFSTVLPQIDTTGQLFVQTRKGQEVLIKVKHFMKQHILPAEKEVTEFYVQNENSVDKWGKPLVIDKLKEMAKVEGLWNLFLPAVSGLSHVDYALIAEETGKCFFAPDVFNCQAPGYYIN

SEQ ID NO: 21090 - protein, 685 aa, Artificial Sequence
  Synthetic polypeptide
SGLCLAVPDKTVRWCAVSEHEATKCQSFRDHMKSVIPSDGPSVACVKKASYLDCIRAIAANEADAVTLDAGLVYDAYLAPNNLKPVVAEFYGSKEDPQTFYYAVAVVKKDSGFQMNQLRGKKSCHTGLGRSAGWNIPIGLLYCDLPEPRKPLEKAVANFFSGSCAPCADGTDFPQLCQLCPGCGCSTLNQYFGYSGAFKCLKDGAGDVAFVKHSTIFENLANKADRDQYELLCLDNTRKPVDEYKDCHLAQVPSHTVVARSMGGKEDLIWELLNQAQEHFGKDKSKEFQLFSSPHGKDLLFKDSAHGFLKVPPRMDAKMYLGYEYVTAIRNLREGTCPEAPTDECKPVKWCALSHHERLKCDEWSVNSVGKIECVSAETTEDCIAKIMNGEADAMSLDGGFVYIAGKCGLVPVLAENYNKSDNCEDTPEAGYFAIAVVKKSASDLTWDNLKGKKSCHTAVGRTAGWNIPMGLLYNKINHCRFDEFFSEGCAPGSKKDSSLCKLCMGSGLNLCEPNNKEGYYGYTGAFRCLVEKGDVAFVKHQTVPQNTGGKNPDPWAKNLNEKDYELLCLDGTRKPVEEYANCHLARAPNHAVVTRKDKEACVHKILRQQQHLFGSNVTDCSGNFCLFRSETKDLLFRDDTVCLAKLHDRNTYEKYLGEEYVKAVGNLRKCSTSSLLEACTFRRP

SEQ ID NO: 21091 - protein, 11 aa, Artificial Sequence
  Synthetic polypeptide
AGCVWLSLIKL

SEQ ID NO: 21092 - protein, 11 aa, Artificial Sequence
  Synthetic polypeptide
AGCVWLSLIKL

SEQ ID NO: 21093 - protein, 11 aa, Artificial Sequence
  Synthetic polypeptide
AGCVWLSLIKL

SEQ ID NO: 21094 - protein, 11 aa, Artificial Sequence
  Synthetic polypeptide
AGCVWLSLIKL

SEQ ID NO: 21095 - protein, 102 aa, Artificial Sequence
  Synthetic polypeptide
SGLCLAVPDKTVRWCAVSEHEATKCQSFRDHMKSVIPSDGPSVACVKKASYLDCIRAIAVSRCCLKESGRKPYFLCFQSLWNNSLLTGKRSGCCDTGCRFGV

SEQ ID NO: 21096 - protein, 107 aa, Artificial Sequence
  Synthetic polypeptide
SGLCLAVPDKTVRWCAVSEHEATKCQSFRDHMKSVIPSDGPSVACVKKASYLDCIRAIAANEADAVTLDAGLVYDAYLAPNNLKPVVAEFYGSKEDFLLCCCCGEEG

SEQ ID NO: 21097 - protein, 89 aa, Artificial Sequence
  Synthetic polypeptide
SGLCLAVPDKTVRWCAVSEHEATKCQSFRDHMKSVIPSDGPFSYRRGPKYGRQGGLDLGASQPGPGTFWQRQIKRIPTIQLSSWEGPAV

SEQ ID NO: 21098 - protein, 39 aa, Artificial Sequence
  Synthetic polypeptide
KKKKASFSESHSLFSKRWQFLPRWFSIVEGCVWLSLIKL

SEQ ID NO: 21099 - protein, 39 aa, Artificial Sequence; identical to SEQ ID NO: 21098
  Synthetic polypeptide

SEQ ID NO: 21100 - protein, 39 aa, Artificial Sequence; identical to SEQ ID NO: 21098
  Synthetic polypeptide

SEQ ID NO: 21101 - protein, 39 aa, Artificial Sequence; identical to SEQ ID NO: 21098
  Synthetic polypeptide

SEQ ID NO: 21102 - protein, 8 aa, Artificial Sequence
  Synthetic polypeptide
LRAVSGCP

SEQ ID NO: 21103 - protein, 8 aa, Artificial Sequence
  Synthetic polypeptide
LRAVSGCP

SEQ ID NO: 21104 - protein, 8 aa, Artificial Sequence
  Synthetic polypeptide
LRAVSGCP

SEQ ID NO: 21105 - protein, 8 aa, Artificial Sequence
  Synthetic polypeptide
LRAVSGCP

SEQ ID NO: 21106 - protein, 9 aa, Artificial Sequence
  Synthetic polypeptide
TTRLCGPLE

SEQ ID NO: 21107 - protein, 9 aa, Artificial Sequence
  Synthetic polypeptide
TTRLCGPLE

SEQ ID NO: 21108 - protein, 9 aa, Artificial Sequence
  Synthetic polypeptide
TTRLCGPLE

SEQ ID NO: 21109 - protein, 38 aa, Artificial Sequence
  Synthetic polypeptide
LSEQWDNKFLLFKLLVCVGLWSDAVGTHDSGPDSLRGH

SEQ ID NO: 21110 - protein, 38 aa, Artificial Sequence; identical to SEQ ID NO: 21109
  Synthetic polypeptide

SEQ ID NO: 21111 - protein, 38 aa, Artificial Sequence; identical to SEQ ID NO: 21109
  Synthetic polypeptide

SEQ ID NO: 21112 - protein, 123 aa, Artificial Sequence
  Synthetic polypeptide
ARKDSPYRFPGKHSHADTLIWTSSYQSSGTINFCCLNYSFVWAFGVTLWELMTLGQTPYVDIDPFEMAAYLKDGYRIAQPINCPDELFAVMACCWALDPEERPKFQQLVQCLTEFHAALGAYV

SEQ ID NO: 21113 - protein, 123 aa, Artificial Sequence; identical to SEQ ID NO: 21112
  Synthetic polypeptide

SEQ ID NO: 21114 - protein, 123 aa, Artificial Sequence; identical to SEQ ID NO: 21112
  Synthetic polypeptide

SEQ ID NO: 21115 - protein, 39 aa, Artificial Sequence
  Synthetic polypeptide
SSTRCPLHRSHHAPSQCHYEEHHLVMATAGAAQWHHPGL

SEQ ID NO: 21116 - protein, 556 aa, Artificial Sequence
  Synthetic polypeptide
PPPDAPSTVPIMHQVSATMRSITLSWPQPEQPNGIILDYEIRYYEKEHNEFNSSMARSQTNTARIDGLRPGMVYVVQVRARTVAGYGKFSGKMCFQTLTDDDYKSELREQLPLIAGSAAAGVVFVVSLVAISIVCSRKRAYSKEAVYSDKLQHYSTGRGSPGMKIYIDPFTYEDPNEAVREFAKEIDVSFVKIEEVIGAGEFGEVYKGRLKLPGKREIYVAIKTLKAGYSEKQRRDFLSEASIMGQFDHPNIIRLEGVVTKSRPVMIITEFMENGALDSFLRQNDGQFTVIQLVGMLRGIAAGMKYLAEMNYVHRDLAARNILVNSNLVCKVSDFGLSRYLQDDTSDPTYTSSLGGKIPVRWTAPEAIAYRKFTSASDVWSYGIVMWEVMSFGERPYWDMSNQDVINAIEQDYRLPPPMDCPAALHQLMLDCWQKDRNSRPRFAEIVNTLDKMIRNPASLKTVATITAVPSQPLLDRSIPDFTAFTTVDDWLSAIKMVQYRDSFLTAGFTSLQLVTQMTSEDLLRIGITLAGHQKKILNSIHSMRVQISQSPTAMA

SEQ ID NO: 21117 - protein, 18 aa, Artificial Sequence
  Synthetic polypeptide
LHQMPPPPFPSCTKSVPL

SEQ ID NO: 21118 - protein, 42 aa, Artificial Sequence
  Synthetic polypeptide
GLLREVIDSRAGQGKNKMRQEHFVMKWPFCLPLRTSLYSQPT

SEQ ID NO: 21119 - protein, 298 aa, Artificial Sequence
  Synthetic polypeptide
FQGWAGKKQDETRAFCDEVAILPAPQNLSVLSTNMKHLLMWSPVIAPGETVYYSVEYQGEYESLYTSHIWIPSSWCSLTEGPECDVTDDITATVPYNLRVRATLGSQTSAWSILKHPFNRNSTILTRPGMEITKDGFHLVIELEDLGPQFEFLVAYWRREPGAEEHVKMVRSGGIPVHLETMEPGAAYCVKAQTFVKAIGRYSAFSQTECVEVQGEAIPLVLALFAFVGFMLILVVVPLFVWKMGRLLQYSCCPVVVLPDTLKITNSPQKLISCRREEVDACATAVMSPEELLRAWIS

SEQ ID NO: 21120 - protein, 16 aa, Artificial Sequence
  Synthetic polypeptide
SQHFGRPRFLVRFRKL

SEQ ID NO: 21121 - protein, 16 aa, Artificial Sequence
  Synthetic polypeptide
SQHFGRPRFLVRFRKL

SEQ ID NO: 21122 - protein, 16 aa, Artificial Sequence
  Synthetic polypeptide
SQHFGRPRFLVRFRKL

SEQ ID NO: 21123 - protein, 19 aa, Artificial Sequence
  Synthetic polypeptide
RGAVAHTYNPSTLGGRGSW

SEQ ID NO: 21124 - protein, 19 aa, Artificial Sequence
  Synthetic polypeptide
RGAVAHTYNPSTLGGRGSW

SEQ ID NO: 21125 - protein, 19 aa, Artificial Sequence
  Synthetic polypeptide
RGAVAHTYNPSTLGGRGSW

SEQ ID NO: 21126 - protein, 407 aa, Artificial Sequence
  Synthetic polypeptide
GVQWLTPIIPALWEAEVLGEIQEIVKTGLWVGDCFIYTSSVNRLNYYVGGEIVTIAHLDRTMYLLGYIPKDNRLYLGDKELNIISYSLLVSVLEYQTAVMRRDFSMADKVLPTIPKEQRTRVAHFLEKQGFKQQALTVSTDPEHRFELALQLGELKIAYQLAVEAESEQKWKQLAELAISKCQFGLAQECLHHAQDYGGLLLLATASGNANMVNKLAEGAERDGKNNVAFMSYFLQGKVDACLELLIRTGRLPEAAFLARTYLPSQVSRVVKLWRENLSKVNQKAAESLADPTEYENLFPGLKEAFVVEEWVKETHADLWPAKQYPLVTPNEERNVMEEGKDFQPSRSTAQQELDGKPASPTPVIVASHTANKEEKSLLELEVDLDNLELEDIDTTDINLDEDILDD

SEQ ID NO: 21127 - protein, 407 aa, Artificial Sequence; identical to SEQ ID NO: 21126
  Synthetic polypeptide

SEQ ID NO: 21128 - protein, 55 aa, Artificial Sequence
  Synthetic polypeptide
GVQWLTPIIPALWEAEVLGEIQEIVKTGLWVDLDNLELEDIDTTDINLDEDILDD

SEQ ID NO: 21129 - protein, 53 aa, Artificial Sequence
  Synthetic polypeptide
YISLSRWPVLFICDICVVTLPSSLRAGHCLSGAQLSPSMWLLLSGSSGRKHHL

SEQ ID NO: 21130 - protein, 340 aa, Artificial Sequence
  Synthetic polypeptide
GQGIACQVHSCLLACGFSSVVALGASIICNKIPGLAPRQRAICQSRPDAIIVIGEGSQMGLDECQFQFRNGRWNCSALGERTVFGKELKVGSREAAFTYAIIAAGVAHAITAACTQGNLSDCGCDKEKQGQYHRDEGWKWGGCSADIRYGIGFAKVFVDAREIKQNARTLMNLHNNEAGRKILEENMKLECKCHGVSGSCTTKTCWTTLPQFRELGYVLKDKYNEAVHVEPVRASRNKRPTFLKIKKPLSYRKPMDTDLVYIEKSPNYCEEDPVTGSVGTQGRACNKTAPQASGCDLMCCGRGYNTHQYARVWQCNCKFHWCCYVKCNTCSERTEMYTCK

SEQ ID NO: 21131 - protein, 7 aa, Artificial Sequence
  Synthetic polypeptide
HVASPQW

SEQ ID NO: 21132 - protein, 69 aa, Artificial Sequence
  Synthetic polypeptide
RFSETLWKAPSTVPGTWQTTVSWDGDKLQCVQKGEKEGRGWTQWIEGDELHLEMRVEGVVCKQVFKKVQ

SEQ ID NO: 21133 - protein, 21 aa, Artificial Sequence
  Synthetic polypeptide
EDLVKHCGKLPAQYLAPGRQQ

SEQ ID NO: 21134 - protein, 30 aa, Artificial Sequence
  Synthetic polypeptide
NIVESSQHSTWHLADNSELGRRQAPVCAEG

SEQ ID NO: 21135 - protein, 41 aa, Artificial Sequence
  Synthetic polypeptide
TSGLSLHICKMMRSIPALGGCQESTDNSELGRRQAPVCAEG

SEQ ID NO: 21136 - protein, 58 aa, Artificial Sequence
  Synthetic polypeptide
EVVRSQLTTVSWDGDKLQCVQKGEKEGRGWTQWIEGDELHLEMRVEGVVCKQVFKKVQ

SEQ ID NO: 21137 - protein, 90 aa, Artificial Sequence
  Synthetic polypeptide
TAVCFSDQHCSSTSHPREALFSLWWELLLLNLLGPGGAANHSTLSLLGRAPSDRVITVSRGLSHTCVCGPSWASHHFLGVNLGTLRDRQQ

SEQ ID NO: 21138 - protein, 18 aa, Artificial Sequence
  Synthetic polypeptide
ETDNSELGRRQAPVCAEG

SEQ ID NO: 21139 - protein, 58 aa, Artificial Sequence
  Synthetic polypeptide
FRNPERQTTVSWDGDKLQCVQKGEKEGRGWTQWIEGDELHLEMRVEGVVCKQVFKKVQ

SEQ ID NO: 21140 - protein, 40 aa, Artificial Sequence
  Synthetic polypeptide
KYPAAKKVLTRCSSLILAFSASINCWVSTAIGCCSGQLCS

SEQ ID NO: 21141 - protein, 40 aa, Artificial Sequence; identical to SEQ ID NO: 21140
  Synthetic polypeptide

SEQ ID NO: 21142 - protein, 65 aa, Artificial Sequence
  Synthetic polypeptide
SWPSQPPLTVGYLQPLVAVQVSFAPNNTGKEVTVECKIDGSANLKSQDDRDKFLGRVMFKITARA

SEQ ID NO: 21143 - protein, 65 aa, Artificial Sequence; identical to SEQ ID NO: 21142
  Synthetic polypeptide

SEQ ID NO: 21144 - protein, 46 aa, Artificial Sequence
  Synthetic polypeptide
AINFCDYKHTTETNQFRKCSDWESIYPCTSNGYSDTHSRSYWLGPW

SEQ ID NO: 21145 - protein, 46 aa, Artificial Sequence; identical to SEQ ID NO: 21144
  Synthetic polypeptide

SEQ ID NO: 21146 - protein, 46 aa, Artificial Sequence; identical to SEQ ID NO: 21144
  Synthetic polypeptide

SEQ ID NO: 21147 - protein, 46 aa, Artificial Sequence; identical to SEQ ID NO: 21144
  Synthetic polypeptide

SEQ ID NO: 21148 - protein, 46 aa, Artificial Sequence; identical to SEQ ID NO: 21144
  Synthetic polypeptide

SEQ ID NO: 21149 - protein, 46 aa, Artificial Sequence; identical to SEQ ID NO: 21144
  Synthetic polypeptide

SEQ ID NO: 21150 - protein, 46 aa, Artificial Sequence; identical to SEQ ID NO: 21144
  Synthetic polypeptide

SEQ ID NO: 21151 - protein, 46 aa, Artificial Sequence; identical to SEQ ID NO: 21144
  Synthetic polypeptide

SEQ ID NO: 21152 - protein, 46 aa, Artificial Sequence; identical to SEQ ID NO: 21144
  Synthetic polypeptide

SEQ ID NO: 21153 - protein, 46 aa, Artificial Sequence; identical to SEQ ID NO: 21144
  Synthetic polypeptide

SEQ ID NO: 21154 - protein, 46 aa, Artificial Sequence; identical to SEQ ID NO: 21144
  Synthetic polypeptide

SEQ ID NO: 21155 - protein, 46 aa, Artificial Sequence; identical to SEQ ID NO: 21144
  Synthetic polypeptide

SEQ ID NO: 21156 - protein, 388 aa, Artificial Sequence
  Synthetic polypeptide
ISVIISTPQRLTSSGSVLIGSPYTPAPAMVTQTHIAEATGWVPGDRKRARKFIDSDFSESKRSKKGDKNGKGLRHFSMKVCEKVQRKGTTSYNEVADELVSEFTNSNNHLAADSQAYDQKNIRRRVYDALNVLMAMNIISKEKKEIKWIGLPTNSAQECQNLEIEKQRRIERIKQKRAQLQELLLQQIAFKNLVQRNRQNEQQNQGPPALNSTIQLPFIIINTSRKTVIDCSISSDKFEYLFNFDNTFEIHDDIEVLKRMGMSFGLESGKCSLEDLKLAKSLVPKALEGYITDISTGPSWLNQGLLLNSTQSVSNLDLTTGATLPQSSVNQGLCLDAEVALATGQFLAPNSHQSSSAASHCSESRGETPCSFNDEDEEDDEEDSSSPE

SEQ ID NO: 21157 - protein, 388 aa, Artificial Sequence; identical to SEQ ID NO: 21156
  Synthetic polypeptide

SEQ ID NO: 21158 - protein, 388 aa, Artificial Sequence; identical to SEQ ID NO: 21156
  Synthetic polypeptide

SEQ ID NO: 21159 - protein, 388 aa, Artificial Sequence; identical to SEQ ID NO: 21156
  Synthetic polypeptide

SEQ ID NO: 21160 - protein, 387 aa, Artificial Sequence
  Synthetic polypeptide
ISVIISTPQRLTSSGSVLIGSPYTPAPAMVTQTHIAEATGWVPGDRKRARKFIDSDFSESKRSKKGDKNGKGLRHFSMKVCEKVQRKGTTSYNEVADELVSEFTNSNNHLAADSAYDQKNIRRRVYDALNVLMAMNIISKEKKEIKWIGLPTNSAQECQNLEIEKQRRIERIKQKRAQLQELLLQQIAFKNLVQRNRQNEQQNQGPPALNSTIQLPFIIINTSRKTVIDCSISSDKFEYLFNFDNTFEIHDDIEVLKRMGMSFGLESGKCSLEDLKLAKSLVPKALEGYITDISTGPSWLNQGLLLNSTQSVSNLDLTTGATLPQSSVNQGLCLDAEVALATGQFLAPNSHQSSSAASHCSESRGETPCSFNDEDEEDDEEDSSSPE

SEQ ID NO: 21161 - protein, 387 aa, Artificial Sequence; identical to SEQ ID NO: 21160
  Synthetic polypeptide

SEQ ID NO: 21162 - protein, 387 aa, Artificial Sequence; identical to SEQ ID NO: 21160
  Synthetic polypeptide

SEQ ID NO: 21163 - protein, 372 aa, Artificial Sequence
  Synthetic polypeptide
ISVIISTPQRLTSSGSVLIGSPYTPAPAMVTQTHIAEATGWVPGKRSKKGDKNGKGLRHFSMKVCEKVQRKGTTSYNEVADELVSEFTNSNNHLAADSQAYDQKNIRRRVYDALNVLMAMNIISKEKKEIKWIGLPTNSAQECQNLEIEKQRRIERIKQKRAQLQELLLQQIAFKNLVQRNRQNEQQNQGPPALNSTIQLPFIIINTSRKTVIDCSISSDKFEYLFNFDNTFEIHDDIEVLKRMGMSFGLESGKCSLEDLKLAKSLVPKALEGYITDISTGPSWLNQGLLLNSTQSVSNLDLTTGATLPQSSVNQGLCLDAEVALATGQFLAPNSHQSSSAASHCSESRGETPCSFNDEDEEDDEEDSSSPE

SEQ ID NO: 21164 - protein, 250 aa, Artificial Sequence
  Synthetic polypeptide
ISVIISTPQRLTSSGSVLIGSPYTPAPAMVTQTHIAEATGWVPGDRKRARKFIDSDFSESKRSKKGDKNGKGLRHFSMKVCEKVQRKGTTSYNEVADELVSEFTNSNNHLAADSQAYDQKNIRRRVYDALNVLMAMNIISKEKKEIKWIGLPTNSAQECQNLEIEKQRRIERIKQKRAQLQELLLQQIAFKNLVQRNRQNEQQNQGPPALNSTIQLPFIIINTSRKTVIDCSISSDKFEYLFNFDNTFEI

SEQ ID NO: 21165 - protein, 222 aa, Artificial Sequence
  Synthetic polypeptide
ISVIISTPQRLTSSGSVLIGSPYTPAPAMVTQTHIAEATGWVPGDRKRARKFIDSDFSESKRSKKGDKNGKGLRHFSMKVCEKVQRKGTTSYNEVADELVSEFTNSNNHLAADSAYDQKNIRRRVYDALNVLMAMNIISKEKKEIKWIGLPTNSAQECQNLEIEKQRRIERIKQKRAQLQELLLQQIAFKNLVQRNRQNEQQNQGPPALNSTIQLPFIIINT

SEQ ID NO: 21166 - protein, 91 aa, Artificial Sequence
  Synthetic polypeptide
ISVIISTPQRLTSSGSVLIGSPYTPAPAMVTQTHIAEATGWVPGDRKRARKFIDSDFSESKRSKKGDKNGKGLRHFSMKVCEKVQRKGTTS

SEQ ID NO: 21167 - protein, 48 aa, Artificial Sequence
  Synthetic polypeptide
ISVIISTPQRLTSSGSVLIGSPYTPAPAMVTQTHIAEATGWVPGDRKR

SEQ ID NO: 21168 - protein, 31 aa, Artificial Sequence
  Synthetic polypeptide
AINFCDYKHTTETNQFRKCSDWESIYPCTSN

SEQ ID NO: 21169 - protein, 29 aa, Artificial Sequence
  Synthetic polypeptide
ISVIISTPQRLTSSGSVLIGSPYTPAPAM

SEQ ID NO: 21170 - protein, 29 aa, Artificial Sequence
  Synthetic polypeptide
AINFCDYKHTTETNQFRKCSDWESIYPCT

SEQ ID NO: 21171 - protein, 26 aa, Artificial Sequence
  Synthetic polypeptide
ISVIISTPQRLTSSGSVLIGSPYTPA

SEQ ID NO: 21172 - protein, 37 aa, Artificial Sequence
  Synthetic polypeptide
SQHFGRLRQGDCLRPEVQDQLGQHDISQFLPSASLFH

SEQ ID NO: 21173 - protein, 37 aa, Artificial Sequence; identical to SEQ ID NO: 21172
  Synthetic polypeptide

SEQ ID NO: 21174 - protein, 37 aa, Artificial Sequence; identical to SEQ ID NO: 21172
  Synthetic polypeptide

SEQ ID NO: 21175 - protein, 37 aa, Artificial Sequence; identical to SEQ ID NO: 21172
  Synthetic polypeptide

SEQ ID NO: 21176 - protein, 175 aa, Artificial Sequence
  Synthetic polypeptide
GQKFKTSLGNMIFHSSCRVLHFFTRSKRLFTASLFTFTTQQTSLRLVWILQNLTEVQKAVEEENCCFGTIDTWLLYKLTKGSVYATDFSNASTTGLFDPYKMCWSGMITSLISIPLSLLPPVRDTSHNFGSVDEEIFGVPIPIVALLKVPGYDQNICYIFGKGTIEPVFYHGSTL

SEQ ID NO: 21177 - protein, 175 aa, Artificial Sequence; identical to SEQ ID NO: 21176
  Synthetic polypeptide

SEQ ID NO: 21178 - protein, 175 aa, Artificial Sequence; identical to SEQ ID NO: 21176
  Synthetic polypeptide

SEQ ID NO: 21179 - protein, 403 aa, Artificial Sequence
  Synthetic polypeptide
GQKFKTSLGNMIFHSSCRVLHFFTRSKRLFTASLFTFTTQQTSLRLVWILQNLTEVQKAVEEENCCFGTIDTWLLYKLTKGSVYATDFSNASTTGLFDPYKMCWSGMITSLISIPLSLLPPVRDTSHNFGSVDEEIFGVPIPIVALVADQQSAMFGECCFQTGDVKLTMGTGTFLDINTGNSLQQTTGGFYPLIGWKIGQEVVCLAESNAGDTGTAIKWAQQLDLFTDAAETEKMAKSLEDSEGVCFVPSFSGLQAPLNDPWACASFMGLKPSTSKYHLVRAILESIAFRNKQLYEMMKKEIHIPVRKIRADGGVCKNGFVMQMTSDLINENIDRPADIDMSCLGAASLAGLAVGFWTDKEELKKLRQSEVVFKPQKKCQEYEMSLENWAKAVKRSMNWYNKT

SEQ ID NO: 21180 - protein, 38 aa, Artificial Sequence
  Synthetic polypeptide
LDQDSSAACFWISDFPTWILVFFSKPTTSKHCLEADKL

SEQ ID NO: 21181 - protein, 38 aa, Artificial Sequence; identical to SEQ ID NO: 21180
  Synthetic polypeptide

SEQ ID NO: 21182 - protein, 38 aa, Artificial Sequence; identical to SEQ ID NO: 21180
  Synthetic polypeptide

SEQ ID NO: 21183 - protein, 137 aa, Artificial Sequence
  Synthetic polypeptide
VTSQPGFSFSSPSQPPANIAWKLTNSKLCLNWEHVKTMENESEVLGYKILYRQNRQSKTHILETNNTSAELLVPFEEDYLIEIRTVSDGGDGSSSEEIRIPKMSSLSSRGIQFLEPSTHFLSIVIVIFHCFAIQPLI

SEQ ID NO: 21184 - protein, 137 aa, Artificial Sequence; identical to SEQ ID NO: 21183
  Synthetic polypeptide

SEQ ID NO: 21185 - protein, 137 aa, Artificial Sequence; identical to SEQ ID NO: 21183
  Synthetic polypeptide

SEQ ID NO: 21186 - protein, 21 aa, Artificial Sequence
  Synthetic polypeptide
LPNLDSRFLLQANHQQTLPGS

SEQ ID NO: 21187 - protein, 21 aa, Artificial Sequence
  Synthetic polypeptide
LPNLDSRFLLQANHQQTLPGS

SEQ ID NO: 21188 - protein, 21 aa, Artificial Sequence
  Synthetic polypeptide
LPNLDSRFLLQANHQQTLPGS

SEQ ID NO: 21189 - protein, 25 aa, Artificial Sequence
  Synthetic polypeptide
LRCGCPKIQHLSPQLLTPGSVIDSG

SEQ ID NO: 21190 - protein, 9 aa, Artificial Sequence
  Synthetic polypeptide
PQGQLLTLD

SEQ ID NO: 21191 - protein, 15 aa, Artificial Sequence
  Synthetic polypeptide
NSTSESSASDPRVSY

SEQ ID NO: 21192 - protein, 3 aa, Artificial Sequence
  Synthetic polypeptide
YQD

SEQ ID NO: 21193 - protein, 3 aa, Artificial Sequence
  Synthetic polypeptide
YQD

SEQ ID NO: 21194 - protein, 3 aa, Artificial Sequence
  Synthetic polypeptide
YQD

SEQ ID NO: 21195 - protein, 3 aa, Artificial Sequence
  Synthetic polypeptide
YQD

SEQ ID NO: 21196 - protein, 3 aa, Artificial Sequence
  Synthetic polypeptide
YQD

SEQ ID NO: 21197 - protein, 3 aa, Artificial Sequence
  Synthetic polypeptide
YQD

SEQ ID NO: 21198 - protein, 3 aa, Artificial Sequence
  Synthetic polypeptide
YQD

SEQ ID NO: 21199 - protein, 77 aa, Artificial Sequence
  Synthetic polypeptide
NDDIKIKSLDEQCVVGKISKHWTGILREAFTDADNFGIQFPLDLDVKMKAVMIGACFLIDFMFFESTGSQEQKSGVW

SEQ ID NO: 21200 - protein, 77 aa, Artificial Sequence; identical to SEQ ID NO: 21199
  Synthetic polypeptide

SEQ ID NO: 21201 - protein, 77 aa, Artificial Sequence; identical to SEQ ID NO: 21199
  Synthetic polypeptide

SEQ ID NO: 21202 - protein, 32 aa, Artificial Sequence
  Synthetic polypeptide
LFFYLSRMMISRLNLLMNSVWLAKFPSTGLEF

SEQ ID NO: 21203 - protein, 32 aa, Artificial Sequence; identical to SEQ ID NO: 21202
  Synthetic polypeptide

SEQ ID NO: 21204 - protein, 32 aa, Artificial Sequence; identical to SEQ ID NO: 21202
  Synthetic polypeptide

SEQ ID NO: 21205 - protein, 32 aa, Artificial Sequence; identical to SEQ ID NO: 21202
  Synthetic polypeptide

SEQ ID NO: 21206 - protein, 32 aa, Artificial Sequence; identical to SEQ ID NO: 21202
  Synthetic polypeptide

SEQ ID NO: 21207 - protein, 63 aa, Artificial Sequence
  Synthetic polypeptide
NDDIKIKSLDEQCVVGKISKHWTGILREAFTDADNFGIQFPLDLDVKMKAVMIGACFLIDFMF

SEQ ID NO: 21208 - protein, 31 aa, Artificial Sequence
  Synthetic polypeptide
NDDIKIKSLDEQCVVGKISKHWTGILREAFT

SEQ ID NO: 21209 - protein, 11 aa, Artificial Sequence
  Synthetic polypeptide
NDDIKIKSLDE

SEQ ID NO: 21210 - protein, 18 aa, Artificial Sequence
  Synthetic polypeptide
LFFYLSRMMISRLNLLMN

SEQ ID NO: 21211 - protein, 8 aa, Artificial Sequence
  Synthetic polypeptide
NDDIKIKS

SEQ ID NO: 21212 - protein, 15 aa, Artificial Sequence
  Synthetic polypeptide
LFFYLSRMMISRLNL

SEQ ID NO: 21213 - protein, 28 aa, Artificial Sequence
  Synthetic polypeptide
PPDDIWQCLGDIFGCHNCRALLASKCPG

SEQ ID NO: 21214 - protein, 28 aa, Artificial Sequence
  Synthetic polypeptide
PPDDIWQCLGDIFGCHNCRALLASKCPG

SEQ ID NO: 21215 - protein, 114 aa, Artificial Sequence
  Synthetic polypeptide
PQMTFGNVWETSLVVITVELYWHLNALAKATVKELASLHGTKYTYGPGATTIYPAAGGSDDWAYDQGIRYSFTFELRDTGRYGFLLPESQIRATCEETFLAIKYVASYVLEHLY

SEQ ID NO: 21216 - protein, 114 aa, Artificial Sequence; identical to SEQ ID NO: 21215
  Synthetic polypeptide

SEQ ID NO: 21217 - protein, 85 aa, Artificial Sequence
  Synthetic polypeptide
AKIAPLHSSLGNRVRLRLRKKYLLDTSTWSECTEPKHIVEWNVSLFSILLALGGIEFILCLIQVINGVLGGICGFCCSHQQQYDC

SEQ ID NO: 21218 - protein, 85 aa, Artificial Sequence
  Synthetic polypeptide
SQHFGRLRQENGLNLGRRGCNEPRLRHCTPAWATESDSVSEKSTFWIPPHGPSALNPSTLWNGMYLCFLSSWLLVELNSSCVLFK

SEQ ID NO: 21219 - protein, 85 aa, Artificial Sequence; identical to SEQ ID NO: 21218
  Synthetic polypeptide

SEQ ID NO: 21220 - protein, 41 aa, Artificial Sequence
  Synthetic polypeptide
TWDVEVAMSQDCAIALQPGQQSQTPSQKKVPSGYLHMVRVH

SEQ ID NO: 21221 - protein, 41 aa, Artificial Sequence; identical to SEQ ID NO: 21220
  Synthetic polypeptide

SEQ ID NO: 21222 - protein, 41 aa, Artificial Sequence; identical to SEQ ID NO: 21220
  Synthetic polypeptide

SEQ ID NO: 21223 - protein, 89 aa, Artificial Sequence
  Synthetic polypeptide
AKIAPLHSSLGNRVRLRLRKKYLLDTSTWSECTEPKHIVEWNVSLFSILLALGGIEFILCLIQVINGVLGGICGFCCSHQQVRTCMKMS

SEQ ID NO: 21224 - protein, 33 aa, Artificial Sequence
  Synthetic polypeptide
AKIAPLHSSLGNRVRLRLRKKYLLDTSTWSECT

SEQ ID NO: 21225 - protein, 55 aa, Artificial Sequence
  Synthetic polypeptide
SQHFGRLRQENGLNLGRRGCNEPRLRHCTPAWATESDSVSEKSTFWIPPHGPSAL

SEQ ID NO: 21226 - protein, 16 aa, Artificial Sequence
  Synthetic polypeptide
MGVTATSTSQVQGLSQ

SEQ ID NO: 21227 - protein, 77 aa, Artificial Sequence
  Synthetic polypeptide
QQHPPHRFRDYLNDEALWNKCREPLNVVPWNLTLFSILLVVGGIQMVLCAIQVVNGLLGTLCGDCQCCGCCGGDGPV

SEQ ID NO: 21228 - protein, 44 aa, Artificial Sequence
  Synthetic polypeptide
YLSGFICEMNGSNSNIHLTGSGIISMMRPYGTSAESLSMWFPGI

SEQ ID NO: 21229 - protein, 58 aa, Artificial Sequence
  Synthetic polypeptide
QWLASCGPMDHILCCLFYVPVWSKLESGHLPSMQQLVQILDNEMKLNVHMDSIPHHRS

SEQ ID NO: 21230 - protein, 58 aa, Artificial Sequence; identical to SEQ ID NO: 21229
  Synthetic polypeptide

SEQ ID NO: 21231 - protein, 58 aa, Artificial Sequence; identical to SEQ ID NO: 21229
  Synthetic polypeptide

SEQ ID NO: 21232 - protein, 58 aa, Artificial Sequence; identical to SEQ ID NO: 21229
  Synthetic polypeptide

SEQ ID NO: 21233 - protein, 40 aa, Artificial Sequence
  Synthetic polypeptide
QAVVLWTISSAACFMYLCGLSWNLVTFHPCNNLFKFLTMK

SEQ ID NO: 21234 - protein, 40 aa, Artificial Sequence; identical to SEQ ID NO: 21233
  Synthetic polypeptide

SEQ ID NO: 21235 - protein, 40 aa, Artificial Sequence; identical to SEQ ID NO: 21233
  Synthetic polypeptide

SEQ ID NO: 21236 - protein, 40 aa, Artificial Sequence; identical to SEQ ID NO: 21233
  Synthetic polypeptide

SEQ ID NO: 21237 - protein, 22 aa, Artificial Sequence
  Synthetic polypeptide
VVSKLWSYGPYPLLLVLCTCVV

SEQ ID NO: 21238 - protein, 22 aa, Artificial Sequence
  Synthetic polypeptide
VVSKLWSYGPYPLLLVLCTCVV

SEQ ID NO: 21239 - protein, 22 aa, Artificial Sequence
  Synthetic polypeptide
VVSKLWSYGPYPLLLVLCTCVV

SEQ ID NO: 21240 - protein, 22 aa, Artificial Sequence
  Synthetic polypeptide
VVSKLWSYGPYPLLLVLCTCVV

SEQ ID NO: 21241 - protein, 97 aa, Artificial Sequence
  Synthetic polypeptide
SLILSTFPSSLISLLFYISLSYADFLLFSVPSYFLVFTFLFSPSKVFYSHESPLCLDVPVWSKLESGHLPSMQQLVQILDNEMKLNVHMDSIPHHRS

SEQ ID NO: 21242 - protein, 97 aa, Artificial Sequence; identical to SEQ ID NO: 21241
  Synthetic polypeptide

SEQ ID NO: 21243 - protein, 97 aa, Artificial Sequence; identical to SEQ ID NO: 21241
  Synthetic polypeptide

SEQ ID NO: 21244 - protein, 97 aa, Artificial Sequence; identical to SEQ ID NO: 21241
  Synthetic polypeptide

SEQ ID NO: 21245 - protein, 80 aa, Artificial Sequence
  Synthetic polypeptide
SFPPSHPPLYHSSSIFPSAMLIFSYFQCQATFWSLHFCSLPQRFSTLMNPHSVLMYLCGLSWNLVTFHPCNNLFKFLTMK

SEQ ID NO: 21246 - protein, 80 aa, Artificial Sequence; identical to SEQ ID NO: 21245
  Synthetic polypeptide

SEQ ID NO: 21247 - protein, 80 aa, Artificial Sequence; identical to SEQ ID NO: 21245
  Synthetic polypeptide

SEQ ID NO: 21248 - protein, 80 aa, Artificial Sequence; identical to SEQ ID NO: 21245
  Synthetic polypeptide

SEQ ID NO: 21249 - protein, 218 aa, Artificial Sequence
  Synthetic polypeptide
GWAQWLKPAIPALWEAVAGGSRGQEIETILANTYATTGCSLTLHHTEKPEHEDICEYRPYSCPCPGASCKWQGSLEAVMSHLMHAHKSITTLQGEDIVFLATDINLPGAVDWVMMQSCFGHHFMLVLEKQEKYEGHQQFFAIVLLIGTRKQAENFAYRLELNGNRRRLTWEATPRSIHDGVAAAIMNSDCLVFDTAIAHLFADNGNLGINVTISTCCP

SEQ ID NO: 21250 - protein, 40 aa, Artificial Sequence
  Synthetic polypeptide
AGHSGSSLQSQHFGRPWRVDHEVRRSRPSWLTRMPPRAVP

SEQ ID NO: 21251 - protein, 40 aa, Artificial Sequence; identical to SEQ ID NO: 21250
  Synthetic polypeptide

SEQ ID NO: 21252 - protein, 19 aa, Artificial Sequence
  Synthetic polypeptide
HVCHHGLFPDPAPYGETRT

SEQ ID NO: 21253 - protein, 19 aa, Artificial Sequence
  Synthetic polypeptide
HVCHHGLFPDPAPYGETRT

SEQ ID NO: 21254 - protein, 103 aa, Artificial Sequence
  Synthetic polypeptide
GWAQWLKPAIPALWEAVAGGSRGQEIETILANTYATTGCSLTLHHTEKPEHEDICEYRPYSCPCPGASCKWQGSLEAVMSHLMHAHKSITTLQGEDIVFLATD

SEQ ID NO: 21255 - protein, 158 aa, Artificial Sequence
  Synthetic polypeptide
KCVAPPPSLSCSCFHHVRLLAPPLPSAMIGSFLRPPQKQKLLCFLYILQNYEPIKPLFSINYSVSDSGEQVLVDVETKSNKEIMEHIRKILGKNEETLREEEEEKKQLSHPANFGPRKYCLRECICEVEGQVPCPSLVPLPKEMRGKYKAALKADAQD

SEQ ID NO: 21256 - protein, 83 aa, Artificial Sequence
  Synthetic polypeptide
ITQSQILGSRSWWMWRPRAIRRSWSTSEKSWGRMRKPSGKRRRRKSSFLTQPTSALESTACGSASVKWKGRCPAPAWCHYPRR

SEQ ID NO: 21257 - protein, 25 aa, Artificial Sequence
  Synthetic polypeptide
ASFLYKLLSLRFWGAGPGGCGDQEQ

SEQ ID NO: 21258 - protein, 25 aa, Artificial Sequence
  Synthetic polypeptide
ASFLYKLLSLRFWGAGPGGCGDQEQ

SEQ ID NO: 21259 - protein, 25 aa, Artificial Sequence
  Synthetic polypeptide
ASFLYKLLSLRFWGAGPGGCGDQEQ

SEQ ID NO: 21260 - protein, 25 aa, Artificial Sequence
  Synthetic polypeptide
ASFLYKLLSLRFWGAGPGGCGDQEQ

SEQ ID NO: 21261 - protein, 130 aa, Artificial Sequence
  Synthetic polypeptide
KCVAPPPSLSCSCFHHVRLLAPPLPSAMIGSFLRPPQKQKLLCFLYILQNYEPIKPLFSINYSVSDSGEQVLVDVETKSNKEIMEHIRKILGKNEHYLAAPSKPVSSAVVPVTQEAEAGGSLEPRRLRLE

SEQ ID NO: 21262 - protein, 66 aa, Artificial Sequence
  Synthetic polypeptide
ITQSQILGSRSWWMWRPRAIRRSWSTSEKSWGRMSTTWQHHLNLYHLLWSQLLRRLRQEDHLSPGG

SEQ ID NO: 21263 - protein, 95 aa, Artificial Sequence
  Synthetic polypeptide
KCVAPPPSLSCSCFHHVRLLAPPLPSAMIGSFLRPPQKQKLLCFLYILQNYEPIKPLFSINYSVSDSGEQVLVDVETKSNKEIMEHIRKILGKNE

SEQ ID NO: 21264 - protein, 95 aa, Artificial Sequence; identical to SEQ ID NO: 21263
  Synthetic polypeptide

SEQ ID NO: 21265 - protein, 35 aa, Artificial Sequence
  Synthetic polypeptide
ITQSQILGSRSWWMWRPRAIRRSWSTSEKSWGRMS

SEQ ID NO: 21266 - protein, 35 aa, Artificial Sequence; identical to SEQ ID NO: 21265
  Synthetic polypeptide

SEQ ID NO: 21267 - protein, 697 aa, Artificial Sequence
  Synthetic polypeptide
SLKKVNAIKDYKKLENAGGDLKDGHHHYEGAVVILDAGAQYGKVIDRRVRELFVQSEIFPLETPAFAIKEQGFRAIIISGGPNSVYAEDAPWFDPAIFTIGKPVLGICYGMQMMNKVFGGTVHKKSVREDGVFNISVDNTCSLFRGLQKEEVVLLTHGDSVDKVADGFKVVARSGNIVAGIANESKKLYGAQFHPEVGLTENGKVILKNFLYDIAGCSGTFTVQNRELECIREIKERVGTSKVLVLLSGGVDSTVCTALLNRALNQEQVIAVHIDNGFMRKRESQSVEEALKKLGIQVKVINAAHSFYNGTTTLPISDEDRTPRKRISKTLNMTTSPEEKRKIIGDTFVKIANEVIGEMNLKPEEVFLAQGTLRPDLIESASLVASGKAELIKTHHNDTELIRKLREEGKVIEPLKDFHKDEVRILGRELGLPEELVSRHPFPGPGLAIRVICAEEPYICKDFPETNNILKIVADFSASVKKPHTLLQRVKACTTEEDQEKLMQITSLHSLNAFLLPIKTVGVQGDCRSYSYVCGISSKDEPDWESLIFLARLIPRMCHNVNRVVYIFGPPVKEPPTDVTPTFLTTGVLSTLRQADFEAHNILRESGYAGKISQMPVILTPLHFDRDPLQKQPSCQRSVVIRTFITSDFMTGIPATPGNEIPVEVVLKMVTEIKKIPGISRIMYDLTSKPPGTTEWE

SEQ ID NO: 21268 - protein, 36 aa, Artificial Sequence
  Synthetic polypeptide
KTIKSWRMLEETLRMATTTMKELLSFWMLVLSTGKS

SEQ ID NO: 21269 - protein, 9 aa, Artificial Sequence
  Synthetic polypeptide
KAGECWRRP

SEQ ID NO: 21270 - protein, 19 aa, Artificial Sequence
  Synthetic polypeptide
ATLHGCGSGERQWDYREDG

SEQ ID NO: 21271 - protein, 57 aa, Artificial Sequence
  Synthetic polypeptide
IFNLSVNSNSLAAAAWSTGLRSPRWDGCSVGESSRTAKLHCTGAGVESGNGITERMG

SEQ ID NO: 21272 - protein, 37 aa, Artificial Sequence
  Synthetic polypeptide
GVPGGMGARWERALELLSYTARVREWRAAMGLPRGWD

SEQ ID NO: 21273 - protein, 479 aa, Artificial Sequence
  Synthetic polypeptide
ATLHGCGSGERQWDYREDGMDLGSDAGSSSSSSRASSQSNSTKVTPCSECKSSSSPGGSLDLVSALEDYEEPFPVYQKKVIDEWAPEEDGEEEEEEDERDQRGYRDDRSPAREPGDVSARTRSGGGGGRSATTAMPPPVPNGNLHQHDPQDLRHNGNVVVAGRPSCSRGPRRAIQKPQPAGGRRSGRGPAAGGLCLQPPDGGTCVPEEPPVPPMDWEALEKHLAGLQFREQEVRNQGQARTNSTSAQKNERESIRQKLALGSFFDDGPGIYTSCSKSGKPSLSSRLQSGMNLQICFVNDSGSDKDSDADDSKTETSLDTPLSPMSKQSSSYSDRDTTEEESESLDDMDFLTRQKKLQAEAKMALAMAKPMAKMQVEVEKQNRKKSPVADLLPHMPHISECLMKRSLKPTDLRDMTIGQLQVIVNDLHSQIESLNEELVQLLLIRDELHTEQDAMLVDIEDLTRHAESQQKHMAEKMPAK

SEQ ID NO: 21274 - protein, 479 aa, Artificial Sequence; identical to SEQ ID NO: 21273
  Synthetic polypeptide

SEQ ID NO: 21275 - protein, 479 aa, Artificial Sequence; identical to SEQ ID NO: 21273
  Synthetic polypeptide

SEQ ID NO: 21276 - protein, 59 aa, Artificial Sequence
  Synthetic polypeptide
IFNLSVNSNSLAAAAWSTGLRSPRWDGCSVGESSRTAKLHCTGAGVESGNGITERMGWI

SEQ ID NO: 21277 - protein, 59 aa, Artificial Sequence; identical to SEQ ID NO: 21276
  Synthetic polypeptide

SEQ ID NO: 21278 - protein, 59 aa, Artificial Sequence; identical to SEQ ID NO: 21276
  Synthetic polypeptide

SEQ ID NO: 21279 - protein, 59 aa, Artificial Sequence; identical to SEQ ID NO: 21276
  Synthetic polypeptide

SEQ ID NO: 21280 - protein, 59 aa, Artificial Sequence; identical to SEQ ID NO: 21276
  Synthetic polypeptide

SEQ ID NO: 21281 - protein, 59 aa, Artificial Sequence; identical to SEQ ID NO: 21276
  Synthetic polypeptide

SEQ ID NO: 21282 - protein, 59 aa, Artificial Sequence; identical to SEQ ID NO: 21276
  Synthetic polypeptide

SEQ ID NO: 21283 - protein, 41 aa, Artificial Sequence
  Synthetic polypeptide
GVPGGMGARWERALELLSYTARVREWRAAMGLPRGWDGSRQ

SEQ ID NO: 21284 - protein, 41 aa, Artificial Sequence; identical to SEQ ID NO: 21283
  Synthetic polypeptide

SEQ ID NO: 21285 - protein, 41 aa, Artificial Sequence; identical to SEQ ID NO: 21283
  Synthetic polypeptide

SEQ ID NO: 21286 - protein, 41 aa, Artificial Sequence; identical to SEQ ID NO: 21283
  Synthetic polypeptide

SEQ ID NO: 21287 - protein, 41 aa, Artificial Sequence; identical to SEQ ID NO: 21283
  Synthetic polypeptide

SEQ ID NO: 21288 - protein, 41 aa, Artificial Sequence; identical to SEQ ID NO: 21283
  Synthetic polypeptide

SEQ ID NO: 21289 - protein, 41 aa, Artificial Sequence; identical to SEQ ID NO: 21283
  Synthetic polypeptide

SEQ ID NO: 21290 - protein, 69 aa, Artificial Sequence
  Synthetic polypeptide
ATLHGCGSGERQWDYREDGMDLGSDAGSSSSSSRASSQSNSTKVTPCSECKSSSSPGGSLDLVSALEDY

SEQ ID NO: 21291 - protein, 101 aa, Artificial Sequence
  Synthetic polypeptide
ATLHGCGSGERQWDYREDGMDLGSDAGSSSSSSRASSQSNSTKVTPCSECKSSSSPGGSLDLVSALEDYEEPFPVYQKKVIDEWAPEEDGEEEEEEDERDQ

SEQ ID NO: 21292 - protein, 36 aa, Artificial Sequence
  Synthetic polypeptide
ATLHGCGSGERQWDYREDGMDLGSDAGSSSSSSRAS

SEQ ID NO: 21293 - protein, 466 aa, Artificial Sequence
  Synthetic polypeptide
ATLHGCGSGERQWDYREDGMDLGSDAGSSSSSSRASSQSNSTKVTPCSECKSSSSPGGSLDLVSALEDYEEPFPVYQKKVIDEWAPEEDGEEEEEEDERDQRGYRDDRSPAREPGDVSARTRSGGGGGRSATTAMPPPVPNGNLHQHDPQDLRHNGNVVVAGRPSCSRGPRRAIQKPQPAGGRRSGRGPAAGGLCLQPPDGGTCVPEEPPVPPMDWEALEKHLAGLQFREQEAQKNERESIRQKLALGSFFDDGPGIYTSCSKSGKPSLSSRLQSGMNLQICFVNDSGSDKDSDADDSKTETSLDTPLSPMSKQSSSYSDRDTTEEESESLDDMDFLTRQKKLQAEAKMALAMAKPMAKMQVEVEKQNRKKSPVADLLPHMPHISECLMKRSLKPTDLRDMTIGQLQVIVNDLHSQIESLNEELVQLLLIRDELHTEQDAMLVDIEDLTRHAESQQKHMAEKMPAK

SEQ ID NO: 21294 - protein, 1129 aa, Artificial Sequence
  Synthetic polypeptide
SLAGTLARCRNSQKILDEFYNVKFCIDASQPDVGSWLKYIRFAGCYDQHNLVACQINDQIFYRVVADIAPGEELLLFMKSEDYPHETMAPDIHEERQYRCEDCDQLFESKAELADHQKFPCSTPHSAFSMVEEDFQQKLESENDLQEIHTIQECKECDQVFPDLQSLEKHMLSHTEEREYKCDQCPKAFNWKSNLIRHQMSHDSGKHYECENCAKQVFTDPSNLQRHIRSQHVGARAHACPECGKTFATSSGLKQHKHIHSSVKPFICEVCHKSYTQFSNLCRHKRMHADCRTQIKCKDCGQMFSTTSSLNKHRRFCEGKNHFAAGGFFGQGISLPGTPAMDKTSMVNMSHANPGLADYFGANRHPAGLTFPTAPGFSFSFPGLFPSGLYHRPPLIPASSPVKGLSSTEQTNKSQSPLMTHPQILPATQDILKALSKHPSVGDNKPVELQPERSSEERPFEKISDQSESSDLDDVSTPSGSDLETTSGSDLESDIESDKEKFKENGKMFKDKVSPLQNLASINNKKEYSNHSIFSPSLEEQTAVSGAVNDSIKAIASIAEKYFGSTGLVGLQDKKVGALPYPSMFPLPFFPAFSQSMYPFPDRDLRSLPLKMEPQSPGEVKKLQKGSSESPFDLTTKRKDEKPLTPVPSKPPVTPATSQDQPLDLSMGSRSRASGTKLTEPRKNHVFGGKKGSNVESRPASDGSLQHARPTPFFMDPIYRVEKRKLTDPLEALKEKYLRPSPGFLFHPQFQLPDQRTWMSAIENMAEKLESFSALKPEASELLQSVPSMFNFRAPPNALPENLLRKGKERYTCRYCGKIFPRSANLTRHLRTHTGEQPYRCKYCDRSFSISSNLQRHVRNIHNKEKPFKCHLCDRCFGQQTNLDRHLKKHENGNMSGTATSSPHSELESTGAILDDKEDAYFTEIRNFIGNSNHGSQSPRNVEERMNGSHFKDEKALVTSQNSDLLDDEEVEDEVLLDEEDEDNDITGKTGKEPVTSNLHEGNPEDDYEETSALEMSCKTSPVRYKEEEYKSGLSALDHIRHFTDSLKMRKMEDNQYSEAELSSFSTSHVPEELKQPLHRKSKSQAYAMMLSLSDKESLHSTSHSSSNVWHSMARAAAESSAIQSISHV

SEQ ID NO: 21295 - protein, 13 aa, Artificial Sequence
  Synthetic polypeptide
LGLWHVAEILRRS

SEQ ID NO: 21296 - protein, 13 aa, Artificial Sequence
  Synthetic polypeptide
LGLWHVAEILRRS

SEQ ID NO: 21297 - protein, 49 aa, Artificial Sequence
  Synthetic polypeptide
GSAPSPFLLVISWDFGTLPKFSEDLRRILQCEVLHRCQSTRCWKLAQVH

SEQ ID NO: 21298 - protein, 49 aa, Artificial Sequence; identical to SEQ ID NO: 21297
  Synthetic polypeptide

SEQ ID NO: 21299 - protein, 1119 aa, Artificial Sequence
  Synthetic polypeptide
SLAGTLARCRNSQKILDEFYNVKFCIDASQPDVGSWLKYIRFAGCYDQHNLVACQINDQIFYRVVADIAPGEELLLFMKSEDYPHETMAPDIHEERQYRCEDCDQLFESKAELADHQKFPCSTPHSAFSMVEEDFQQKLESENDLQEIHTIQECKECDQVFPDLQSLEKHMLSHTEEREYKCDQCPKAFNWKSNLIRHQMSHDSGKHYECENCAKVFTDPSNLQRHIRSQHVGARAHACPECGKTFATSSGLKQHKHIHSSVKPFICEVCHKSYTQFSNLCRHKRMHADCRTQIKCKDCGQMFSTTSSLNKHRRFCEGKNHFAAGGFFGQGISLPGTPAMDKTSMVNMSHANPGLADYFGANRHPAGLTFPTAPGFSFSFPGLFPSGLYHRPPLIPASSPVKGLSSTEQTNKSQSPLMTHPQILPATQDILKALSKHPSVGDNKPVELQPERSSEERPFEKISDQSESSDLDDVSTPSGSDLETTSGSDLESDIESDKEKFKENGKMFKDKVSPLQNLASINNKKEYSNHSIFSPSLEEQTAVSGAVNDSIKAIASIAEKYFGSTGLVGLQDKKVGALPYPSMFPLPFFPAFSQSMYPFPDRDLRSLPLKMEPQSPGEVKKLQKGSSESPFDLTTKRKDEKPLTPVPSKPPVTPATSQDQPLDLSMGSRSRASGTKLTEPRKNHVFGGKKGSNVESRPASDGSLQHARPTPFFMDPIYRVEKRKLTDPLEALKEKYLRPSPGFLFHPQMSAIENMAEKLESFSALKPEASELLQSVPSMFNFRAPPNALPENLLRKGKERYTCRYCGKIFPRSANLTRHLRTHTGEQPYRCKYCDRSFSISSNLQRHVRNIHNKEKPFKCHLCDRCFGQQTNLDRHLKKHENGNMSGTATSSPHSELESTGAILDDKEDAYFTEIRNFIGNSNHGSQSPRNVEERMNGSHFKDEKALVTSQNSDLLDDEEVEDEVLLDEEDEDNDITGKTGKEPVTSNLHEGNPEDDYEETSALEMSCKTSPVRYKEEEYKSGLSALDHIRHFTDSLKMRKMEDNQYSEAELSSFSTSHVPEELKQPLHRKSKSQAYAMMLSLSDKESLHSTSHSSSNVWHSMARAAAESSAIQSISHV

SEQ ID NO: 21300 - protein, 329 aa, Artificial Sequence
  Synthetic polypeptide
GERRRRRRRAQTDAPSGMELQSWYPVIKQEGDHVSQTHSFLHPSYYLYMCDKVVAPNVSLTSAVSQSKELTKTEASKSISRQSEKAHSSGKLQKTVSYPDVSLEEQEKMDLKTSRELCSRLDASISNNSTSKRKSESATCNLVRDINKVGIGLVAAASSPLLVKDVICEDDKGKIMEEVMRTYLKQQEKLNLILQKKQQLQMEVKMLSSSKSMKELTEEQQNLQKELESLQNEHAQRMEEFYVEQKDLEKKLEQIMKQKCTCDSNLEKDKEAEYAGQLAELRQRLDHAEADRQELQDELRQEREARQKLEMMIKELKLQILKSSKTAKE

SEQ ID NO: 21301 - protein, 329 aa, Artificial Sequence; identical to SEQ ID NO: 21300
  Synthetic polypeptide

SEQ ID NO: 21302 - protein, 329 aa, Artificial Sequence; identical to SEQ ID NO: 21300
  Synthetic polypeptide

SEQ ID NO: 21303 - protein, 26 aa, Artificial Sequence
  Synthetic polypeptide
ASGDGGGGGHRQMHHQEWNYSHGILL

SEQ ID NO: 21304 - protein, 26 aa, Artificial Sequence
  Synthetic polypeptide
ASGDGGGGGHRQMHHQEWNYSHGILL

SEQ ID NO: 21305 - protein, 26 aa, Artificial Sequence
  Synthetic polypeptide
ASGDGGGGGHRQMHHQEWNYSHGILL

SEQ ID NO: 21306 - protein, 26 aa, Artificial Sequence
  Synthetic polypeptide
ASGDGGGGGHRQMHHQEWNYSHGILL

SEQ ID NO: 21307 - protein, 26 aa, Artificial Sequence
  Synthetic polypeptide
ASGDGGGGGHRQMHHQEWNYSHGILL

SEQ ID NO: 21308 - protein, 30 aa, Artificial Sequence
  Synthetic polypeptide
RAATAAAAGTDRCTIRNGITVMVSCYKAGR

SEQ ID NO: 21309 - protein, 30 aa, Artificial Sequence; identical to SEQ ID NO: 21308
  Synthetic polypeptide

SEQ ID NO: 21310 - protein, 30 aa, Artificial Sequence; identical to SEQ ID NO: 21308
  Synthetic polypeptide

SEQ ID NO: 21311 - protein, 30 aa, Artificial Sequence; identical to SEQ ID NO: 21308
  Synthetic polypeptide

SEQ ID NO: 21312 - protein, 30 aa, Artificial Sequence; identical to SEQ ID NO: 21308
  Synthetic polypeptide

SEQ ID NO: 21313 - protein, 283 aa, Artificial Sequence
  Synthetic polypeptide
GERRRRRRRAQTDAPSGMELQSWYPVIKQEGDHVSQTHSFLHPSYYLYMCDKVVAPNVSLTSAVSQSKELTKTEANASISNNSTSKRKSESATCNLVRDINKVGIGLVAAASSPLLVKDVICEDDKGKIMEEVMRTYLKQQEKLNLILQKKQQLQMEVKMLSSSKSMKELTEEQQNLQKELESLQNEHAQRMEEFYVEQKDLEKKLEQIMKQKCTCDSNLEKDKEAEYAGQLAELRQRLDHAEADRQELQDELRQEREARQKLEMMIKELKLQILKSSKTAKE

SEQ ID NO: 21314 - protein, 49 aa, Artificial Sequence
  Synthetic polypeptide
GERRRRRRRAQTDAPSGMELQSWYPVIKQEGDHVSQTHSFLHPRCINLK

SEQ ID NO: 21315 - protein, 330 aa, Artificial Sequence
  Synthetic polypeptide
FLNVSCFLICKMTDAPSGMELQSWYPVIKQEGDHVSQTHSFLHPSYYLYMCDKVVAPNVSLTSAVSQSKELTKTEASKSISRQSEKAHSSGKLQKTVSYPDVSLEEQEKMDLKTSRELCSRLDASISNNSTSKRKSESATCNLVRDINKVGIGLVAAASSPLLVKDVICEDDKGKIMEEVMRTYLKQQEKLNLILQKKQQLQMEVKMLSSSKSMKELTEEQQNLQKELESLQNEHAQRMEEFYVEQKDLEKKLEQIMKQKCTCDSNLEKDKEAEYAGQLAELRQRLDHAEADRQELQDELRQEREARQKLEMMIKELKLQILKSSKTAKE

SEQ ID NO: 21316 - protein, 330 aa, Artificial Sequence; identical to SEQ ID NO: 21315
  Synthetic polypeptide

SEQ ID NO: 21317 - protein, 330 aa, Artificial Sequence; identical to SEQ ID NO: 21315
  Synthetic polypeptide

SEQ ID NO: 21318 - protein, 21 aa, Artificial Sequence
  Synthetic polypeptide
NDRCTIRNGITVMVSCYKAGR

SEQ ID NO: 21319 - protein, 21 aa, Artificial Sequence
  Synthetic polypeptide
NDRCTIRNGITVMVSCYKAGR

SEQ ID NO: 21320 - protein, 21 aa, Artificial Sequence
  Synthetic polypeptide
NDRCTIRNGITVMVSCYKAGR

SEQ ID NO: 21321 - protein, 21 aa, Artificial Sequence
  Synthetic polypeptide
NDRCTIRNGITVMVSCYKAGR

SEQ ID NO: 21322 - protein, 21 aa, Artificial Sequence
  Synthetic polypeptide
NDRCTIRNGITVMVSCYKAGR

SEQ ID NO: 21323 - protein, 284 aa, Artificial Sequence
  Synthetic polypeptide
FLNVSCFLICKMTDAPSGMELQSWYPVIKQEGDHVSQTHSFLHPSYYLYMCDKVVAPNVSLTSAVSQSKELTKTEANASISNNSTSKRKSESATCNLVRDINKVGIGLVAAASSPLLVKDVICEDDKGKIMEEVMRTYLKQQEKLNLILQKKQQLQMEVKMLSSSKSMKELTEEQQNLQKELESLQNEHAQRMEEFYVEQKDLEKKLEQIMKQKCTCDSNLEKDKEAEYAGQLAELRQRLDHAEADRQELQDELRQEREARQKLEMMIKELKLQILKSSKTAKE

SEQ ID NO: 21324 - protein, 50 aa, Artificial Sequence
  Synthetic polypeptide
FLNVSCFLICKMTDAPSGMELQSWYPVIKQEGDHVSQTHSFLHPRCINLK

SEQ ID NO: 21325 - protein, 21 aa, Artificial Sequence
  Synthetic polypeptide
RLLLSSLRPCCHHLVPCVRPP

SEQ ID NO: 21326 - protein, 86 aa, Artificial Sequence
  Synthetic polypeptide
NGNNNACFSALCALVATIWFPVCAHRETTIVSFGYSLYAGWIGAVLCLVGGCVILCCAGDAQAFGENRFYYTAGSSSPTHAKSAHV

SEQ ID NO: 21327 - protein, 46 aa, Artificial Sequence
  Synthetic polypeptide
LCELGQFLNVSGPFHKMGTITPASQLSAPLLPPSGSLCAPTVRPPS

SEQ ID NO: 21328 - protein, 6 aa, Artificial Sequence
  Synthetic polypeptide
VYGHLF

SEQ ID NO: 21329 - protein, 6 aa, Artificial Sequence
  Synthetic polypeptide
VYGHLF

SEQ ID NO: 21330 - protein, 6 aa, Artificial Sequence
  Synthetic polypeptide
VYGHLF

SEQ ID NO: 21331 - protein, 6 aa, Artificial Sequence
  Synthetic polypeptide
VYGHLF

SEQ ID NO: 21332 - protein, 20 aa, Artificial Sequence
  Synthetic polypeptide
PHGLAHSSRSMDTYFKMQQL

SEQ ID NO: 21333 - protein, 20 aa, Artificial Sequence
  Synthetic polypeptide
PHGLAHSSRSMDTYFKMQQL

SEQ ID NO: 21334 - protein, 20 aa, Artificial Sequence
  Synthetic polypeptide
PHGLAHSSRSMDTYFKMQQL

SEQ ID NO: 21335 - protein, 20 aa, Artificial Sequence
  Synthetic polypeptide
PHGLAHSSRSMDTYFKMQQL

SEQ ID NO: 21336 - protein, 739 aa, Artificial Sequence
  Synthetic polypeptide
HTALGLWTLILKCNSYRHARWWGGAIEEFIQKHGTNFLKDHRFGSYAAIQENALAKWYVNAKGYFEDVANAMEEANEEIFITDWWLSPEIFLKRPVVEGNRWRLDCILKRKAQQGVRIFIMLYKEVELALGINSEYTKRTLMRLHPNIKVMRHPDHVSSTVYLWAHHEKLVIIDQSVAFVGGIDLAYGRWDDNEHRLTDVGSVKRVTSGPSLGSLPPAAMESMESLRLKDKNEPVQNLPIQKSIDDVDSKLKGIGKPRKFSKFSLYKQLHRHHLHDADSISSIDSTSNTGSIRSLQTGVGELHGETRFWHGKDYCNFVFKDWVQLDKPFADFIDRYSTPRMPWHDIASAVHGKAARDVARHFIQRWNFTKIMKSKYRSLSYPFLLPKSQTTAHELRYQVPGSVHANVQLLRSAADWSAGIKYHEESIHAAYVHVIENSRHYIYIENQFFISCADDKVVFNKIGDAIAQRILKAHRENQKYRVYVVIPLLPGFEGDISTGGGNALQAIMHFNYRTMCRGENSILGQLKAELGNQWINYISFCGLRTHAELEGNLVTELIYVHSKLLIADDNTVIIGSANINDRSMLGKRDSEMAVIVQDTETVPSVMDGKEYQAGRFARGLRLQCFRVVLGYLDDPSEDIQDPVSDKFFKEVWVSTAARNATIYDKVFRCLPNDEVHNLIQLRDFINKPVLAKEDPIRAEEELKKIRGFLVQFPFYFLSEESLLPSVGTKEAIVPMEVWT

SEQ ID NO: 21337 - protein, 777 aa, Artificial Sequence
  Synthetic polypeptide
HTALGLWTLILKCNSYRHARWWGGAIEEFIQKHGTNFLKDHRFGSYAAIQENALAKWYVNAKGYFEDVANAMEEANEEIFITDWWLSPEIFLKRPVVEGNRWRLDCILKRKAQQGVRIFIMLYKEVELALGINSEYTKRTLMRLHPNIKVMRHPDHVSSTVYLWAHHEKLVIIDQSVAFVGGIDLAYGRWDDNEHRLTDVGSVKRVTSGPSLGSLPPAAMESMESLRLKDKNEPVQNLPIQKSIDDVDSKLKGIGKPRKFSKFSLYKQLHRHHLHDADSISSIDSTSSYFNHYRSHHNLIHGLKPHFKLFHPSSESEQGLTRPHADTGSIRSLQTGVGELHGETRFWHGKDYCNFVFKDWVQLDKPFADFIDRYSTPRMPWHDIASAVHGKAARDVARHFIQRWNFTKIMKSKYRSLSYPFLLPKSQTTAHELRYQVPGSVHANVQLLRSAADWSAGIKYHEESIHAAYVHVIENSRHYIYIENQFFISCADDKVVFNKIGDAIAQRILKAHRENQKYRVYVVIPLLPGFEGDISTGGGNALQAIMHFNYRTMCRGENSILGQLKAELGNQWINYISFCGLRTHAELEGNLVTELIYVHSKLLIADDNTVIIGSANINDRSMLGKRDSEMAVIVQDTETVPSVMDGKEYQAGRFARGLRLQCFRVVLGYLDDPSEDIQDPVSDKFFKEVWVSTAARNATIYDKVFRCLPNDEVHNLIQLRDFINKPVLAKEDPIRAEEELKKIRGFLVQFPFYFLSEESLLPSVGTKEAIVPMEVWT

SEQ ID NO: 21338 - protein, 300 aa, Artificial Sequence
  Synthetic polypeptide
HTALGLWTLILKCNSYRHARWWGGAIEEFIQKHGTNFLKDHRFGSYAAIQENALAKWYVNAKGYFEDVANAMEEANEEIFITDWWLSPEIFLKRPVVEGNRWRLDCILKRKAQQGVRIFIMLYKEVELALGINSEYTKRTLMRLHPNIKVMRHPDHVSSTVYLWAHHEKLVIIDQSVAFVGGIDLAYGRWDDNEHRLTDVGSVKRVTSGPSLGSLPIPGPSVVYRQVWESCMGKPDSGMERTTAISSSKTGFNLINLLLISLTGTPRPGCPGMTLPLQSTGRRLVMWHVTSSSAGTSQKL

SEQ ID NO: 21339 - protein, 674 aa, Artificial Sequence
  Synthetic polypeptide
HTALGLWTLILKCNSYRHARWWGGAIEEFIQKHGTNFLKDHRFGSYAAIQENALAKWYVNAKGYFEDVANAMEEANEEIFITDWWLSPEIFLKRPVVEGNRWRLDCILKRKAQQGVRIFIMLYKEVELALGINSEYTKRTLMRLHPNIKVMRHPDHVSSTVYLWAHHEKLVIIDQSVAFVGGIDLAYGRWDDNEHRLTDVGSVKRVTSGPSLGSLPPAAMESMESLRLKDKNEPVQNLPIQKSIDDVDSKLKGIGKPRKFSKFSLYKQLHRHHLHDADSISSIDSTSSYFNHYRSHHNLIHGLKPHFKLFHPSSESEQGLTRPHADTGSIRSLQTGVGELHGETRFWHGKDYCNFVFKDWVQLDKPFADFIDRYSTPRMPWHDIASAVHGKAARDVARHFIQRWNFTKIMKSKYRSLSYPFLLPKSQTTAHELRYQVPGSVHANVQLLRSAADWSAGIKYHEESIHAAYVHVIENSRHYIYIENQFFISCADDKVVFNKIGDAIAQRILKAHRENQKYRVYVVIPLLPGFEGDISTGGGNALQAIMHFNYRTMCRGENSILGQLKAELGNQWINYISFCGLRTHAELEGNLVTELIYVHSKLLIADDNTVIIGSANINDRSMLGKRDSEMAVIVQDTETVPSVMDGKEYQAGRFARGLRLQCFRSKMTPGVEDP

SEQ ID NO: 21340 - protein, 34 aa, Artificial Sequence
  Synthetic polypeptide
MPIPQDCSHMSPAPQTFLRPSPSTSSNTVRRKFM

SEQ ID NO: 21341 - protein, 34 aa, Artificial Sequence; identical to SEQ ID NO: 21340
  Synthetic polypeptide

SEQ ID NO: 21342 - protein, 34 aa, Artificial Sequence; identical to SEQ ID NO: 21340
  Synthetic polypeptide

SEQ ID NO: 21343 - protein, 168 aa, Artificial Sequence
  Synthetic polypeptide
CPFPRTVLTCHLLLKLSLDPHPAPRVTQLEGNSCEILWETVPSMKGDPVNYILQVLVGRESEYKQVYKGEEATFQISGLQTNTDYRFRVCACRRCLDTSQELSGAFSPSAAFVLQRSEVMLTGDMGSLDDPKMKSMMPTDEQFAAIIVLGFATLSILFAFILQYFLMK

SEQ ID NO: 21344 - protein, 168 aa, Artificial Sequence; identical to SEQ ID NO: 21343
  Synthetic polypeptide

SEQ ID NO: 21345 - protein, 168 aa, Artificial Sequence; identical to SEQ ID NO: 21343
  Synthetic polypeptide

SEQ ID NO: 21346 - protein, 7 aa, Artificial Sequence
  Synthetic polypeptide
TLTQHLE

SEQ ID NO: 21347 - protein, 7 aa, Artificial Sequence
  Synthetic polypeptide
TLTQHLE

SEQ ID NO: 21348 - protein, 7 aa, Artificial Sequence
  Synthetic polypeptide
TLTQHLE

SEQ ID NO: 21349 - protein, 27 aa, Artificial Sequence
  Synthetic polypeptide
VCSRLHRLCLETSSTTLMKRQAGFQYL

SEQ ID NO: 21350 - protein, 44 aa, Artificial Sequence
  Synthetic polypeptide
LPTVFSTVQVCTVQVCSRGAITYTMKPRCVVGYTVYVWKHPLPP

SEQ ID NO: 21351 - protein, 72 aa, Artificial Sequence
  Synthetic polypeptide
ATPSMFGNILYHLDEKTSRFSILIEAWEHCKPLASNETLQEALSEVLNSINSAQVYFKAGLDVFKSVLDGKN

SEQ ID NO: 21352 - protein, 43 aa, Artificial Sequence
  Synthetic polypeptide
TDENSRDLSKMFMKTPLQLFLKIIGNQNARFHLMKLDYHHHLI

SEQ ID NO: 21353 - protein, 43 aa, Artificial Sequence; identical to SEQ ID NO: 21352
  Synthetic polypeptide

SEQ ID NO: 21354 - protein, 43 aa, Artificial Sequence; identical to SEQ ID NO: 21352
  Synthetic polypeptide

SEQ ID NO: 21355 - protein, 43 aa, Artificial Sequence; identical to SEQ ID NO: 21352
  Synthetic polypeptide

SEQ ID NO: 21356 - protein, 14 aa, Artificial Sequence
  Synthetic polypeptide
SKQMRILGIYQRCS

SEQ ID NO: 21357 - protein, 14 aa, Artificial Sequence
  Synthetic polypeptide
SKQMRILGIYQRCS

SEQ ID NO: 21358 - protein, 14 aa, Artificial Sequence
  Synthetic polypeptide
SKQMRILGIYQRCS

SEQ ID NO: 21359 - protein, 14 aa, Artificial Sequence
  Synthetic polypeptide
SKQMRILGIYQRCS

SEQ ID NO: 21360 - protein, 9 aa, Artificial Sequence
  Synthetic polypeptide
TWRRSFRAL

SEQ ID NO: 21361 - protein, 9 aa, Artificial Sequence
  Synthetic polypeptide
TWRRSFRAL

SEQ ID NO: 21362 - protein, 9 aa, Artificial Sequence
  Synthetic polypeptide
TWRRSFRAL

SEQ ID NO: 21363 - protein, 9 aa, Artificial Sequence
  Synthetic polypeptide
TWRRSFRAL

SEQ ID NO: 21364 - protein, 9 aa, Artificial Sequence
  Synthetic polypeptide
TWRRSFRAL

SEQ ID NO: 21365 - protein, 304 aa, Artificial Sequence
  Synthetic polypeptide
PGDEVSVHYDPMIAKLVVWAADRQAALTKLRYSLRQYNIVGLHTNIDFLLNLSGHPEFEAGNVHTDFIPQHHKQLLLSRKAAAKESLCQAALGLILKEKAMTDTFTLQAHDQFSPFSSSSGRRLNISYTRNMTLKDGKNNVAIAVTYNHDGSYSMQIEDKTFQVLGNLYSEGDCTYLKCSVNGVASKAKLIILENTIYLFSKEGSIEIDIPVPKYLSSVSSQETQGGPLAPMTGTIEKVFVKAGDKVKAGDSLMVMIAMKMEHTIKSPKDGTVKKVFYREGAQANRHTPLVEFEEEESDKRESE

SEQ ID NO: 21366 - protein, 304 aa, Artificial Sequence; identical to SEQ ID NO: 21365
  Synthetic polypeptide

SEQ ID NO: 21367 - protein, 11 aa, Artificial Sequence
  Synthetic polypeptide
METKFPCIMTP

SEQ ID NO: 21368 - protein, 11 aa, Artificial Sequence
  Synthetic polypeptide
METKFPCIMTP

SEQ ID NO: 21369 - protein, 11 aa, Artificial Sequence
  Synthetic polypeptide
METKFPCIMTP

SEQ ID NO: 21370 - protein, 11 aa, Artificial Sequence
  Synthetic polypeptide
METKFPCIMTP

SEQ ID NO: 21371 - protein, 11 aa, Artificial Sequence
  Synthetic polypeptide
METKFPCIMTP

SEQ ID NO: 21372 - protein, 51 aa, Artificial Sequence
  Synthetic polypeptide
PGDEVSVHYDPMIAKLVVWAADRQAALTKLRYSLRQYNINSLHFRLAVEED

SEQ ID NO: 21373 - protein, 140 aa, Artificial Sequence
  Synthetic polypeptide
PGDEVSVHYDPMIAKLVVWAADRQAALTKLRYSLRQYNIVGLHTNIDFLLNLSGHPEFEAGNVHTDFIPQHHKQLLLSRKAAAKESLCQAALGLILKEKAMTDTFTLQAHDQFSPFSSSSGRRLNISYTRNMTLKDGKNN

SEQ ID NO: 21374 - protein, 224 aa, Artificial Sequence
  Synthetic polypeptide
PGDEVSVHYDPMIAKLVVWAADRQAALTKLRYSLRQYNIVGLHTNIDFLLNLSGHPEFEAGNVHTDFIPQHHKQLLLSRKAAAKESLCQAALGLILKEKAMTDTFTLQAHDQFSPFSSSSGRRLNISYTRNMTLKDGKNNVAIAVTYNHDGSYSMQIEDKTFQVLGNLYSEGDCTYLKCSVNGVASKAKLIILENTIYLFSKEGSIEIDIPVPKYLSSVSSQET

SEQ ID NO: 21375 - protein, 71 aa, Artificial Sequence
  Synthetic polypeptide
VGEETTHTQNGKNPLARTGWTQDMGVEAKNHEVHNSHRKKHYQGPHCKQRRNCLQGDAHSQKTGCTDCGGL

SEQ ID NO: 21376 - protein, 71 aa, Artificial Sequence; identical to SEQ ID NO: 21375
  Synthetic polypeptide

SEQ ID NO: 21377 - protein, 716 aa, Artificial Sequence
  Synthetic polypeptide
GKRQHTPKMARIRWHGQAGPRTWVWRQRTMKYTTATGRNITKVLIANRGEIACRVMRTAKKLGVQTVAVYSEADRNSMHVDMADEAYSIGPAPSQQSYLSMEKIIQVAKTSAAQAIHPGCGFLSENMEFAELCKQEGIIFIGPPPSAIRDMGIKSTSKSIMAAAGVPVVEGYHGEDQSDQCLKEHARRIGYPVMIKAVRGGGGKGMRIVRSEQEFQEQLESARREAKKSFNDDAMLIEKFVDTPRHVEVQVFGDHHGNAVYLFERDCSVQRRHQKIIEEAPAPGIKSEVRKKLGEAAVRAAKAVNYVGAGTVEFIMDSKHNFCFMEMNTRLQVEHPVTEMITGTDLVEWQLRIAAGEKIPLSQEEITLQGHAFEARIYAEDPSNNFMPVAGPLVHLSTPRADPSTRIETGVRQGDEVSVHYDPMIAKLVVWAADRQAALTKLRYSLRQYNIVGLHTNIDFLLNLSGHPEFEAGNVHTDFIPQHHKQLLLSRKAAAKESLCQAALGLILKEKAMTDTFTLQAHDQFSPFSSSSGRRLNISYTRNMTLKDGKNNVAIAVTYNHDGSYSMQIEDKTFQVLGNLYSEGDCTYLKCSVNGVASKAKLIILENTIYLFSKEGSIEIDIPVPKYLSSVSSQETQGGPLAPMTGTIEKVFVKAGDKVKAGDSLMVMIAMKMEHTIKSPKDGTVKKVFYREGAQANRHTPLVEFEEEESDKRESE

SEQ ID NO: 21378 - protein, 31 aa, Artificial Sequence
  Synthetic polypeptide
SRGRDNTHPKWQESAGTDRLDPGHGCGGKEP

SEQ ID NO: 21379 - protein, 31 aa, Artificial Sequence; identical to SEQ ID NO: 21378
  Synthetic polypeptide

SEQ ID NO: 21380 - protein, 31 aa, Artificial Sequence; identical to SEQ ID NO: 21378
  Synthetic polypeptide

SEQ ID NO: 21381 - protein, 31 aa, Artificial Sequence; identical to SEQ ID NO: 21378
  Synthetic polypeptide

SEQ ID NO: 21382 - protein, 31 aa, Artificial Sequence; identical to SEQ ID NO: 21378
  Synthetic polypeptide

SEQ ID NO: 21383 - protein, 31 aa, Artificial Sequence; identical to SEQ ID NO: 21378
  Synthetic polypeptide

SEQ ID NO: 21384 - protein, 31 aa, Artificial Sequence; identical to SEQ ID NO: 21378
  Synthetic polypeptide

SEQ ID NO: 21385 - protein, 40 aa, Artificial Sequence
  Synthetic polypeptide
VGEETTHTQNGKNPLARTGWTQDMGVEAKNHEVHNSHRQM

SEQ ID NO: 21386 - protein, 40 aa, Artificial Sequence; identical to SEQ ID NO: 21385
  Synthetic polypeptide

SEQ ID NO: 21387 - protein, 38 aa, Artificial Sequence
  Synthetic polypeptide
GKRQHTPKMARIRWHGQAGPRTWVWRQRTMKYTTATGR

SEQ ID NO: 21388 - protein, 38 aa, Artificial Sequence; identical to SEQ ID NO: 21387
  Synthetic polypeptide

SEQ ID NO: 21389 - protein, 54 aa, Artificial Sequence
  Synthetic polypeptide
VGEETTHTQNGKNPLARTGWTQDMGVEAKNHEVHNSHRLSIQDAVFSQKTWNLL

SEQ ID NO: 21390 - protein, 54 aa, Artificial Sequence; identical to SEQ ID NO: 21389
  Synthetic polypeptide

SEQ ID NO: 21391 - protein, 52 aa, Artificial Sequence
  Synthetic polypeptide
GKRQHTPKMARIRWHGQAGPRTWVWRQRTMKYTTATGYPSRMRFSLRKHGIC

SEQ ID NO: 21392 - protein, 52 aa, Artificial Sequence; identical to SEQ ID NO: 21391
  Synthetic polypeptide

SEQ ID NO: 21393 - protein, 38 aa, Artificial Sequence
  Synthetic polypeptide
VGEETTHTQNGKNPLARTGWTQDMGVEAKNHEVHNSHR

SEQ ID NO: 21394 - protein, 589 aa, Artificial Sequence
  Synthetic polypeptide
GKRQHTPKMARIRWHGQAGPRTWVWRQRTMKYTTATDEAYSIGPAPSQQSYLSMEKIIQVAKTSAAQAIHPGCGFLSENMEFAELCKQEGIIFIGPPPSAIRDMGIKSTSKSIMAAAGVPVVEGYHGEDQSDQCLKEHARRIGYPVMIKAVRGGGGKGMRIVRSEQEFQEQLESARREAKKSFNDDAMLIEKFVDTPRHVEVQVFGDHHGNAVYLFERDCSVQRRHQKIIEEAPAPGIKSEVRKKLGEAAVRAAKAVNYVGAGTVEFIMDSKHNFCFMEMNTRLQVEHPVTEMITGTDLVEWQLRIAAGEKIPLSQEEITLQGHAFEARIYAEDPSNNFMPVAGPLVHLSTPRADPSTRIETGVRQGDEVSVHYDPMIAKLVVWAADRQAALTKLRYSLRQYNIVGLHTNIDFLLNLSGHPEFEAGNVHTDFIPQHHKQLLLSRKAAAKESLCQAALGLILKEKAMTDTFTLQAHDQFSPFSSSSGRRLNISYTRNMTLKDGKNNVAIAVTYNHDGSYSMQIEDKTFQVLGNLYSEGDCTYLKCSVNGVASKAKLIILENTIYLFSKEGSIEIDIPVPKYLSSVSSQET

SEQ ID NO: 21395 - protein, 103 aa, Artificial Sequence
  Synthetic polypeptide
GKRQHTPKMARIRWHGQAGPRTWVWRQRTMKYTTATGRNITKVLIANRGEIACRVMRTAKKLGVQTVAVYSEADRNSMHVDMQDDLDFTEKIKLRFLPQNLLT

SEQ ID NO: 21396 - protein, 22 aa, Artificial Sequence
  Synthetic polypeptide
HSSDFCSSHSTETPLNQVHWLF

SEQ ID NO: 21397 - protein, 22 aa, Artificial Sequence
  Synthetic polypeptide
HSSDFCSSHSTETPLNQVHWLF

SEQ ID NO: 21398 - protein, 22 aa, Artificial Sequence
  Synthetic polypeptide
HSSDFCSSHSTETPLNQVHWLF

SEQ ID NO: 21399 - protein, 310 aa, Artificial Sequence
  Synthetic polypeptide
IPLTSAPVTLLKLLSIRSTGYSEVIVVVGGCERVGGFNLPYTECYDPVTGEWKSLAKLPEFTKSEYAVCALRNDILVSGGRINSRDVWIYNSQLNIWIRVASLNKGRWRHKMAVLLGKVYVVGGYDGQNRLSSVECYDSFSNRWTEVAPLKEAVSSPAVTSCVGKLFVIGGGPDDNTCSDKVQSYDPETNSWLLRAAIPIAKRCITAVSLNNLIYVAGGLTKAIYCYDPVEDYWMHVQNTFSRQENCGMSVCNGKIYILGGRRENGEATDTILCYDPATSIITGVAAMPRPVSYHGCVTIHRYNEKCFKL

SEQ ID NO: 21400 - protein, 310 aa, Artificial Sequence; identical to SEQ ID NO: 21399
  Synthetic polypeptide

SEQ ID NO: 21401 - protein, 12 aa, Artificial Sequence
  Synthetic polypeptide
NSSQSGPLAILR

SEQ ID NO: 21402 - protein, 12 aa, Artificial Sequence
  Synthetic polypeptide
NSSQSGPLAILR

SEQ ID NO: 21403 - protein, 12 aa, Artificial Sequence
  Synthetic polypeptide
NSSQSGPLAILR

SEQ ID NO: 21404 - protein, 247 aa, Artificial Sequence
  Synthetic polypeptide
IPLTSAPVTLLKLLSIRSTGYSEVIVVVGGCERVGGFNLPYTECYDPVTGEWKSLAKLPEFTKSEYAVCALRNDILVSGGRINSRDVWIYNSQLNIWIRVASLNKGRWRHKMAVLLGKVYVVGGYDGQNRLSSVECYDSFSNRWTEVAPLKEAVSSPAVTSCVGKLFVIGGGPDDNTCSDKVQSYDPETNSWLLRAAIPIAKRCITAVSLNNLIYVAGGLTKAIYCYDPVEDYWMHVQNTFSRQVIT

SEQ ID NO: 21405 - protein, 30 aa, Artificial Sequence
  Synthetic polypeptide
PPKPSTNSHQHQGKTLHQQRDYSSLKAQAG

SEQ ID NO: 21406 - protein, 1162 aa, Artificial Sequence
  Synthetic polypeptide
KEVSRGSRIHCCLVLRNCRSHPNLQQTAISIKARPSTNKEITVHSRLKLDRTYTGLQTLGAETVVDVELHRHSLGEDCIYPQSSESDISDAPPSLPLTIPAPVKASSPIKQSHEPVPDTSVEKGFPASTEAERHTPFYALPSSLERTPTKMTTSQKVTFCSHGNSAFQPIASSCKIVPQSQVPNPESPGKSFQPITMSCKIVSGSPISTPSPSPLPRTPTSTPVHVKQGTAGSVINNPYVIMDKQPGQVIGATTPSTGSPTNKISTASQVSQGTGSPVPKIHGSSFVTSTVKQEDSLFASMPPLCPIGSHPKVQSPKPITGGLGAFTKVIIKQEPGEAPHVPATGAASQSPLPQYVTVKGGHMIAVSPQKQVITPGEGIAQSAKVQPSKVVGVPVGSALPSTVKQAVAISGGQILVAKASSSVSKAVGPKQVVTQGVAKAIVSGGGGTIVAQPVQTLTKAQVTAAGPQKSGSQGSVMATLQLPATNLANLANLPPGTKLYLTTNSKNPSGKGKLLLIPQGAILRATNNANLQSGSAASGGSGAGGGGGGGGGGGSGSGGGGSTGGGGGTAGGGTQSTAGPGGISQHLTYTSYILKQTPQGTFLVGQPSPQTSGKQLTTGSVVQGTLGVSTSSAQGQQTLKVISGQKTTLFTQAAHGGQASLMKISDSTLKTVPATSQLSKPGTTMLRVAGGVITTATSPAVALSANGPAQQSEGMAPVSSSTVSSVTKTSGQQQVCVSQATVGTCKAATPTVVSATSLVPTPNPISGKATVSGLLKIHSSQSSPQQAVLTIPSQLKPLSVNTSGGVQTILMPVNKVVQSFSTSKPPAILPVAAPTPVVPSSAPAAVAKVKTEPETPGPSCLSQEGQTAVKTEESSELGNYVIKIDHLETIQQLLTAVVKKIPLITAKSEDASCFSAKSVEQYYGWNIGKRRAAEWQRAMTMRKVLQEILEKNPRFHHLTPLKTKHIAHWCRCHGYTPPDPESLRNDGDSIEDVLTQIDSEPECPSSFSSADNLCRKLEDLQQFQKREPENEEEVDILSLSEPVKINIKKEQEEKQEEVKFYLPPTPGSEFIGDVTQKIGITLQPVALHRNVYASVVEDMILKATEQLVNDILRQALAVGYQTASHNRIPKEITVSNIHQAICNIPFLDFLTNKHMGILNEDQ

SEQ ID NO: 21407 - protein, 48 aa, Artificial Sequence
  Synthetic polypeptide
EIAVATQTFNKQPSASRQDPPPTKRLQFTQGSSWIELILACRLLEQRR

SEQ ID NO: 21408 - protein, 715 aa, Artificial Sequence
  Synthetic polypeptide
GQAQWLTPVIPALWEAEAGGSPEYLVDCDEVIFMKEGCITERGTHEELMNLNGDYATIFNNLLLGETPPVEINSKKETSGSQKKSQDKGPKTGSVKKEKAVKPEEGQLVQLEEKGQGSVPWSVYGVYIQAAGGPLAFLVIMALFMLNVGSTAFSTWWLSYWIKQGSGNTTVTRGNETSVSDSMKDNPHMQYYASIYALSMAVMLILKAIRGVVFVKGTLRASSRLHDELFRRILRSPMKFFDTTPTGRILNRFSKDMDEVDVRLPFQAEMFIQNVILVFFCVGMIAGVFPWFLVAVGPLVILFSVLHIVSRVLIRELKRLDNITQSPFLSHITSSIQGLATIHAYNKGQEFLHRYQELLDDNQAPFFLFTCAMRWLAVRLDLISIALITTTGLMIVLMHGQIPPAYAGLAISYAVQLTGLFQFTVRLASETEARFTSVERINHYIKTLSLEAPARIKNKAPSPDWPQEGEVTFENAEMRYRENLPLVLKKVSFTIKPKEKIGIVGRTGSGKSSLGMALFRLVELSGGCIKIDGVRISDIGLADLRSKLSIIPQEPVLFSGTVRSNLDPFNQYTEDQIWDALERTHMKECIAQLPLKLESEVMENGDNFSVGERQLLCIARALLRHCKILILDEATAAMDTETDLLIQETIREAFADCTMLTIAHRLHTVLGSDRIMVLAQGQVVEFDTPSVLLSNDSSRFYAMFAAAENKVAVKG

SEQ ID NO: 21409 - protein, 21 aa, Artificial Sequence
  Synthetic polypeptide
SLHFGRLRLADHLSTWLTVMK

SEQ ID NO: 21410 - protein, 21 aa, Artificial Sequence
  Synthetic polypeptide
SLHFGRLRLADHLSTWLTVMK

SEQ ID NO: 21411 - protein, 672 aa, Artificial Sequence
  Synthetic polypeptide
GQAQWLTPVIPALWEAEAGGSPEYLVDCDEVIFMKEGCITERGTHEELMNLNGDYATIFNNLLLGETPPVEINSKKETSGSQKKSQDKGPKTGSVKKEKAVKPEEGQLVQLEEKGQGSVPWSVYGVYIQAAGGPLAFLVIMALFMLNVGSTAFSTWWLSYWIKQGSGNTTVTRGNETSVSDSMKDNPHMQYYASIYALSMAVMLILKAIRGVVFVKGTLRASSRLHDELFRRILRSPMKFFDTTPTGRILNRFSKDMDEVDVRLPFQAEMFIQNVILVFFCVGMIAGVFPWFLVAVGPLVILFSVLHIVSRYQELLDDNQAPFFLFTCAMRWLAVRLDLISIALITTTGLMIVLMHGQIPPAYAGLAISYAVQLTGLFQFTVRLASETEARFTSVERINHYIKTLSLEAPARIKNKAPSPDWPQEGEVTFENAEMRYRENLPLVLKKVSFTIKPKEKIGIVGRTGSGKSSLGMALFRLVELSGGCIKIDGVRISDIGLADLRSKLSIIPQEPVLFSGTVRSNLDPFNQYTEDQIWDALERTHMKECIAQLPLKLESEVMENGDNFSVGERQLLCIARALLRHCKILILDEATAAMDTETDLLIQETIREAFADCTMLTIAHRLHTVLGSDRIMVLAQGQVVEFDTPSVLLSNDSSRFYAMFAAAENKVAVKG

SEQ ID NO: 21412 - protein, 52 aa, Artificial Sequence
  Synthetic polypeptide
EPGAGQTCFHPQFCNLLTSCMILLWNQTSRTAKEGTVLDSECKEVREGRGST

SEQ ID NO: 21413 - protein, 52 aa, Artificial Sequence; identical to SEQ ID NO: 21412
  Synthetic polypeptide

SEQ ID NO: 21414 - protein, 610 aa, Artificial Sequence
  Synthetic polypeptide
SYCGTKLPGLLKREQSSTVNAKKLEKAEARLKAKQEKRSEKDTLKTSNPLVLEEASASQAGSRKESRLESSGKNKSYDVRIENFDVSFGDRVLLAGADVNLAWGRRYGLVGRNGLGKTTLLKMLATRSLRVPAHISLLHVEQEVAGDDTPALQSVLESDSVREDLLRRERELTAQIAAGRAEGSEAAELAEIYAKLEEIEADKAPARASVILAGLGFTPKMQQQPTREFSGGWRMRLALARALFARPDLLLLDEPTNMLDVRAILWLENYLQTWPSTILVVSHDRNFLNAIATDIIHLHSQRLDGYRGDFETFIKSKQERLLNQQREYEAQQQYRQHIQVFIDRFRYNANRASQVQSKLKMLEKLPELKPVDKESEVVMKFPDGFEKFSPPILQLDEVDFYYDPKHVIFSRLSVSADLESRICVVGENGAGKSTMLKLLLGDLAPVRGIRHAHRNLKIGYFSQHHVEQLDLNVSAVELLARKFPGRPEEEYRHQLGRYGISGELAMRPLASLSGGQKSRVAFAQMTMPCPNFYILDEPTNHLDMETIEALGRALNNFRGGVILVSHDERFIRLVCRELWVCEGGGVTRVEGGFDQYRALLQEQFRREGFL

SEQ ID NO: 21415 - protein, 610 aa, Artificial Sequence; identical to SEQ ID NO: 21414
  Synthetic polypeptide

SEQ ID NO: 21416 - protein, 32 aa, Artificial Sequence
  Synthetic polypeptide
RAWSWTDLLSPPVLQLANQLHDLTVEPNFQDC

SEQ ID NO: 21417 - protein, 32 aa, Artificial Sequence; identical to SEQ ID NO: 21416
  Synthetic polypeptide

SEQ ID NO: 21418 - protein, 392 aa, Artificial Sequence
  Synthetic polypeptide
AKIVVLLLLLLFSVALDTSDTEIDWKAYMAEVEGVINGTYDYTQLQGDTGPLVYPAGFVYIFMGLYYATSRGTDIRMAQNIFAVLYLATLLLVFLIYHQTCKVPPFVFFFMCCASYRVHSIFVLRLFNDPVAMVLLFLSINLLLAQRWGWGCCFFSLAVSVKMNVLLFAPGLLFLLLTQFGFRGALPKLGICAGLQVVLGLPFLLENPSGYLSRSFDLGRQFLFHWTVNWRFLPEALFLHRAFHLALLTAHLTLLLLFALCRWHRTGESILSLLRDPSKRKVPPQPLTPNQIVSTLFTSNFIGICFSRSLHYQFYVWYFHTLPYLLWAMPARWLTHLLRLLVLGLIELSWNTYPSTSCSSAALHICHAVILLQLWLGPQPFPKSTQHSKKAH

SEQ ID NO: 21419 - protein, 392 aa, Artificial Sequence; identical to SEQ ID NO: 21418
  Synthetic polypeptide

SEQ ID NO: 21420 - protein, 392 aa, Artificial Sequence; identical to SEQ ID NO: 21418
  Synthetic polypeptide

SEQ ID NO: 21421 - protein, 38 aa, Artificial Sequence
  Synthetic polypeptide
SLEVRFEPKLLYCCCCCFSLWLWTPQTQRLTGRPTWPR

SEQ ID NO: 21422 - protein, 38 aa, Artificial Sequence; identical to SEQ ID NO: 21421
  Synthetic polypeptide

SEQ ID NO: 21423 - protein, 38 aa, Artificial Sequence; identical to SEQ ID NO: 21421
  Synthetic polypeptide

SEQ ID NO: 21424 - protein, 38 aa, Artificial Sequence; identical to SEQ ID NO: 21421
  Synthetic polypeptide

SEQ ID NO: 21425 - protein, 27 aa, Artificial Sequence
  Synthetic polypeptide
KSDLSQNCCTAAAAAFLCGFGHLRHRD

SEQ ID NO: 21426 - protein, 27 aa, Artificial Sequence
  Synthetic polypeptide
KSDLSQNCCTAAAAAFLCGFGHLRHRD

SEQ ID NO: 21427 - protein, 27 aa, Artificial Sequence
  Synthetic polypeptide
KSDLSQNCCTAAAAAFLCGFGHLRHRD

SEQ ID NO: 21428 - protein, 27 aa, Artificial Sequence
  Synthetic polypeptide
KSDLSQNCCTAAAAAFLCGFGHLRHRD

SEQ ID NO: 21429 - protein, 32 aa, Artificial Sequence
  Synthetic polypeptide
AKIVVLLLLLLFSVALDTSDTEIDWKAYMAEV

SEQ ID NO: 21430 - protein, 38 aa, Artificial Sequence
  Synthetic polypeptide
TLFFKTLLGCQLPGNSWLTHLRLREQCPELRAVPRRLP

SEQ ID NO: 21431 - protein, 38 aa, Artificial Sequence; identical to SEQ ID NO: 21430
  Synthetic polypeptide

SEQ ID NO: 21432 - protein, 27 aa, Artificial Sequence
  Synthetic polypeptide
SVLQDFAWLSAPRKLLADSPEVAGTVP

SEQ ID NO: 21433 - protein, 27 aa, Artificial Sequence
  Synthetic polypeptide
SVLQDFAWLSAPRKLLADSPEVAGTVP

SEQ ID NO: 21434 - protein, 57 aa, Artificial Sequence
  Synthetic polypeptide
PKHFGRPRQEDCLSPGVQDQPEQHSETSLLQKRREKKKKGWAWCHVPVVPAAWEAEG

SEQ ID NO: 21435 - protein, 57 aa, Artificial Sequence; identical to SEQ ID NO: 21434
  Synthetic polypeptide

SEQ ID NO: 21436 - protein, 57 aa, Artificial Sequence; identical to SEQ ID NO: 21434
  Synthetic polypeptide

SEQ ID NO: 21437 - protein, 57 aa, Artificial Sequence; identical to SEQ ID NO: 21434
  Synthetic polypeptide

SEQ ID NO: 21438 - protein, 57 aa, Artificial Sequence; identical to SEQ ID NO: 21434
  Synthetic polypeptide

SEQ ID NO: 21439 - protein, 57 aa, Artificial Sequence; identical to SEQ ID NO: 21434
  Synthetic polypeptide

SEQ ID NO: 21440 - protein, 74 aa, Artificial Sequence
  Synthetic polypeptide
SQLPGRLRADQFEYVMYGKVYRIEGDETSTEAATRLSAYVSYGGLLMRLQGDANNLHGFEVDSRVYLLMKKLAF

SEQ ID NO: 21441 - protein, 74 aa, Artificial Sequence; identical to SEQ ID NO: 21440
  Synthetic polypeptide

SEQ ID NO: 21442 - protein, 74 aa, Artificial Sequence; identical to SEQ ID NO: 21440
  Synthetic polypeptide

SEQ ID NO: 21443 - protein, 74 aa, Artificial Sequence; identical to SEQ ID NO: 21440
  Synthetic polypeptide

SEQ ID NO: 21444 - protein, 72 aa, Artificial Sequence
  Synthetic polypeptide
SQLPGRLRADQFEYVMYGKVYRIEGDETSTEAATRLSAYVSYGGLLMRLQGDANNLHGFEVDSRVYLLMKKL

SEQ ID NO: 21445 - protein, 99 aa, Artificial Sequence
  Synthetic polypeptide
SQLPGRLRADQFEYVMYGKVYRIEGDETSTEAATRLLRLRAAEWQCSRITGWGLLFQLCVRVLWGPAHEAAGGCQQPAWIRGGLQSLSPDEEASLLNLA

SEQ ID NO: 21446 - protein, 31 aa, Artificial Sequence
  Synthetic polypeptide
MSDKCYGGEFRLYPLTSRMSLYLPCSAACKA

SEQ ID NO: 21447 - protein, 31 aa, Artificial Sequence; identical to SEQ ID NO: 21446
  Synthetic polypeptide

SEQ ID NO: 21448 - protein, 31 aa, Artificial Sequence; identical to SEQ ID NO: 21446
  Synthetic polypeptide

SEQ ID NO: 21449 - protein, 31 aa, Artificial Sequence; identical to SEQ ID NO: 21446
  Synthetic polypeptide

SEQ ID NO: 21450 - protein, 617 aa, Artificial Sequence
  Synthetic polypeptide
PSRCQINVMVENSDFTPSQVGCLFTFLARQLAKPDNTLFVNRTLFDQVLEFLCSPDDDSRHSERQQVLLELLQAGGIVQFEESRLIRMAEKAEFYQICEFMYEREHQYDKIIDCYLRDPLREEEVFNYIHNILSIPGHSAEEKQSVWQKAMDHIEELVSLKPCKAAELVATHFSGHIETVIKKLQNQVLLFKFLRSLLDPREGIHVNQELLQISPCITEQFIELLCQFNPTQVIETLQVLECYRLEETIQITQKYQLHEVTAYLLEKKGDIHGAFLIMLERLQSKLQEVTHQGENTKEDPSLKDVEDTMVETIALCQRNSHNLNQQQREALWFPLLEAMMAPQKLSSSAIPHLHSEALKSLTMQVLNSMAAFIALPSILQRILQDPVYGKGKLGEIQGLILGMLDTFNYEQTLLETTTSLLNQDLHWSLCNLRASVTRGLNPKQDYCSICLQQYKRRQEMADEIIVFSCGHLYHSFCLQNKECTVEFEGQTRWTCYKCSSSNKVGKLSENSSEIKKGRITPSQVKMSPSYHQSKGDPTAKKGTSEPVLDPQQIQAFDQLCRLYRGSSRLALLTELSQNRSSESYRPFSGSQSAPAFNSIFQNENFQLQLIPPPVTED

SEQ ID NO: 21451 - protein, 617 aa, Artificial Sequence; identical to SEQ ID NO: 21450
  Synthetic polypeptide

SEQ ID NO: 21452 - protein, 617 aa, Artificial Sequence; identical to SEQ ID NO: 21450
  Synthetic polypeptide

SEQ ID NO: 21453 - protein, 617 aa, Artificial Sequence; identical to SEQ ID NO: 21450
  Synthetic polypeptide

SEQ ID NO: 21454 - protein, 30 aa, Artificial Sequence
  Synthetic polypeptide
MEMSAWYENFIMVEQGNLRTCSGSTANPSI

SEQ ID NO: 21455 - protein, 30 aa, Artificial Sequence; identical to SEQ ID NO: 21454
  Synthetic polypeptide

SEQ ID NO: 21456 - protein, 30 aa, Artificial Sequence; identical to SEQ ID NO: 21454
  Synthetic polypeptide

SEQ ID NO: 21457 - protein, 30 aa, Artificial Sequence; identical to SEQ ID NO: 21454
  Synthetic polypeptide

SEQ ID NO: 21458 - protein, 78 aa, Artificial Sequence
  Synthetic polypeptide
NKGTSEPVLDPQQIQAFDQLCRLYRGSSRLALLTELSQNRSSESYRPFSGSQSAPAFNSIFQNENFQLQLIPPPVTED

SEQ ID NO: 21459 - protein, 78 aa, Artificial Sequence; identical to SEQ ID NO: 21458
  Synthetic polypeptide

SEQ ID NO: 21460 - protein, 78 aa, Artificial Sequence; identical to SEQ ID NO: 21458
  Synthetic polypeptide

SEQ ID NO: 21461 - protein, 78 aa, Artificial Sequence; identical to SEQ ID NO: 21458
  Synthetic polypeptide

SEQ ID NO: 21462 - protein, 80 aa, Artificial Sequence
  Synthetic polypeptide
EFHNGRTREPQNLFWIHSKSKHLISFAVSTEEAPGWLSSRNSPRIAAARAIGHSVARRVLLLSTASSRMRTSSCSSFLHL

SEQ ID NO: 21463 - protein, 80 aa, Artificial Sequence; identical to SEQ ID NO: 21462
  Synthetic polypeptide

SEQ ID NO: 21464 - protein, 80 aa, Artificial Sequence; identical to SEQ ID NO: 21462
  Synthetic polypeptide

SEQ ID NO: 21465 - protein, 80 aa, Artificial Sequence; identical to SEQ ID NO: 21462
  Synthetic polypeptide

SEQ ID NO: 21466 - protein, 41 aa, Artificial Sequence
  Synthetic polypeptide
SQHFGRPRLPLRKAQTSAKGWSSSPGHRKPSSRPRDGSLGN

SEQ ID NO: 21467 - protein, 41 aa, Artificial Sequence; identical to SEQ ID NO: 21466
  Synthetic polypeptide

SEQ ID NO: 21468 - protein, 41 aa, Artificial Sequence; identical to SEQ ID NO: 21466
  Synthetic polypeptide

SEQ ID NO: 21469 - protein, 41 aa, Artificial Sequence; identical to SEQ ID NO: 21466
  Synthetic polypeptide

SEQ ID NO: 21470 - protein, 56 aa, Artificial Sequence
  Synthetic polypeptide
MGAVAHTCNPSTLEGQDCPCGRPRRQRKDGHHHRATGSPVQGPGTDLWETERGKLL

SEQ ID NO: 21471 - protein, 56 aa, Artificial Sequence; identical to SEQ ID NO: 21470
  Synthetic polypeptide

SEQ ID NO: 21472 - protein, 56 aa, Artificial Sequence; identical to SEQ ID NO: 21470
  Synthetic polypeptide

SEQ ID NO: 21473 - protein, 56 aa, Artificial Sequence; identical to SEQ ID NO: 21470
  Synthetic polypeptide

SEQ ID NO: 21474 - protein, 153 aa, Artificial Sequence
  Synthetic polypeptide
WAQWLTPVIPALWKAKIAPAEGPDVSERMVIITGPPEAQFKAQGRIFGKLKEENFFNPKEEVKLEAHIRVPSSTAGRVIGKGGKTVNELQNLTSAEVIVPRDQTPDENEEVIVRIIGHFFASQTAQRKIREIVQQVKQQEQKYPQGVASQRSK

SEQ ID NO: 21475 - protein, 153 aa, Artificial Sequence; identical to SEQ ID NO: 21474
  Synthetic polypeptide

SEQ ID NO: 21476 - protein, 153 aa, Artificial Sequence; identical to SEQ ID NO: 21474
  Synthetic polypeptide

SEQ ID NO: 21477 - protein, 153 aa, Artificial Sequence; identical to SEQ ID NO: 21474
  Synthetic polypeptide

SEQ ID NO: 21478 - protein, 503 aa, Artificial Sequence
  Synthetic polypeptide
PKEVIQKNTQSSDVCNKVNTDTETAVVNVTYATREEAKIAMEKLSGHQFENYSFKISYIPDEEVSSPSPPQRAQRGDHSSREQGHAPGGTSQARQIDFPLRILVPTQFVGAIIGKEGLTIKNITKQTQSRVDIHRKENSGAAEKPVTIHATPEGTSEACRMILEIMQKEADETKLAEEIPLKILAHNGLVGRLIGKEGRNLKKIEHETGTKITISSLQDLSIYNPERTITVKGTVEACASAEIEIMKKLREAFENDMLAVNQQANLIPGLNLSALGIFSTGLSVLSPPAGPRGAPPAAPYHPFTTHSGYFSSLYPHHQFGPFPHHHSYPEQEIVNLFIPTQAVGAIIGKKGAHIKQLARFAGASIKIAPAEGPDVSERMVIITGPPEAQFKAQGRIFGKLKEENFFNPKEEVKLEAHIRVPSSTAGRVIGKGGKTVNELQNLTSAEVIVPRDQTPDENEEVIVRIIGHFFASQTAQRKIREIVQQVKQQEQKYPQGVASQRSK

SEQ ID NO: 21479 - protein, 503 aa, Artificial Sequence; identical to SEQ ID NO: 21478
  Synthetic polypeptide

SEQ ID NO: 21480 - protein, 503 aa, Artificial Sequence; identical to SEQ ID NO: 21478
  Synthetic polypeptide

SEQ ID NO: 21481 - protein, 34 aa, Artificial Sequence
  Synthetic polypeptide
FRRTHNPVMFATKSTQTQKPPLSTSHMQQEKKQK

SEQ ID NO: 21482 - protein, 34 aa, Artificial Sequence; identical to SEQ ID NO: 21481
  Synthetic polypeptide

SEQ ID NO: 21483 - protein, 34 aa, Artificial Sequence; identical to SEQ ID NO: 21481
  Synthetic polypeptide

SEQ ID NO: 21484 - protein, 34 aa, Artificial Sequence; identical to SEQ ID NO: 21481
  Synthetic polypeptide

SEQ ID NO: 21485 - protein, 36 aa, Artificial Sequence
  Synthetic polypeptide
CLQQSQHRHRNRRCQRHICNKRRSKNSHGEAKRASV

SEQ ID NO: 21486 - protein, 36 aa, Artificial Sequence; identical to SEQ ID NO: 21485
  Synthetic polypeptide

SEQ ID NO: 21487 - protein, 36 aa, Artificial Sequence; identical to SEQ ID NO: 21485
  Synthetic polypeptide

SEQ ID NO: 21488 - protein, 36 aa, Artificial Sequence; identical to SEQ ID NO: 21485
  Synthetic polypeptide

SEQ ID NO: 21489 - protein, 460 aa, Artificial Sequence
  Synthetic polypeptide
PKEVIQKNTQSSDVCNKVNTDTETAVVNVTYATREEAKIAMEKLSGHQFENYSFKISYIPDEEVSSPSPPQRAQRGDHSSREQGHAPGGTSQARQIDFPLRILVPTQFVGAIIGKEGLTIKNITKQTQSRVDIHRKENSGAAEKPVTIHATPEGTSEACRMILEIMQKEADETKLAEEIPLKILAHNGLVGRLIGKEGRNLKKIEHETGTKITISSLQDLSIYNPERTITVKGTVEACASAEIEIMKKLREAFENDMLAVNTHSGYFSSLYPHHQFGPFPHHHSYPEQEIVNLFIPTQAVGAIIGKKGAHIKQLARFAGASIKIAPAEGPDVSERMVIITGPPEAQFKAQGRIFGKLKEENFFNPKEEVKLEAHIRVPSSTAGRVIGKGGKTVNELQNLTSAEVIVPRDQTPDENEEVIVRIIGHFFASQTAQRKIREIVQQVKQQEQKYPQGVASQRSK

SEQ ID NO: 21490 - protein, 25 aa, Artificial Sequence
  Synthetic polypeptide
ESWAQLLAGCVVLGSFKKKDLHDVP

SEQ ID NO: 21491 - protein, 25 aa, Artificial Sequence
  Synthetic polypeptide
ESWAQLLAGCVVLGSFKKKDLHDVP

SEQ ID NO: 21492 - protein, 25 aa, Artificial Sequence
  Synthetic polypeptide
ESWAQLLAGCVVLGSFKKKDLHDVP

SEQ ID NO: 21493 - protein, 25 aa, Artificial Sequence
  Synthetic polypeptide
ESWAQLLAGCVVLGSFKKKDLHDVP

SEQ ID NO: 21494 - protein, 242 aa, Artificial Sequence
  Synthetic polypeptide
AVSKKKIYMTCPDCPSSIPTDSSNHQVLEAATESLAKYNNENTSKQYSLFKVTRASSQWVVGPSYFVEYLIKESPCTKSQASSCSLQSSDSVPVGLCKGSLTRTHWEKFVSVTCDFFESQAPATGSENSAVNQKPTNLPKVEESQQKNTPPTDSPSKAGPRGSVQYLPDLDDKNSQEKGPQEAFPVHLDLTTNPQGETLDISFLFLEPMEEKLVVLPFPKEKARTAECPGPAQNASPLVLPP

SEQ ID NO: 21495 - protein, 242 aa, Artificial Sequence; identical to SEQ ID NO: 21494
  Synthetic polypeptide

SEQ ID NO: 21496 - protein, 242 aa, Artificial Sequence; identical to SEQ ID NO: 21494
  Synthetic polypeptide

SEQ ID NO: 21497 - protein, 242 aa, Artificial Sequence; identical to SEQ ID NO: 21494
  Synthetic polypeptide

SEQ ID NO: 21498 - protein, 21 aa, Artificial Sequence
  Synthetic polypeptide
VLGSTPGWMCGLRQFQKKRFT

SEQ ID NO: 21499 - protein, 21 aa, Artificial Sequence
  Synthetic polypeptide
VLGSTPGWMCGLRQFQKKRFT

SEQ ID NO: 21500 - protein, 21 aa, Artificial Sequence
  Synthetic polypeptide
VLGSTPGWMCGLRQFQKKRFT

SEQ ID NO: 21501 - protein, 21 aa, Artificial Sequence
  Synthetic polypeptide
VLGSTPGWMCGLRQFQKKRFT

SEQ ID NO: 21502 - protein, 21 aa, Artificial Sequence
  Synthetic polypeptide
VLGSTPGWMCGLRQFQKKRFT

SEQ ID NO: 21503 - protein, 22 aa, Artificial Sequence
  Synthetic polypeptide
ESWAQLLAGCVVLGSFKKKDLH

SEQ ID NO: 21504 - protein, 9 aa, Artificial Sequence
  Synthetic polypeptide
AVSKKKIYM

SEQ ID NO: 21505 - protein, 637 aa, Artificial Sequence
  Synthetic polypeptide
SILEDTEFLIPAADSEKVETEDQVLATFCGRETTDTEQTPGQEVVLSPGSFMSITFRSDFSNEERFTGFDAHYMAVDVDECKEREDEELSCDHYCHNYIGGYYCSCRFGYILHTDNRTCRVECSDNLFTQRTGVITSPDFPNPYPKSSECLYTIELEEGFMVNLQFEDIFDIEDHPEVPCPYDYIKIKVGPKVLGPFCGEKAPEPISTQSHSVLILFHSDNSGENRGWRLSYRAAGNECPELQPPVHGKIEPSQAKYFFKDQVLVSCDTGYKVLKDNVEMDTFQIECLKDGTWSNKIPTCKIVDCRAPGELEHGLITFSTRNNLTTYKSEIKYSCQEPYYKMLNNNTGIYTCSAQGVWMNKVLGRSLPTCLPVCGLPKFSRKLMARIFNGRPAQKGTTPWIAMLSHLNGQPFCGGSLLGSSWIVTAAHCLHQSLDPEDPTLRDSDLLSPSDFKIILGKHWRLRSDENEQHLGVKHTTLHPQYDPNTFENDVALVELLESPVLNAFVMPICLPEGPQQEGAMVIVSGWGKQFLQRFPETLMEIEIPIVDHSTCQKAYAPLKKKVTRDMICAGEKEGGKDACAGDSGGPMVTLNRERGQWYLVGTVSWGDDCGKKDRYGVYSYIHHNKDWIQRVTGVRN

SEQ ID NO: 21506 - protein, 29 aa, Artificial Sequence
  Synthetic polypeptide
TFKVKDNPKQPDLSWKILSFSSLQLIVKR

SEQ ID NO: 21507 - protein, 29 aa, Artificial Sequence
  Synthetic polypeptide
TFKVKDNPKQPDLSWKILSFSSLQLIVKR

SEQ ID NO: 21508 - protein, 29 aa, Artificial Sequence
  Synthetic polypeptide
TFKVKDNPKQPDLSWKILSFSSLQLIVKR

SEQ ID NO: 21509 - protein, 29 aa, Artificial Sequence
  Synthetic polypeptide
TFKVKDNPKQPDLSWKILSFSSLQLIVKR

SEQ ID NO: 21510 - protein, 29 aa, Artificial Sequence
  Synthetic polypeptide
TFKVKDNPKQPDLSWKILSFSSLQLIVKR

SEQ ID NO: 21511 - protein, 29 aa, Artificial Sequence
  Synthetic polypeptide
TFKVKDNPKQPDLSWKILSFSSLQLIVKR

SEQ ID NO: 21512 - protein, 29 aa, Artificial Sequence
  Synthetic polypeptide
TFKVKDNPKQPDLSWKILSFSSLQLIVKR

SEQ ID NO: 21513 - protein, 4 aa, Artificial Sequence
  Synthetic polypeptide
KGRN

SEQ ID NO: 21514 - protein, 4 aa, Artificial Sequence
  Synthetic polypeptide
KGRN

SEQ ID NO: 21515 - protein, 4 aa, Artificial Sequence
  Synthetic polypeptide
KGRN

SEQ ID NO: 21516 - protein, 4 aa, Artificial Sequence
  Synthetic polypeptide
KGRN

SEQ ID NO: 21517 - protein, 4 aa, Artificial Sequence
  Synthetic polypeptide
KGRN

SEQ ID NO: 21518 - protein, 4 aa, Artificial Sequence
  Synthetic polypeptide
KGRN

SEQ ID NO: 21519 - protein, 666 aa, Artificial Sequence
  Synthetic polypeptide
SILEDTEFLIPAADSEKVETEDQVLATFCGRETTDTEQTPGQEVVLSPGSFMSITFRSDFSNEERFTGFDAHYMAVDVDECKEREDEELSCDHYCHNYIGGYYCSCRFGYILHTDNRTCRVECSDNLFTQRTGVITSPDFPNPYPKSSECLYTIELEEGFMVNLQFEDIFDIEDHPEVPCPYDYIKIKVGPKVLGPFCGEKAPEPISTQSHSVLILFHSDNSGENRGWRLSYRAAGNECPELQPPVHGKIEPSQAKYFFKDQVLVSCDTGYKVLKDNVEMDTFQIECLKDGTWSNKIPTCKIVDCRAPGELEHGLITFSTRNNLTTYKSEIKYSCQEPYYKMLNNNTGIYTCSAQGVWMNKVLGRSLPTCLPECGQPSRSLPSLVKRIIGGRNAEPGLFPWQALIVVEDTSRVPNDKWFGSGALLSASWILTAAHVLRSQRRDTTVIPVSKEHVTVYLGLHDVRDKSGAVNSSAARVVLHPDFNIQNYNHDIALVQLQEPVPLGPHVMPVCLPRLEPEGPAPHMLGLVAGWGISNPNVTVDEIISSGTRTLSDVLQYVKLPVVPHAECKTSYESRSGNYSVTENMFCAGYYEGGKDTCLGDSGGAFVIFDDLSQRWVVQGLVSWGGPEECGSKQVYGVYTKVSNYVDWVWEQMGLPQSVVEPQVER

SEQ ID NO: 21520 - protein, 318 aa, Artificial Sequence
  Synthetic polypeptide
SILEDTEFLIPAADSEKVETEDQVLATFCGRETTDTEQTPGQEVVLSPGSFMSITFRSDFSNEERFTGFDAHYMAVDVDECKEREDEELSCDHYCHNYIGGYYCSCRFGYILHTDNRTCRVECSDNLFTQRTGVITSPDFPNPYPKSSECLYTIELEEGFMVNLQFEDIFDIEDHPEVPCPYDYIKIKVGPKVLGPFCGEKAPEPISTQSHSVLILFHSDNSGENRGWRLSYRAAGNECPELQPPVHGKIEPSQAKYFFKDQVLVSCDTGYKVLKDNVEMDTFQIECLKDGTWSNKIPTCKKNEIDLESELKSEQVTE

SEQ ID NO: 21521 - protein, 318 aa, Artificial Sequence; identical to SEQ ID NO: 21520
  Synthetic polypeptide

SEQ ID NO: 21522 - protein, 135 aa, Artificial Sequence
  Synthetic polypeptide
SILEDTEFLIPAADSEKVETEDQVLATFCGRETTDTEQTPGQEVVLSPGSFMSITFRSDFSNEERFTGFDAHYMAVDVDECKEREDEELSCDHYCHNYIGGYYCSCRFGYILHTDNRTCRVECSDNLFTQRTGVI

SEQ ID NO: 21523 - protein, 30 aa, Artificial Sequence
  Synthetic polypeptide
SILEDTEFLIPAADSEKVETEDQVLATFCG

SEQ ID NO: 21524 - protein, 19 aa, Artificial Sequence
  Synthetic polypeptide
SILEDTEFLIPAADSEKVE

SEQ ID NO: 21525 - protein, 3 aa, Artificial Sequence
  Synthetic polypeptide
KGR

SEQ ID NO: 21526 - protein, 65 aa, Artificial Sequence
  Synthetic polypeptide
SSDLLLSLPACPILPQVPVFLLPAKLGFRPSADSVPHVLGALDIPGSGAYEALWPKVPEVLLVPI

SEQ ID NO: 21527 - protein, 210 aa, Artificial Sequence
  Synthetic polypeptide
HLTYYSACLPAPSCLRFRCSSCQRSWASAQVQILCHTYWEHWTSQGQVRMRLFGQRCQKCSWSQYEMPEFSSDSTMRILSNLVQHILKKYYGNGTRKSPEMPVILEVSLEGSHDTANCEACTLGICGQGLKSCMTKPSKSLLPHLKTGNSSPGIGAVYLANQAKNQSAEAKEAKGSGYEKLGPSRDPDPLNICVFILLLVFIVVKCFTSE

SEQ ID NO: 21528 - protein, 47 aa, Artificial Sequence
  Synthetic polypeptide
PITQLACLPHPASGSGVPPASEVGLPPKCRFCATRTGSTGHPRVRCV

SEQ ID NO: 21529 - protein, 56 aa, Artificial Sequence
  Synthetic polypeptide
RGNVLQQVPVFLLPAKLGFRPSADSVPHVLGALDIPGSGAYEALWPKVPEVLLVPI

SEQ ID NO: 21530 - protein, 201 aa, Artificial Sequence
  Synthetic polypeptide
EATCYSRFRCSSCQRSWASAQVQILCHTYWEHWTSQGQVRMRLFGQRCQKCSWSQYEMPEFSSDSTMRILSNLVQHILKKYYGNGTRKSPEMPVILEVSLEGSHDTANCEACTLGICGQGLKSCMTKPSKSLLPHLKTGNSSPGIGAVYLANQAKNQSAEAKEAKGSGYEKLGPSRDPDPLNICVFILLLVFIVVKCFTSE

SEQ ID NO: 21531 - protein, 40 aa, Artificial Sequence
  Synthetic polypeptide
RQRVTAGSGVPPASEVGLPPKCRFCATRTGSTGHPRVRCV

SEQ ID NO: 21532 - protein, 14 aa, Artificial Sequence
  Synthetic polypeptide
IGGHPAWCLLLVFH

SEQ ID NO: 21533 - protein, 14 aa, Artificial Sequence
  Synthetic polypeptide
IGGHPAWCLLLVFH

SEQ ID NO: 21534 - protein, 14 aa, Artificial Sequence
  Synthetic polypeptide
IGGHPAWCLLLVFH

SEQ ID NO: 21535 - protein, 14 aa, Artificial Sequence
  Synthetic polypeptide
IGGHPAWCLLLVFH

SEQ ID NO: 21536 - protein, 14 aa, Artificial Sequence
  Synthetic polypeptide
IGGHPAWCLLLVFH

SEQ ID NO: 21537 - protein, 14 aa, Artificial Sequence
  Synthetic polypeptide
IGGHPAWCLLLVFH

SEQ ID NO: 21538 - protein, 14 aa, Artificial Sequence
  Synthetic polypeptide
IGGHPAWCLLLVFH

SEQ ID NO: 21539 - protein, 14 aa, Artificial Sequence
  Synthetic polypeptide
IGGHPAWCLLLVFH

SEQ ID NO: 21540 - protein, 14 aa, Artificial Sequence
  Synthetic polypeptide
IGGHPAWCLLLVFH

SEQ ID NO: 21541 - protein, 14 aa, Artificial Sequence
  Synthetic polypeptide
IGGHPAWCLLLVFH

SEQ ID NO: 21542 - protein, 14 aa, Artificial Sequence
  Synthetic polypeptide
IGGHPAWCLLLVFH

SEQ ID NO: 21543 - protein, 14 aa, Artificial Sequence
  Synthetic polypeptide
IGGHPAWCLLLVFH

SEQ ID NO: 21544 - protein, 14 aa, Artificial Sequence
  Synthetic polypeptide
IGGHPAWCLLLVFH

SEQ ID NO: 21545 - protein, 516 aa, Artificial Sequence
  Synthetic polypeptide
VFNLCDMTDLRVDSVTVELEDTQLGVCCLYSTELKKLYCQIAKTCPIQIKVMTPPPQGAVIRAMPVYKKAEHVTEVVKRCPNHELSREFNEGQIAPPSHLIRVEGNSHAQYVEDPITGRQSVLVPYEPPQVGTEFTTVLYNFMCNSSCVGGMNRRPILIIVTLETRDGQVLGRRCFEARICACPGRDRKADEDSIRKQQVSDSTKNGDGTKRPFRQNTHGIQMTSIKKRRSPDDELLYLPVRGRETYEMLLKIKESLELMQYLPQHTIETYRQQQQQQHQHLLQKQTSIQSPSSYGNSSPPLNKMNSMNKLPSVSQLINPQQRNALTPTTIPDGMGANIPMMGTHMPMAGDMNGLSPTQALPPPLSMPSTSHCTPPPPYPTDCSIVSFLARLGCSSCLDYFTTQGLTTIYQIEHYSMDDLASLKIPEQFRHAIWKGILDHRQLHEFSSPSHLLRTPSSASTVSVGSSETRGERVIDAVRFTLRQTISFPPRDEWNDFNFDMDARRNKQQRIKEEGE

SEQ ID NO: 21546 - protein, 516 aa, Artificial Sequence; identical to SEQ ID NO: 21545
  Synthetic polypeptide

SEQ ID NO: 21547 - protein, 516 aa, Artificial Sequence; identical to SEQ ID NO: 21545
  Synthetic polypeptide

SEQ ID NO: 21548 - protein, 516 aa, Artificial Sequence; identical to SEQ ID NO: 21545
  Synthetic polypeptide

SEQ ID NO: 21549 - protein, 21 aa, Artificial Sequence
  Synthetic polypeptide
TVSQLNWRTPSLVSAACIPLN

SEQ ID NO: 21550 - protein, 21 aa, Artificial Sequence
  Synthetic polypeptide
TVSQLNWRTPSLVSAACIPLN

SEQ ID NO: 21551 - protein, 21 aa, Artificial Sequence
  Synthetic polypeptide
TVSQLNWRTPSLVSAACIPLN

SEQ ID NO: 21552 - protein, 21 aa, Artificial Sequence
  Synthetic polypeptide
TVSQLNWRTPSLVSAACIPLN

SEQ ID NO: 21553 - protein, 21 aa, Artificial Sequence
  Synthetic polypeptide
TVSQLNWRTPSLVSAACIPLN

SEQ ID NO: 21554 - protein, 21 aa, Artificial Sequence
  Synthetic polypeptide
TVSQLNWRTPSLVSAACIPLN

SEQ ID NO: 21555 - protein, 21 aa, Artificial Sequence
  Synthetic polypeptide
TVSQLNWRTPSLVSAACIPLN

SEQ ID NO: 21556 - protein, 21 aa, Artificial Sequence
  Synthetic polypeptide
TVSQLNWRTPSLVSAACIPLN

SEQ ID NO: 21557 - protein, 21 aa, Artificial Sequence
  Synthetic polypeptide
TVSQLNWRTPSLVSAACIPLN

SEQ ID NO: 21558 - protein, 21 aa, Artificial Sequence
  Synthetic polypeptide
TVSQLNWRTPSLVSAACIPLN

SEQ ID NO: 21559 - protein, 21 aa, Artificial Sequence
  Synthetic polypeptide
TVSQLNWRTPSLVSAACIPLN

SEQ ID NO: 21560 - protein, 21 aa, Artificial Sequence
  Synthetic polypeptide
TVSQLNWRTPSLVSAACIPLN

SEQ ID NO: 21561 - protein, 21 aa, Artificial Sequence
  Synthetic polypeptide
TVSQLNWRTPSLVSAACIPLN

SEQ ID NO: 21562 - protein, 323 aa, Artificial Sequence
  Synthetic polypeptide
VFNLCDMTDLRVDSVTVELEDTQLGVCCLYSTELKKLYCQIAKTCPIQIKVMTPPPQGAVIRAMPVYKKAEHVTEVVKRCPNHELSREFNEGQIAPPSHLIRVEGNSHAQYVEDPITGRQSVLVPYEPPQVGTEFTTVLYNFMCNSSCVGGMNRRPILIIVTLETRDGQVLGRRCFEARICACPGRDRKADEDSIRKQQVSDSTKNGDGTKRPFRQNTHGIQMTSIKKRRSPDDELLYLPVRGRETYEMLLKIKESLELMQYLPQHTIETYRQQQQQQHQHLLQKHLLSACFRNELVEPRRETPKQSDVFFRHSKPPNRSVYP

SEQ ID NO: 21563 - protein, 323 aa, Artificial Sequence; identical to SEQ ID NO: 21562
  Synthetic polypeptide

SEQ ID NO: 21564 - protein, 346 aa, Artificial Sequence
  Synthetic polypeptide
VFNLCDMTDLRVDSVTVELEDTQLGVCCLYSTELKKLYCQIAKTCPIQIKVMTPPPQGAVIRAMPVYKKAEHVTEVVKRCPNHELSREFNEGQIAPPSHLIRVEGNSHAQYVEDPITGRQSVLVPYEPPQVGTEFTTVLYNFMCNSSCVGGMNRRPILIIVTLETRDGQVLGRRCFEARICACPGRDRKADEDSIRKQQVSDSTKNGDGTKRPFRQNTHGIQMTSIKKRRSPDDELLYLPVRGRETYEMLLKIKESLELMQYLPQHTIETYRQQQQQQHQHLLQKQTSIQSPSSYGNSSPPLNKMNSMNKLPSVSQLINPQQRNALTPTTIPDGMGANRSGKSENP

SEQ ID NO: 21565 - protein, 346 aa, Artificial Sequence; identical to SEQ ID NO: 21564
  Synthetic polypeptide

SEQ ID NO: 21566 - protein, 391 aa, Artificial Sequence
  Synthetic polypeptide
VFNLCDMTDLRVDSVTVELEDTQLGVCCLYSTELKKLYCQIAKTCPIQIKVMTPPPQGAVIRAMPVYKKAEHVTEVVKRCPNHELSREFNEGQIAPPSHLIRVEGNSHAQYVEDPITGRQSVLVPYEPPQVGTEFTTVLYNFMCNSSCVGGMNRRPILIIVTLETRDGQVLGRRCFEARICACPGRDRKADEDSIRKQQVSDSTKNGDGTKRPFRQNTHGIQMTSIKKRRSPDDELLYLPVRGRETYEMLLKIKESLELMQYLPQHTIETYRQQQQQQHQHLLQKQTSIQSPSSYGNSSPPLNKMNSMNKLPSVSQLINPQQRNALTPTTIPDGMGANIPMMGTHMPMAGDMNGLSPTQALPPPLSMPSTSHCTPPPPYPTDCSIVRIWQV

SEQ ID NO: 21567 - protein, 391 aa, Artificial Sequence; identical to SEQ ID NO: 21566
  Synthetic polypeptide

SEQ ID NO: 21568 - protein, 512 aa, Artificial Sequence
  Synthetic polypeptide
VFNLCDMTDLRVDSVTVELEDTQLGVCCLYSTELKKLYCQIAKTCPIQIKVMTPPPQGAVIRAMPVYKKAEHVTEVVKRCPNHELSREFNEGQIAPPSHLIRVEGNSHAQYVEDPITGRQSVLVPYEPPQVGTEFTTVLYNFMCNSSCVGGMNRRPILIIVTLETRDGQVLGRRCFEARICACPGRDRKADEDSIRKQQVSDSTKNGDAFRQNTHGIQMTSIKKRRSPDDELLYLPVRGRETYEMLLKIKESLELMQYLPQHTIETYRQQQQQQHQHLLQKQTSIQSPSSYGNSSPPLNKMNSMNKLPSVSQLINPQQRNALTPTTIPDGMGANIPMMGTHMPMAGDMNGLSPTQALPPPLSMPSTSHCTPPPPYPTDCSIVSFLARLGCSSCLDYFTTQGLTTIYQIEHYSMDDLASLKIPEQFRHAIWKGILDHRQLHEFSSPSHLLRTPSSASTVSVGSSETRGERVIDAVRFTLRQTISFPPRDEWNDFNFDMDARRNKQQRIKEEGE

SEQ ID NO: 21569 - protein, 512 aa, Artificial Sequence; identical to SEQ ID NO: 21568
  Synthetic polypeptide

SEQ ID NO: 21570 - protein, 41 aa, Artificial Sequence
  Synthetic polypeptide
VFNLCDMTDLRVDSVTVELEDTQLGVCCLYSTELKKLYCQI

SEQ ID NO: 21571 - protein, 166 aa, Artificial Sequence
  Synthetic polypeptide
IPEITSYHAGLSSLVATSEKPTFILQTEEGTLQATRALMVVGILLGVIAIFVATVGMKCMKCLEDDEVQKMRMAVIGGAIFLLAGLAILVATAWYGNRIVQEFYDPMTPVNARYEFGQALFTGWAAASLCLLGGALLCCSCPRKTTSYPTPRPYPKPAPSSGKDYV

SEQ ID NO: 21572 - protein, 66 aa, Artificial Sequence
  Synthetic polypeptide
VPYAPATDLFFCSLQTTRSSLLLGFCALRSLKSPHIMQVSAHLSPLQRNLLSSSKLKKAHCKQPVP

SEQ ID NO: 21573 - protein, 38 aa, Artificial Sequence
  Synthetic polypeptide
RRHIASNPCLDGGWHPPGSDSNLCGHRWHEVYEVLGRR

SEQ ID NO: 21574 - protein, 60 aa, Artificial Sequence
  Synthetic polypeptide
FLHFHLRYRVHLTRECQTVGAVCMYREPSLHEIGEKQGRSRKSSGTPTMNGGKVVNQDST

SEQ ID NO: 21575 - protein, 60 aa, Artificial Sequence; identical to SEQ ID NO: 21574
  Synthetic polypeptide

SEQ ID NO: 21576 - protein, 60 aa, Artificial Sequence; identical to SEQ ID NO: 21574
  Synthetic polypeptide

SEQ ID NO: 21577 - protein, 60 aa, Artificial Sequence; identical to SEQ ID NO: 21574
  Synthetic polypeptide

SEQ ID NO: 21578 - protein, 60 aa, Artificial Sequence; identical to SEQ ID NO: 21574
  Synthetic polypeptide

SEQ ID NO: 21579 - protein, 60 aa, Artificial Sequence; identical to SEQ ID NO: 21574
  Synthetic polypeptide

SEQ ID NO: 21580 - protein, 42 aa, Artificial Sequence
  Synthetic polypeptide
GTGFISLGSARQWAQCVCTENHRYMKLEKNKGVQGKVLEHQP

SEQ ID NO: 21581 - protein, 42 aa, Artificial Sequence; identical to SEQ ID NO: 21580
  Synthetic polypeptide

SEQ ID NO: 21582 - protein, 42 aa, Artificial Sequence; identical to SEQ ID NO: 21580
  Synthetic polypeptide

SEQ ID NO: 21583 - protein, 42 aa, Artificial Sequence; identical to SEQ ID NO: 21580
  Synthetic polypeptide

SEQ ID NO: 21584 - protein, 42 aa, Artificial Sequence; identical to SEQ ID NO: 21580
  Synthetic polypeptide

SEQ ID NO: 21585 - protein, 42 aa, Artificial Sequence; identical to SEQ ID NO: 21580
  Synthetic polypeptide

SEQ ID NO: 21586 - protein, 17 aa, Artificial Sequence
  Synthetic polypeptide
GVPDSGRSVYVQRTIAT

SEQ ID NO: 21587 - protein, 17 aa, Artificial Sequence
  Synthetic polypeptide
GVPDSGRSVYVQRTIAT

SEQ ID NO: 21588 - protein, 17 aa, Artificial Sequence
  Synthetic polypeptide
GVPDSGRSVYVQRTIAT

SEQ ID NO: 21589 - protein, 17 aa, Artificial Sequence
  Synthetic polypeptide
GVPDSGRSVYVQRTIAT

SEQ ID NO: 21590 - protein, 17 aa, Artificial Sequence
  Synthetic polypeptide
GVPDSGRSVYVQRTIAT

SEQ ID NO: 21591 - protein, 17 aa, Artificial Sequence
  Synthetic polypeptide
GVPDSGRSVYVQRTIAT

SEQ ID NO: 21592 - protein, 17 aa, Artificial Sequence
  Synthetic polypeptide
GVPDSGRSVYVQRTIAT

SEQ ID NO: 21593 - protein, 44 aa, Artificial Sequence
  Synthetic polypeptide
FLHFHLRYRVHLTRECQTVGAVCMYREPSLHEIGEKQGRSRKSS

SEQ ID NO: 21594 - protein, 37 aa, Artificial Sequence
  Synthetic polypeptide
GTGFISLGSARQWAQCVCTENHRYMKLEKNKGVQGKV

SEQ ID NO: 21595 - protein, 16 aa, Artificial Sequence
  Synthetic polypeptide
FLHFHLSVYVQRTIAT

SEQ ID NO: 21596 - protein, 16 aa, Artificial Sequence
  Synthetic polypeptide
FLHFHLSVYVQRTIAT

SEQ ID NO: 21597 - protein, 16 aa, Artificial Sequence
  Synthetic polypeptide
FLHFHLSVYVQRTIAT

SEQ ID NO: 21598 - protein, 16 aa, Artificial Sequence
  Synthetic polypeptide
FLHFHLSVYVQRTIAT

SEQ ID NO: 21599 - protein, 16 aa, Artificial Sequence
  Synthetic polypeptide
FLHFHLSVYVQRTIAT

SEQ ID NO: 21600 - protein, 16 aa, Artificial Sequence
  Synthetic polypeptide
FLHFHLSVYVQRTIAT

SEQ ID NO: 21601 - protein, 16 aa, Artificial Sequence
  Synthetic polypeptide
FLHFHLSVYVQRTIAT

SEQ ID NO: 21602 - protein, 55 aa, Artificial Sequence
  Synthetic polypeptide
DGRIGTAPVYSSQREQCRRPVISAFPSECVCTENHRYMKLEKNKGVQGKVLEHQP

SEQ ID NO: 21603 - protein, 55 aa, Artificial Sequence; identical to SEQ ID NO: 21602
  Synthetic polypeptide

SEQ ID NO: 21604 - protein, 55 aa, Artificial Sequence; identical to SEQ ID NO: 21602
  Synthetic polypeptide

SEQ ID NO: 21605 - protein, 55 aa, Artificial Sequence; identical to SEQ ID NO: 21602
  Synthetic polypeptide

SEQ ID NO: 21606 - protein, 55 aa, Artificial Sequence; identical to SEQ ID NO: 21602
  Synthetic polypeptide

SEQ ID NO: 21607 - protein, 55 aa, Artificial Sequence; identical to SEQ ID NO: 21602
  Synthetic polypeptide

SEQ ID NO: 21608 - protein, 50 aa, Artificial Sequence
  Synthetic polypeptide
DGRIGTAPVYSSQREQCRRPVISAFPSECVCTENHRYMKLEKNKGVQGKV

SEQ ID NO: 21609 - protein, 688 aa, Artificial Sequence
  Synthetic polypeptide
DPSLGPSTRRADTAMTTDDTEVPAMTLAPGHAALETQTLSAETSSRASTPAGPIPEAETRGAKRISPARETRSFTKTSPNFMVLIATSVETSAASGSPEGAGMTTVQTITGSDPREAIFDTLCTDDSSEEAKTLTMDILTLAHTSTEAKGLSSESSASSDSPHPVITPSRASESSASSDGPHPVITPSRASESSASSDGPHPVITPSRASESSASSDGPHPVITPSRASESSASSDGPHPVITPSRASESSASSDGPHPVITPSRASESSASSDGPHPVITPSRASESSASSDGPHPVITPSRASESSASSDGPHPVITPSRASESSASSDGLHPVITPSRASESSASSDGPHPVITPSRASESSASSDGPHPVITPSWSPGSDVTLLAEALVTVTNIEVINCSITEIETTTSSIPGASDTDLIPTEGVKASSTSDPPALPDSTEAKPHITEVTASAETLSTAGTTESAAPDATVGTPLPTNSATEREVTAPGATTLSGALVTVSRNPLEETSALSVETPSYVKVSGAAPVSIEAGSAVGKTTSFAGSSASSYSPSEAALKNFTPSETPTMDIATKGPFPTSRDPLPSVPPTTTNSSRGTNSTLAKITTSAKTTMKPPTATPTTARTRPTTDVSAGENGGFLLLRLSVASPEDLTDPRVAERLMQQLHRELHAHAPHFQVSLLRVRRG

SEQ ID NO: 21610 - protein, 47 aa, Artificial Sequence
  Synthetic polypeptide
RAVFSLRPIPRPQHPQSRHCDDNGRHRSARYDSSTGPRRSGNSNAER

SEQ ID NO: 21611 - protein, 47 aa, Artificial Sequence; identical to SEQ ID NO: 21610
  Synthetic polypeptide

SEQ ID NO: 21612 - protein, 47 aa, Artificial Sequence; identical to SEQ ID NO: 21610
  Synthetic polypeptide

SEQ ID NO: 21613 - protein, 517 aa, Artificial Sequence
  Synthetic polypeptide
DPSLGPSTRRADTAMTTDDTEVPAMTLAPGHAALETQTLSAETSSRASTPAGPIPEAETRGAKRISPARETRSFTKTSPNFMVLIATSVETSAASGSPEGAGMTTVQTITGSDPREAIFDTLCTDDSSEEAKTLTMDILTLAHTSTEAKGLSSESSASSDSPHPVITPSRASESSASSDGPHPVITPSRASESSASSDGPHPVITPSWSPGSDVTLLAEALVTVTNIEVINCSITEIETTTSSIPGASDTDLIPTEGVKASSTSDPPALPDSTEAKPHITEVTASAETLSTAGTTESAAPDATVGTPLPTNSATEREVTAPGATTLSGALVTVSRNPLEETSALSVETPSYVKVSGAAPVSIEAGSAVGKTTSFAGSSASSYSPSEAALKNFTPSETPTMDIATKGPFPTSRDPLPSVPPTTTNSSRGTNSTLAKITTSAKTTMKPPTATPTTARTRPTTDVSAGENGGFLLLRLSVASPEDLTDPRVAERLMQQLHRELHAHAPHFQVSLLRVRRG

SEQ ID NO: 21614 - protein, 702 aa, Artificial Sequence
  Synthetic polypeptide
DPSLGPSTRRADTAMTTDDTEVPAMTLAPGHAALETQTLSAETSSRASTPAGPIPEAETRGAKRISPARETRSFTKTSPNFMVLIATSVETSAASGSPEGAGMTTVQTITGSDPREAIFDTLCTDDSSEEAKTLTMDILTLAHTSTEAKGLSSESSASSDSPHPVITPSRASESSASSDGPHPVITPSRASESSASSDGPHPVITPSRASESSASSDGPHPVITPSRASESSASSDGPHPVITPSRASESSASSDGPHPVITPSRASESSASSDGPHPVITPSRASESSASSDGPHPVITPSRASESSASSDGPHPVITPSRASESSASSDGLHPVITPSRASESSASSDGPHPVITPSRASESSASSDGPHPVITPSWSPGSDVTLLAEALVTVTNIEVINCSITEIETTTSSIPGASDTDLIPTEGVKASSTSDPPALPDSTEAKPHITEVTASAETLSTAGTTESAAPDATVGTPLPTNSATEREVTAPGATTLSGALVTVSRNPLEETSALSVETPSYVKVSGAAPVSIEAGSAVGKTTSFAGSSASSYSPSEAALKNFTPSETPTMDIATKGPFPTSRDPLPSVPPTTTNSSRGTNSTLAKITTSAKTTMKPPTATPTTARTRPTTDVSAGENGGFLLLRLSVASPEDLTDPRVAERLMQQMERSLALSPRLECSGVISAHCKLHLLGSRDSPASAS

SEQ ID NO: 21615 - protein, 27 aa, Artificial Sequence
  Synthetic polypeptide
GWVQWLMPVLPALWEAEAPAPAEQTLR

SEQ ID NO: 21616 - protein, 27 aa, Artificial Sequence
  Synthetic polypeptide
GWVQWLMPVLPALWEAEAPAPAEQTLR

SEQ ID NO: 21617 - protein, 27 aa, Artificial Sequence
  Synthetic polypeptide
GWVQWLMPVLPALWEAEAPAPAEQTLR

SEQ ID NO: 21618 - protein, 53 aa, Artificial Sequence
  Synthetic polypeptide
AGCSGSCLYSQHFGRLRPQHPQSRHCDDNGRHRSARYDSSTGPRRSGNSNAER

SEQ ID NO: 21619 - protein, 53 aa, Artificial Sequence; identical to SEQ ID NO: 21618
  Synthetic polypeptide

SEQ ID NO: 21620 - protein, 53 aa, Artificial Sequence; identical to SEQ ID NO: 21618
  Synthetic polypeptide

SEQ ID NO: 21621 - protein, 16 aa, Artificial Sequence
  Synthetic polypeptide
GQEFETSLANMARPGA

SEQ ID NO: 21622 - protein, 16 aa, Artificial Sequence
  Synthetic polypeptide
GQEFETSLANMARPGA

SEQ ID NO: 21623 - protein, 16 aa, Artificial Sequence
  Synthetic polypeptide
GQEFETSLANMARPGA

SEQ ID NO: 21624 - protein, 16 aa, Artificial Sequence
  Synthetic polypeptide
GQEFETSLANMARPGA

SEQ ID NO: 21625 - protein, 16 aa, Artificial Sequence
  Synthetic polypeptide
GQEFETSLANMARPGA

SEQ ID NO: 21626 - protein, 30 aa, Artificial Sequence
  Synthetic polypeptide
SPALWEAKEGGSPEVRSSRPAWPTWRDQAL

SEQ ID NO: 21627 - protein, 30 aa, Artificial Sequence; identical to SEQ ID NO: 21626
  Synthetic polypeptide

SEQ ID NO: 21628 - protein, 30 aa, Artificial Sequence; identical to SEQ ID NO: 21626
  Synthetic polypeptide

SEQ ID NO: 21629 - protein, 30 aa, Artificial Sequence; identical to SEQ ID NO: 21626
  Synthetic polypeptide

SEQ ID NO: 21630 - protein, 30 aa, Artificial Sequence; identical to SEQ ID NO: 21626
  Synthetic polypeptide

SEQ ID NO: 21631 - protein, 38 aa, Artificial Sequence
  Synthetic polypeptide
MGTVAHGCNPQHCGRPRREDHLRSGVRDQPGQHGETRR

SEQ ID NO: 21632 - protein, 38 aa, Artificial Sequence; identical to SEQ ID NO: 21631
  Synthetic polypeptide

SEQ ID NO: 21633 - protein, 38 aa, Artificial Sequence; identical to SEQ ID NO: 21631
  Synthetic polypeptide

SEQ ID NO: 21634 - protein, 38 aa, Artificial Sequence; identical to SEQ ID NO: 21631
  Synthetic polypeptide

SEQ ID NO: 21635 - protein, 38 aa, Artificial Sequence; identical to SEQ ID NO: 21631
  Synthetic polypeptide

SEQ ID NO: 21636 - protein, 551 aa, Artificial Sequence
  Synthetic polypeptide
QLTLSMPLFPLECEPDEESWGKLVHANFGTKKDFEDLYTPVNGSIVIVRAGKITFAEKVANAESLNAIGVLIYMDQTKFPIVNAELSFFGHAHLGTGDPYTPGFPSFNHTQFPPSRSSGLPNIPVQTISRAAAEKLFGNMEGDCPSDWKTDSTCRMVTSESKNVKLTVSNVLKEIKILNIFGVIKGFVEPDHYVVVGAQRDAWGPGAAKSGVGTALLLKLAQMFSDMVLKDGFQPSRSIIFASWSAGDFGSVGATEWLEGYLSSLHLKAFTYINLDKAVLGTSNFKVSASPLLYTLIEKTMQNVKHPVTGQFLYQDSNWASKVEKLTLDNAAFPFLAYSGIPAVSFCFCEDTDYPYLGTTMDTYKELIERIPELNKVARAAAEVAGQFVIKLTHDVELNLDYERYNSQLLSFVRDLNQYRADIKEMGLSLQWLYSARGDFFRATSRLTTDFGNAEKTDRFVMKKLNDRVMRVEYHFLSPYVSPKESPFRHVFWGSGSHTLPALLENLKLRKQNNGAFNETLFRNQLALATWTIQGAANALSGDVWDIDNEF

SEQ ID NO: 21637 - protein, 551 aa, Artificial Sequence; identical to SEQ ID NO: 21636
  Synthetic polypeptide

SEQ ID NO: 21638 - protein, 551 aa, Artificial Sequence; identical to SEQ ID NO: 21636
  Synthetic polypeptide

SEQ ID NO: 21639 - protein, 29 aa, Artificial Sequence
  Synthetic polypeptide
NVSQMKNHGVNWSMLILVLKKILRIYTLL

SEQ ID NO: 21640 - protein, 29 aa, Artificial Sequence
  Synthetic polypeptide
NVSQMKNHGVNWSMLILVLKKILRIYTLL

SEQ ID NO: 21641 - protein, 29 aa, Artificial Sequence
  Synthetic polypeptide
NVSQMKNHGVNWSMLILVLKKILRIYTLL

SEQ ID NO: 21642 - protein, 4 aa, Artificial Sequence
  Synthetic polypeptide
RIMG

SEQ ID NO: 21643 - protein, 4 aa, Artificial Sequence
  Synthetic polypeptide
RIMG

SEQ ID NO: 21644 - protein, 4 aa, Artificial Sequence
  Synthetic polypeptide
RIMG

SEQ ID NO: 21645 - protein, 124 aa, Artificial Sequence
  Synthetic polypeptide
WNKERIYCRHCKQEQLVNVIVMVSENFDIEAPNYLSKESEVLIYARRDSQCIDCFQAFLPVHCRYHRPHSEDGEASIVVNNPDLLMFCDQEFPILKCWAHSEVAAPCALENEDICQWNKMKYKS

SEQ ID NO: 21646 - protein, 15 aa, Artificial Sequence
  Synthetic polypeptide
ARTTGKCYSDGFRKF

SEQ ID NO: 21647 - protein, 15 aa, Artificial Sequence
  Synthetic polypeptide
ARTTGKCYSDGFRKF

SEQ ID NO: 21648 - protein, 15 aa, Artificial Sequence
  Synthetic polypeptide
ARTTGKCYSDGFRKF

SEQ ID NO: 21649 - protein, 15 aa, Artificial Sequence
  Synthetic polypeptide
ARTTGKCYSDGFRKF

SEQ ID NO: 21650 - protein, 15 aa, Artificial Sequence
  Synthetic polypeptide
ARTTGKCYSDGFRKF

SEQ ID NO: 21651 - protein, 15 aa, Artificial Sequence
  Synthetic polypeptide
ARTTGKCYSDGFRKF

SEQ ID NO: 21652 - protein, 171 aa, Artificial Sequence
  Synthetic polypeptide
WNKERIYCRHCKQEQLVNVIVMVSENFDIEAPNYLSKESEVLIYARRDSQCIDCFQAFLPVHCRYHRPHSEDGEASIVVNNPDLLMFCDQEFPILKCWAHSEVAAPCALENEDICQWNKMKYKSVYKNVILQVPVGLTVHTSLVCSVTLLITILCSTLILVAVFKYGHFSL

SEQ ID NO: 21653 - protein, 171 aa, Artificial Sequence; identical to SEQ ID NO: 21652
  Synthetic polypeptide

SEQ ID NO: 21654 - protein, 189 aa, Artificial Sequence
  Synthetic polypeptide
WNKERIYCRHCKQEQLVNVIVMVSENFDIEAPNYLSKESEVLIYARRDSQCIDCFQAFLPVHCRYHRPHSEDGEASIVVNNPDLLMFCDQAGSRRMIRFRFDSFDKTIEFPILKCWAHSEVAAPCALENEDICQWNKMKYKSVYKNVILQVPVGLTVHTSLVCSVTLLITILCSTLILVAVFKYGHFSL

SEQ ID NO: 21655 - protein, 104 aa, Artificial Sequence
  Synthetic polypeptide
WNKERIYCRHCKQEQLVNVIVMVSENFDIEAPNYLSKESEVLIYARRDSQCIDCFQAFLPVHCRYHRPHSEDGEASIVVNNPDLLMFCDQGEGCKCFLRVETSE

SEQ ID NO: 21656 - protein, 81 aa, Artificial Sequence
  Synthetic polypeptide
WNKERIYCRHCKQEQLVNVIVMVSENFDIEAPNYLSKESEVLIYARRDSQCIDCFQAFLPVHCRYHRPHSEDGEASIVVNN

SEQ ID NO: 21657 - protein, 21 aa, Artificial Sequence
  Synthetic polypeptide
SQLIGETQDENRRRGPDSYRD

SEQ ID NO: 21658 - protein, 21 aa, Artificial Sequence
  Synthetic polypeptide
SQLIGETQDENRRRGPDSYRD

SEQ ID NO: 21659 - protein, 149 aa, Artificial Sequence
  Synthetic polypeptide
SEKLRMKTEEEARTHTEIEMFLRKEQQKLEERLEFWMEKYDKDTEMKQNELNALKATKASDLAHLQDLAKMIREYEQVIIEDRIEKERSKKKVKQDLLELKSVIKLQAWWRGTMIRREIGGFKMPKDKVDSKDSKGKGKGKDKRRGKKK

SEQ ID NO: 21660 - protein, 149 aa, Artificial Sequence; identical to SEQ ID NO: 21659
  Synthetic polypeptide

SEQ ID NO: 21661 - protein, 9 aa, Artificial Sequence
  Synthetic polypeptide
VPANRRNSG

SEQ ID NO: 21662 - protein, 9 aa, Artificial Sequence
  Synthetic polypeptide
VPANRRNSG

SEQ ID NO: 21663 - protein, 71 aa, Artificial Sequence
  Synthetic polypeptide
SSRDHFMAFPLPFQSLFHGHLSETFLGYLKWQQHSHSWRQTKQNQSHLGKSNSGPWKQWHGSCQIPKQSSC

SEQ ID NO: 21664 - protein, 71 aa, Artificial Sequence; identical to SEQ ID NO: 21663
  Synthetic polypeptide

SEQ ID NO: 21665 - protein, 71 aa, Artificial Sequence; identical to SEQ ID NO: 21663
  Synthetic polypeptide

SEQ ID NO: 21666 - protein, 58 aa, Artificial Sequence
  Synthetic polypeptide
NGSNTVTPGGKPNKTRVIWGKVTRAHGNSGMVRAKFRSNLPAKAIGHRIRVMLYPSRI

SEQ ID NO: 21667 - protein, 58 aa, Artificial Sequence; identical to SEQ ID NO: 21666
  Synthetic polypeptide

SEQ ID NO: 21668 - protein, 28 aa, Artificial Sequence
  Synthetic polypeptide
DLPWLFKMAATQSLLAANQTKPESSGEK

SEQ ID NO: 21669 - protein, 28 aa, Artificial Sequence
  Synthetic polypeptide
DLPWLFKMAATQSLLAANQTKPESSGEK

SEQ ID NO: 21670 - protein, 28 aa, Artificial Sequence
  Synthetic polypeptide
DLPWLFKMAATQSLLAANQTKPESSGEK

SEQ ID NO: 21671 - protein, 42 aa, Artificial Sequence
  Synthetic polypeptide
NGSNTVTPGGKPNKTRVIWGKVTRAHGNSGMVRAKFRSNLPA

SEQ ID NO: 21672 - protein, 18 aa, Artificial Sequence
  Synthetic polypeptide
VKTILLSSVKLQKCTGRY

SEQ ID NO: 21673 - protein, 18 aa, Artificial Sequence
  Synthetic polypeptide
VKTILLSSVKLQKCTGRY

SEQ ID NO: 21674 - protein, 518 aa, Artificial Sequence
  Synthetic polypeptide
VQSSSRNVRGDIDQQEMIPSKKNAVLVDGVVLNGPTTDAKAGEKFVEEACRLIMEEVVLKATDVNEKVCEWRPPEQLKQLLDLEMRDSGEPPHKLLELCRDVIHYSVKTNHPRFFNQLYAGLDYYSLVARFMTEALNPSVYTYEVSPVFLLVEEAVLKKMIEFIGWKEGDGIFNPGGSVSNMYAMNLARYKYCPDIKEKGLSGSPRLILFTSAECHYSMKKAASFLGIGTENVCFVETDGRGKMIPEELEKQVWQARKEGAAPFLVCATSGTTVLGAFDPLDEIADICERHSLWLHVDASWGGSALMSRKHRKLLHGIHRADSVAWNPHKMLMAGIQCCALLVKDKSDLLKKCYSAKASYLFQQDKFYDVSYDTGDKSIQCSRRPDAFKFWMTWKALGTLGLEERVNRALALSRYLVDEIKKREGFKLLMEPEYANICFWYIPPSLREMEEGPEFWAKLNLVAPAIKERMMKKGSLMLGYQPHRGKVNFFRQVVISPQVSREDMDFLLDEIDLLGKDM

SEQ ID NO: 21675 - protein, 36 aa, Artificial Sequence
  Synthetic polypeptide
PQPLSACNCTRELSENNLAEFSQAPEMYGEILINKR

SEQ ID NO: 21676 - protein, 36 aa, Artificial Sequence; identical to SEQ ID NO: 21675
  Synthetic polypeptide

SEQ ID NO: 21677 - protein, 415 aa, Artificial Sequence
  Synthetic polypeptide
VQSSSRNVRGDIDQQEMIPSKKNAVLVDGVVLNGPTTDAKAGEKFVEEACRLIMEEVVLKATDVNEKVCEWRPPEQLKQLLDLEMRDSGEPPHKLLELCRDVIHYSVKTNHPRFFNQLYAGLDYYSLVARFMTEALNPSVYTYEVSPVFLLVEEAVLKKMIEFIGWKEGDGIFNPGGSVSNMYAMNLARYKYCPDIKEKGLSGSPRLILFTSAECHYSMKKAASFLGIGTENVCFVETDGRGKMIPEELEKQVWQARKEGAAPFLVCATSGTTVLGAFDPLDEIADICERHSLWLHVDASWGGSALMSRKHRKLLHGIHRADSVAWNPHKMLMAGIQCCALLVKDKSDLLKKCYSAKASYLFQQDKFYDVSYDTGDKSIQCSRRPDAFKFWMTWKALGTLGLEERVNRALALSRY

SEQ ID NO: 21678 - protein, 166 aa, Artificial Sequence
  Synthetic polypeptide
SEGEQFHLETSSPPPSVEKLSSTKLVSGAKKESDYFTPQGEFRVDKAGSPTLLNCLMYKMSYYRFGEMQLDFRTPPGFDRTRNAEIGNKDIKFKHLEEAFTSEHWLVRIYKVKAPDNRETLDHKPRVTNIFPKQKYLSKKTTKRKRGYIKNKLVFKKGKKISKKTV

SEQ ID NO: 21679 - protein, 35 aa, Artificial Sequence
  Synthetic polypeptide
KPAALRHPWKNCLPRNWSLVPKRKVTILPHRENSV

SEQ ID NO: 21680 - protein, 31 aa, Artificial Sequence
  Synthetic polypeptide
GGTVSSRNQQPSAIRGKIVFHETGLWCQKGK

SEQ ID NO: 21681 - protein, 147 aa, Artificial Sequence
  Synthetic polypeptide
LISLPITDPLHRSALSTTARDILVLGLLVWTLIAGTEYFRVPAFGWVMFVAVFYWVLTVFFLIIYITMTYTRIPQVPWTTVGLCFNGSAFVLYLSAAVVDASSVSPERDSHNFNSWAASSFFAFLVTICYAGNTYFSFIAWRSRTIQ

SEQ ID NO: 21682 - protein, 43 aa, Artificial Sequence
  Synthetic polypeptide
PTPYTGLLSAQQPEISWFWGCWYGRLLLELSTSGSPHLAGSCL

SEQ ID NO: 21683 - protein, 69 aa, Artificial Sequence
  Synthetic polypeptide
NIYPECYQFLPPAVLSPSAKLTSSLVLFLYCLLADFPAYNRPPTPVCSQHNSQRYPGSGAAGMDAYCWN

SEQ ID NO: 21684 - protein, 200 aa, Artificial Sequence
  Synthetic polypeptide
PHPLLPYLAILSQPHLLPMLSLLHCLTLPLLPNIQYCNRASLPDYPGTFLANVTGNLLIAQSKLLSLLAFICEEVVSQCTLCGGLYFFEFVSCSAFLLSLLILIVYCTPFYERVDTTKVKSSDFYITLGTGCVFLLASIIFVSTHDRTSAEIAAIVFGFIASFMFLLDFITMLYEKRQESQLRKPENTTRAEALTEPLNA

SEQ ID NO: 21685 - protein, 31 aa, Artificial Sequence
  Synthetic polypeptide
LSLSCCLCWPSSVKKLYHNVLYVEDFIFLSL

SEQ ID NO: 21686 - protein, 28 aa, Artificial Sequence
  Synthetic polypeptide
VQVWSRVMIIQRAVFGKLVSSAWWLFMR

SEQ ID NO: 21687 - protein, 28 aa, Artificial Sequence
  Synthetic polypeptide
VQVWSRVMIIQRAVFGKLVSSAWWLFMR

SEQ ID NO: 21688 - protein, 28 aa, Artificial Sequence
  Synthetic polypeptide
VQVWSRVMIIQRAVFGKLVSSAWWLFMR

SEQ ID NO: 21689 - protein, 28 aa, Artificial Sequence
  Synthetic polypeptide
VQVWSRVMIIQRAVFGKLVSSAWWLFMR

SEQ ID NO: 21690 - protein, 28 aa, Artificial Sequence
  Synthetic polypeptide
VQVWSRVMIIQRAVFGKLVSSAWWLFMR

SEQ ID NO: 21691 - protein, 28 aa, Artificial Sequence
  Synthetic polypeptide
VQVWSRVMIIQRAVFGKLVSSAWWLFMR

SEQ ID NO: 21692 - protein, 28 aa, Artificial Sequence
  Synthetic polypeptide
VQVWSRVMIIQRAVFGKLVSSAWWLFMR

SEQ ID NO: 21693 - protein, 34 aa, Artificial Sequence
  Synthetic polypeptide
ASLPPRLWSSNTIFHSKESGVFGKMTESRFGAGL

SEQ ID NO: 21694 - protein, 34 aa, Artificial Sequence; identical to SEQ ID NO: 21693
  Synthetic polypeptide

SEQ ID NO: 21695 - protein, 34 aa, Artificial Sequence; identical to SEQ ID NO: 21693
  Synthetic polypeptide

SEQ ID NO: 21696 - protein, 34 aa, Artificial Sequence; identical to SEQ ID NO: 21693
  Synthetic polypeptide

SEQ ID NO: 21697 - protein, 34 aa, Artificial Sequence; identical to SEQ ID NO: 21693
  Synthetic polypeptide

SEQ ID NO: 21698 - protein, 34 aa, Artificial Sequence; identical to SEQ ID NO: 21693
  Synthetic polypeptide

SEQ ID NO: 21699 - protein, 34 aa, Artificial Sequence; identical to SEQ ID NO: 21693
  Synthetic polypeptide

SEQ ID NO: 21700 - protein, 74 aa, Artificial Sequence
  Synthetic polypeptide
LSPGLEQGYDNSESSVRKACVFCLVAVHAVIGDELKPHLSQLTGSKMKLLNLYIKRAQTGSGGADPTTDVSGQS

SEQ ID NO: 21701 - protein, 74 aa, Artificial Sequence; identical to SEQ ID NO: 21700
  Synthetic polypeptide

SEQ ID NO: 21702 - protein, 74 aa, Artificial Sequence; identical to SEQ ID NO: 21700
  Synthetic polypeptide

SEQ ID NO: 21703 - protein, 74 aa, Artificial Sequence; identical to SEQ ID NO: 21700
  Synthetic polypeptide

SEQ ID NO: 21704 - protein, 74 aa, Artificial Sequence; identical to SEQ ID NO: 21700
  Synthetic polypeptide

SEQ ID NO: 21705 - protein, 74 aa, Artificial Sequence; identical to SEQ ID NO: 21700
  Synthetic polypeptide

SEQ ID NO: 21706 - protein, 74 aa, Artificial Sequence; identical to SEQ ID NO: 21700
  Synthetic polypeptide

SEQ ID NO: 21707 - protein, 143 aa, Artificial Sequence
  Synthetic polypeptide
TSPKKAEVVRSAEEAASVLATSISPEQCIKVLCPIIQTADYPINLAAIKMQTKVIERVSKETLNLLLPEIMPGLIQGYDNSESSVRKACVFCLVAVHAVIGDELKPHLSQLTGSKMKLLNLYIKRAQTGSGGADPTTDVSGQS

SEQ ID NO: 21708 - protein, 143 aa, Artificial Sequence; identical to SEQ ID NO: 21707
  Synthetic polypeptide

SEQ ID NO: 21709 - protein, 143 aa, Artificial Sequence; identical to SEQ ID NO: 21707
  Synthetic polypeptide

SEQ ID NO: 21710 - protein, 143 aa, Artificial Sequence; identical to SEQ ID NO: 21707
  Synthetic polypeptide

SEQ ID NO: 21711 - protein, 143 aa, Artificial Sequence; identical to SEQ ID NO: 21707
  Synthetic polypeptide

SEQ ID NO: 21712 - protein, 143 aa, Artificial Sequence; identical to SEQ ID NO: 21707
  Synthetic polypeptide

SEQ ID NO: 21713 - protein, 11 aa, Artificial Sequence
  Synthetic polypeptide
SYKPLRRKQRW

SEQ ID NO: 21714 - protein, 11 aa, Artificial Sequence
  Synthetic polypeptide
SYKPLRRKQRW

SEQ ID NO: 21715 - protein, 11 aa, Artificial Sequence
  Synthetic polypeptide
SYKPLRRKQRW

SEQ ID NO: 21716 - protein, 11 aa, Artificial Sequence
  Synthetic polypeptide
SYKPLRRKQRW

SEQ ID NO: 21717 - protein, 11 aa, Artificial Sequence
  Synthetic polypeptide
SYKPLRRKQRW

SEQ ID NO: 21718 - protein, 11 aa, Artificial Sequence
  Synthetic polypeptide
SYKPLRRKQRW

SEQ ID NO: 21719 - protein, 21 aa, Artificial Sequence
  Synthetic polypeptide
EPNARAKAINLSEESRGGEIC

SEQ ID NO: 21720 - protein, 21 aa, Artificial Sequence
  Synthetic polypeptide
EPNARAKAINLSEESRGGEIC

SEQ ID NO: 21721 - protein, 21 aa, Artificial Sequence
  Synthetic polypeptide
EPNARAKAINLSEESRGGEIC

SEQ ID NO: 21722 - protein, 21 aa, Artificial Sequence
  Synthetic polypeptide
EPNARAKAINLSEESRGGEIC

SEQ ID NO: 21723 - protein, 21 aa, Artificial Sequence
  Synthetic polypeptide
EPNARAKAINLSEESRGGEIC

SEQ ID NO: 21724 - protein, 21 aa, Artificial Sequence
  Synthetic polypeptide
EPNARAKAINLSEESRGGEIC

SEQ ID NO: 21725 - protein, 30 aa, Artificial Sequence
  Synthetic polypeptide
LAFRSAEKAVLEQFGFPLTGTEVDSSSLHS

SEQ ID NO: 21726 - protein, 25 aa, Artificial Sequence
  Synthetic polypeptide
PAQYLVHNWHSDLQKRLSWNNLDSL

SEQ ID NO: 21727 - protein, 25 aa, Artificial Sequence
  Synthetic polypeptide
PAQYLVHNWHSDLQKRLSWNNLDSL

SEQ ID NO: 21728 - protein, 25 aa, Artificial Sequence
  Synthetic polypeptide
PAQYLVHNWHSDLQKRLSWNNLDSL

SEQ ID NO: 21729 - protein, 25 aa, Artificial Sequence
  Synthetic polypeptide
PAQYLVHNWHSDLQKRLSWNNLDSL

SEQ ID NO: 21730 - protein, 25 aa, Artificial Sequence
  Synthetic polypeptide
PAQYLVHNWHSDLQKRLSWNNLDSL

SEQ ID NO: 21731 - protein, 25 aa, Artificial Sequence
  Synthetic polypeptide
PAQYLVHNWHSDLQKRLSWNNLDSL

SEQ ID NO: 21732 - protein, 25 aa, Artificial Sequence
  Synthetic polypeptide
PAQYLVHNWHSDLQKRLSWNNLDSL

SEQ ID NO: 21733 - protein, 51 aa, Artificial Sequence
  Synthetic polypeptide
DLRLCLFWSPSSNQHSTWYIIGIQICRKGCLGTIWIPFNWNRGRFFKFTLL

SEQ ID NO: 21734 - protein, 317 aa, Artificial Sequence
  Synthetic polypeptide
LAFRSAEKAVLEQFGFPLTGTEARCYTNHALSYDQAKRVPRWVLEHISKSKIMGDADRKHCKFKPDPNIPPTFSAFNEDYVGSGWSRGHMAPAGNNKFSSKAMAETFYLSNIVPQDFDNNSGYWNRIEMYCRELTERFEDVWVVSGPLTLPQTRGDGKKIVSYQVIGEDNVAVPSHLYKVILARRSSVSTEPLALGAFVVPNEAIGFQPQLTEFQVSLQDLEKLSGLVFFPHLDRTSDIRNICSVDTCKLLDFQEFTLYLSTRKIEGARSVLRLEKIMENLKNAEIEPDDYFMSRYEKKLEELKAKEQSGTQIRKPS

SEQ ID NO: 21735 - protein, 47 aa, Artificial Sequence
  Synthetic polypeptide
DLRLCLFWSPSSNQHSTWYIIGIQICRKGCLGTIWIPFNWNRGKVLH

SEQ ID NO: 21736 - protein, 47 aa, Artificial Sequence; identical to SEQ ID NO: 21735
  Synthetic polypeptide

SEQ ID NO: 21737 - protein, 47 aa, Artificial Sequence; identical to SEQ ID NO: 21735
  Synthetic polypeptide

SEQ ID NO: 21738 - protein, 47 aa, Artificial Sequence; identical to SEQ ID NO: 21735
  Synthetic polypeptide

SEQ ID NO: 21739 - protein, 56 aa, Artificial Sequence
  Synthetic polypeptide
LAFRSAEKAVLEQFGFPLTGTEARCYTNHALSYDQAKRVPRWVLEHISKSKIMGWS

SEQ ID NO: 21740 - protein, 95 aa, Artificial Sequence
  Synthetic polypeptide
LAFRSAEKAVLEQFGFPLTGTEVMQTESIVNLSLIPISLQPSVPSMKIMLEVGGHEDTWLQQEITNFQVKPWLKPFTFLTLCLRILIIILDIGTE

SEQ ID NO: 21741 - protein, 95 aa, Artificial Sequence; identical to SEQ ID NO: 21740
  Synthetic polypeptide

SEQ ID NO: 21742 - protein, 116 aa, Artificial Sequence
  Synthetic polypeptide
DLRLCLFWSPSSNQHSTWYIIGIQICRKGCLGTIWIPFNWNRGDADRKHCKFKPDPNIPPTFSAFNEDYVGSGWSRGHMAPAGNNKFSSKAMAETFYLSNIVPQDFDNNSGYWNRI

SEQ ID NO: 21743 - protein, 116 aa, Artificial Sequence; identical to SEQ ID NO: 21742
  Synthetic polypeptide

SEQ ID NO: 21744 - protein, 92 aa, Artificial Sequence
  Synthetic polypeptide
LAFRSAEKAVLEQFGFPLTGTEARCYTNHALSYDQAKRVPRWVLEHISKSKIMGRFFKFTLLASLFLLSLNLHLWLVLNFWVQVTLLPQPPE

SEQ ID NO: 21745 - protein, 173 aa, Artificial Sequence
  Synthetic polypeptide
LAFRSAEKAVLEQFGFPLTGTEARCYTNHALSYDQAKRVPRWVLEHISKSKIMGDADRKHCKFKPDPNIPPTFSAFNEDYVGSGWSRGHMAPAGNNKFSSKAMAETFYLSNIVPQDFDNNSGYWNRIEMYCRELTERFEDVWVVSGPLTLPQTRGDGKKIVSYQSWEYPSLQF

SEQ ID NO: 21746 - protein, 19 aa, Artificial Sequence
  Synthetic polypeptide
RLNIKNIFLNGMLVAVSKA

SEQ ID NO: 21747 - protein, 19 aa, Artificial Sequence
  Synthetic polypeptide
RLNIKNIFLNGMLVAVSKA

SEQ ID NO: 21748 - protein, 19 aa, Artificial Sequence
  Synthetic polypeptide
RLNIKNIFLNGMLVAVSKA

SEQ ID NO: 21749 - protein, 55 aa, Artificial Sequence
  Synthetic polypeptide
AKPEVADWSEGVQVPSVPIQQFPTEDWSAQPATEDWSAAPTAQATEWVGATTDWS

SEQ ID NO: 21750 - protein, 55 aa, Artificial Sequence; identical to SEQ ID NO: 21749
  Synthetic polypeptide

SEQ ID NO: 21751 - protein, 66 aa, Artificial Sequence
  Synthetic polypeptide
SMKTKYKKHFLEWHASSSEQSLRLQTGLKVYRCPLCLFSNSLLKTGALSLPRKTGLQLPLLRPLNG

SEQ ID NO: 21752 - protein, 66 aa, Artificial Sequence; identical to SEQ ID NO: 21751
  Synthetic polypeptide

SEQ ID NO: 21753 - protein, 23 aa, Artificial Sequence
  Synthetic polypeptide
AKPEVADWSEGVQVPSVPIQQFP

SEQ ID NO: 21754 - protein, 42 aa, Artificial Sequence
  Synthetic polypeptide
SMKTKYKKHFLEWHASSSEQSLRLQTGLKVYRCPLCLFSNSL

SEQ ID NO: 21755 - protein, 71 aa, Artificial Sequence
  Synthetic polypeptide
VPAQRSDHRQPSSVPLRSPSNSRAAAPSEGQAPAVGGPPSKLLGSGNTISSLLFPSPKIEKEDQANPKEEV

SEQ ID NO: 21756 - protein, 71 aa, Artificial Sequence; identical to SEQ ID NO: 21755
  Synthetic polypeptide

SEQ ID NO: 21757 - protein, 71 aa, Artificial Sequence; identical to SEQ ID NO: 21755
  Synthetic polypeptide

SEQ ID NO: 21758 - protein, 71 aa, Artificial Sequence; identical to SEQ ID NO: 21755
  Synthetic polypeptide

SEQ ID NO: 21759 - protein, 71 aa, Artificial Sequence; identical to SEQ ID NO: 21755
  Synthetic polypeptide

SEQ ID NO: 21760 - protein, 71 aa, Artificial Sequence; identical to SEQ ID NO: 21755
  Synthetic polypeptide

SEQ ID NO: 21761 - protein, 27 aa, Artificial Sequence
  Synthetic polypeptide
VLVTPSLPFCSPALRLKRKIRPTPKKK

SEQ ID NO: 21762 - protein, 27 aa, Artificial Sequence
  Synthetic polypeptide
VLVTPSLPFCSPALRLKRKIRPTPKKK

SEQ ID NO: 21763 - protein, 27 aa, Artificial Sequence
  Synthetic polypeptide
VLVTPSLPFCSPALRLKRKIRPTPKKK

SEQ ID NO: 21764 - protein, 27 aa, Artificial Sequence
  Synthetic polypeptide
VLVTPSLPFCSPALRLKRKIRPTPKKK

SEQ ID NO: 21765 - protein, 27 aa, Artificial Sequence
  Synthetic polypeptide
VLVTPSLPFCSPALRLKRKIRPTPKKK

SEQ ID NO: 21766 - protein, 27 aa, Artificial Sequence
  Synthetic polypeptide
VLVTPSLPFCSPALRLKRKIRPTPKKK

SEQ ID NO: 21767 - protein, 15 aa, Artificial Sequence
  Synthetic polypeptide
VLVTPSLPFCSPALR

SEQ ID NO: 21768 - protein, 15 aa, Artificial Sequence
  Synthetic polypeptide
VLVTPSLPFCSPALR

SEQ ID NO: 21769 - protein, 6 aa, Artificial Sequence
  Synthetic polypeptide
SLEGGE

SEQ ID NO: 21770 - protein, 6 aa, Artificial Sequence
  Synthetic polypeptide
SLEGGE

SEQ ID NO: 21771 - protein, 79 aa, Artificial Sequence
  Synthetic polypeptide
KVGNSSIAWSLGYMLSLTNQIPAESPLIRLPIEPPVFVGTLAFFTAAALLCLAFLAYLCSATRRKRHSEHAFDHAVDSD

SEQ ID NO: 21772 - protein, 79 aa, Artificial Sequence; identical to SEQ ID NO: 21771
  Synthetic polypeptide

SEQ ID NO: 21773 - protein, 34 aa, Artificial Sequence
  Synthetic polypeptide
NGLGGPGGQRPVLVSSYSQHSAQGIEPRRWGIAA

SEQ ID NO: 21774 - protein, 34 aa, Artificial Sequence; identical to SEQ ID NO: 21773
  Synthetic polypeptide

SEQ ID NO: 21775 - protein, 66 aa, Artificial Sequence
  Synthetic polypeptide
VLMRSGGFYKCFNSSSLAPFSLLLPSEKGACFLFTFCHDCKFPEASPAMQNSRTPGFKVYTCICHT

SEQ ID NO: 21776 - protein, 66 aa, Artificial Sequence; identical to SEQ ID NO: 21775
  Synthetic polypeptide

SEQ ID NO: 21777 - protein, 66 aa, Artificial Sequence; identical to SEQ ID NO: 21775
  Synthetic polypeptide

SEQ ID NO: 21778 - protein, 66 aa, Artificial Sequence; identical to SEQ ID NO: 21775
  Synthetic polypeptide

SEQ ID NO: 21779 - protein, 66 aa, Artificial Sequence; identical to SEQ ID NO: 21775
  Synthetic polypeptide

SEQ ID NO: 21780 - protein, 109 aa, Artificial Sequence
  Synthetic polypeptide
DLVVFISVSIVPLLLPSLSCCLLKKVLASSSPSATIVSFLRPPQPCRTHALLALKFILAFAIPDKPRHIQMKLARLEFESLEALKQQQMKLVTENLKEEPMESGKEKAT

SEQ ID NO: 21781 - protein, 109 aa, Artificial Sequence; identical to SEQ ID NO: 21780
  Synthetic polypeptide

SEQ ID NO: 21782 - protein, 109 aa, Artificial Sequence; identical to SEQ ID NO: 21780
  Synthetic polypeptide

SEQ ID NO: 21783 - protein, 109 aa, Artificial Sequence; identical to SEQ ID NO: 21780
  Synthetic polypeptide

SEQ ID NO: 21784 - protein, 109 aa, Artificial Sequence; identical to SEQ ID NO: 21780
  Synthetic polypeptide

SEQ ID NO: 21785 - protein, 13 aa, Artificial Sequence
  Synthetic polypeptide
GLPSHAELTHSWL

SEQ ID NO: 21786 - protein, 13 aa, Artificial Sequence
  Synthetic polypeptide
GLPSHAELTHSWL

SEQ ID NO: 21787 - protein, 13 aa, Artificial Sequence
  Synthetic polypeptide
GLPSHAELTHSWL

SEQ ID NO: 21788 - protein, 13 aa, Artificial Sequence
  Synthetic polypeptide
GLPSHAELTHSWL

SEQ ID NO: 21789 - protein, 13 aa, Artificial Sequence
  Synthetic polypeptide
GLPSHAELTHSWL

SEQ ID NO: 21790 - protein, 277 aa, Artificial Sequence
  Synthetic polypeptide
EGACEEDLRVDGRGCEDYRCVEVETDVVSNTSGSARVKLGHTDILVGVKAEMGTPKLEKPNEGYLEFFVDCSASATPEFEGRGGDDLGTEIANTLYRIFNNKSSVDLKTLCISPREHCWVLYVDVLLLECGGNLFDAISIAVKAALFNTRIPRVRVLEDEEGSKDIELSDDPYDCIRLSVENVPCIVTLCKIGYRHVVDATLQEEACSLASLLVSVTSKGVVTCMRKVGKGSLDPESIFEMMETGKRVGKVLHASLQSVVHKEESLGPKRQKVGFLG

SEQ ID NO: 21791 - protein, 75 aa, Artificial Sequence
  Synthetic polypeptide
MSEPQFSLRGNGSLEVGFWPAFPHLVVRRAHARKTSVWMAVAVRTTDVSKWKLMWCPTLVGPPGSSWVTQTSWWE

SEQ ID NO: 21792 - protein, 42 aa, Artificial Sequence
  Synthetic polypeptide
CPSLSFLFEEMGVWRWASGLLFLTSWLGGRMRGRPPCGWPWL

SEQ ID NO: 21793 - protein, 12 aa, Artificial Sequence
  Synthetic polypeptide
YSGRPPCGWPWL

SEQ ID NO: 21794 - protein, 274 aa, Artificial Sequence
  Synthetic polypeptide
IVEDLRVDGRGCEDYRCVEVETDVVSNTSGSARVKLGHTDILVGVKAEMGTPKLEKPNEGYLEFFVDCSASATPEFEGRGGDDLGTEIANTLYRIFNNKSSVDLKTLCISPREHCWVLYVDVLLLECGGNLFDAISIAVKAALFNTRIPRVRVLEDEEGSKDIELSDDPYDCIRLSVENVPCIVTLCKIGYRHVVDATLQEEACSLASLLVSVTSKGVVTCMRKVGKGSLDPESIFEMMETGKRVGKVLHASLQSVVHKEESLGPKRQKVGFLG

SEQ ID NO: 21795 - protein, 9 aa, Artificial Sequence
  Synthetic polypeptide
LHHLLTRSF

SEQ ID NO: 21796 - protein, 9 aa, Artificial Sequence
  Synthetic polypeptide
LHHLLTRSF

SEQ ID NO: 21797 - protein, 810 aa, Artificial Sequence
  Synthetic polypeptide
REAFEIALPRESNITVLIKLGTPTLLAKPCYIVISKRHITMLSIKSGERIVFTFSCQSPENHFVIEIQKNIDCMSGPCPFGEVQLQPSTSLLPTLNRTFIWDVKAHKSIGLELQFSIPRLRQIGPGESCPDGVTHSISGRIDATVVRIGTFCSNGTVSRIKMQEGVKMALHLPWFHPRNVSGFSIANRSSIKRLCIIESVFEGEGSATLMSANYPEGFPEDELMTWQFVVPAHLRASVSFLNFNLSNCERKEERVEYYIPGSTTNPEVFKLEDKQPGNMAGNFNLSLQGCDQDAQSPGILRLQFQVLVQHPQNESNKIYVVDLSNERAMSLTIEPRPVKQSRKFVPGCFVCLESRTCSSNLTLTSGSKHKISFLCDDLTRLWMNVEKTISCTDHRYCQRKSYSLQVPSDILHLPVELHDFSWKLLVPKDRLSLVLVPAQKLQQHTHEKPCNTSFSYLVASAIPSQDLYFGSFCPGGSIKQIQVKQNISVTLRTFAPSFQQEASRQGLTVSFIPYFKEEGVFTVTPDTKSKVYLRTPNWDRGLPSLTSVSWNISVPRDQVACLTFFKERSGVVCQTGRAFMIIQEQRTRAEEIFSLDEDVLPKPSFHHHSFWVNISNCSPTSGKQLDLLFSVTLTPRTVDLTVILIAAVGGGVLLLSALGLIICCVKKKKKKTNKGPAVGIYNDNINTEMPRQPKKFQKGRKDNDSHVYAVIEDTMVYGHLLQDSSGSFLQPEVDTYRPFQGTMGVCPPSPPTICSRAPTAKLATEEPPPRSPPESESEPYTFSHPNNGDVSSKDTDIPLLNTQEPMEPAE

SEQ ID NO: 21798 - protein, 41 aa, Artificial Sequence
  Synthetic polypeptide
DSLIQTSSGVGQSLVQILTPPLINEKLLRLLCHEKATLQFS

SEQ ID NO: 21799 - protein, 41 aa, Artificial Sequence; identical to SEQ ID NO: 21798
  Synthetic polypeptide

SEQ ID NO: 21800 - protein, 317 aa, Artificial Sequence
  Synthetic polypeptide
REAFEIALPRESNITVLIKLGTPTLLAKPCYIVISKRHITMLSIKSGERIVFTFSCQSPENHFVIEIQKNIDCMSGPCPFGEVQLQPSTSLLPTLNRTFIWDVKAHKSIGLELQFSIPRLRQIGPGESCPDGVTHSISGRIDATVVRIGTFCSNGTVSRIKMQEGVKMALHLPWFHPRNVSGFSIANRSSIKRLCIIESVFEGEGSATLMSANYPEGFPEDELMTWQFVVPAHLRASVSFLNFNLSNCERKEERVEYYIPGSTTNPEVFKLEDKQPGNMAGNFNLSLQGCDQDAQSPGILRLQFQVLVQHPQNESSE

SEQ ID NO: 21801 - protein, 36 aa, Artificial Sequence
  Synthetic polypeptide
GRARWLTPVIPAVWEAEAGASSKVKSSRQVWPRWGN

SEQ ID NO: 21802 - protein, 36 aa, Artificial Sequence; identical to SEQ ID NO: 21801
  Synthetic polypeptide

SEQ ID NO: 21803 - protein, 31 aa, Artificial Sequence
  Synthetic polypeptide
SQQFGRPRRVHHLRSRVRDKSGQDGETDSTL

SEQ ID NO: 21804 - protein, 31 aa, Artificial Sequence; identical to SEQ ID NO: 21803
  Synthetic polypeptide

SEQ ID NO: 21805 - protein, 259 aa, Artificial Sequence
  Synthetic polypeptide
GQEFETSLAKMGKLTLLCDAKTDGSFLVHHFLSFYLKANCKVCFVALIQSFSHYSIVGQKLGVSLTMARERGQLVFLEGLKSAVDVVFQAQKEPHPLQFLREANAGNLKPLFEFVREALKPVDSGEARWTYPVLLVDDLSVLLSLGMGAVAVLDFIHYCRATVCWELKGNMVVLVHDSGDAEDEENDILLNGLSHQSHLILRAEGLATGFCRDVHGQLRILWRRPSQPAVHRDQSFTYQYKIQDKSVSFFAKGMSPAVL

SEQ ID NO: 21806 - protein, 53 aa, Artificial Sequence
  Synthetic polypeptide
GQEFETSLAKMGKLTLLCDAKTDGSFLVHHFLSFYLKGCQPDHGAGAWAACVP

SEQ ID NO: 21807 - protein, 55 aa, Artificial Sequence
  Synthetic polypeptide
ILKHLKELKRKKWKPTLMVSSLKRQKIKWKMKRMKVIKHKMEKMKKIVKRNRIVK

SEQ ID NO: 21808 - protein, 339 aa, Artificial Sequence
  Synthetic polypeptide
WMNFETFEGAEEEKMEADPDGQQPEKAENKVENETDEGDKAQDGENEKNSEKEQDSEVSEDTKSEEKETEENKELTDTCKERESDTGKKKVEHEISEGNVATAAAAALASAATKAKHLAAVEERKIKSLVALLVETQMKKLEIKLRHFEELETIMDREKEALEQQRQQLLTERQNFHMEQLKYAELRARQQMEQQQHGQNPQQAHQHSGGPGLAPLGAAGHPGMMPHQQPPPYPLMHHQMPPPHPPQPGQIPGPGSMMPGQHMPGRMIPTVAANIHPSGSGPTPPGMPPMPGNILGPRVPLTAPNGMYPPPPQQQPPPPPPADGVPPPPAPGPPASAAP

SEQ ID NO: 21809 - protein, 32 aa, Artificial Sequence
  Synthetic polypeptide
NIFKLREHLRMRSQKLPTTFTHILPHKTMKNG

SEQ ID NO: 21810 - protein, 915 aa, Artificial Sequence
  Synthetic polypeptide
IKGTFTDEKSKASHHIYPYSSSQDDEEWLRPVMRKEKQVLVHWGFYPDSYDTWVHSNDVDAEIEDPPIPEKPWKVHVKWILDTDIFNEWMNEEDYEVDENRKPVSFRQRISTKNEEPVRSPERRDRKASANARKRKHSPSPPPPTPTESRKKSGKKGQASLYGKRRSQKEEDEQEDLTKDMEDPTPVPNIEEVVLPKNVNLKKDSENTPVKGGTVADLDEQDEETVTAGGKEDEDPAKGDQSRSVDLGEDNVTEQTNHIIIPSYASWFDYNCIHVIERRALPEFFNGKNKSKTPEIYLAYRNFMIDTYRLNPQEYLTSTACRRNLTGDVCAVMRVHAFLEQWGLVNYQVDPESRPMAMGPPPTPHFNVLADTPSGLVPLHLRSPQVPAAQQMLNFPEKNKEKPVDLQNFGLRTDIYSKKTLAKSKGASAGREWTEQETLLLLEALEMYKDDWNKVSEHVGSRTQDECILHFLRLPIEDPYLENSDASLGPLAYQPVPFSQSGNPVMSTVAFLASVVDPRVASAAAKAALEEFSRVREEVPLELVEAHVKKVQEAARASGKVDPTYGLESSCIAGTGPDEPEKLEGAEEEKMEADPDGQQPEKAENKVENETDEGDKAQDGENEKNSEKEQDSEVSEDTKSEEKETEENKELTDTCKERESDTGKKKVEHEISEGNVATAAAAALASAATKAKHLAAVEERKIKSLVALLVETQMKKLEIKLRHFEELETIMDREKEALEQQRQQLLTERQNFHMEQLKYAELRARQQMEQQQHGQNPQQAHQHSGGPGLAPLGAAGHPGMMPHQQPPPYPLMHHQMPPPHPPQPGQIPGPGSMMPGQHMPGRMIPTVAANIHPSGSGPTPPGMPPMPGNILGPRVPLTAPNGMYPPPPQQQPPPPPPADGVPPPPAPGPPASAAP

SEQ ID NO: 21811 - protein, 104 aa, Artificial Sequence
  Synthetic polypeptide
EDGDPDTPKPVSFTVKETVCPRTTQQSPEDCDFKKDGLVKRCMGTVTLNQARGSFDISCDKDNKRFALLGDFFRKSKEKIGKEFKRIVQRIKDFLRNLVPRTES

SEQ ID NO: 21812 - protein, 104 aa, Artificial Sequence; identical to SEQ ID NO: 21811
  Synthetic polypeptide

SEQ ID NO: 21813 - protein, 37 aa, Artificial Sequence
  Synthetic polypeptide
EVRRPSAWQPPRLRSEEPLRPAAAPSEKMGTQTRQSL

SEQ ID NO: 21814 - protein, 37 aa, Artificial Sequence; identical to SEQ ID NO: 21813
  Synthetic polypeptide

SEQ ID NO: 21815 - protein, 44 aa, Artificial Sequence
  Synthetic polypeptide
EVRSPSARQLPRLRRWGPRHAKACELHSEGDSVPQDDTAVTRGL

SEQ ID NO: 21816 - protein, 44 aa, Artificial Sequence; identical to SEQ ID NO: 21815
  Synthetic polypeptide

SEQ ID NO: 21817 - protein, 104 aa, Artificial Sequence; identical to SEQ ID NO: 21811
  Synthetic polypeptide

SEQ ID NO: 21818 - protein, 104 aa, Artificial Sequence; identical to SEQ ID NO: 21811
  Synthetic polypeptide

SEQ ID NO: 21819 - protein, 47 aa, Artificial Sequence
  Synthetic polypeptide
GAPLPGRDPVWEVRSVSARPPRLRSEETLCLATTPSEKMGTQTRQSL

SEQ ID NO: 21820 - protein, 47 aa, Artificial Sequence; identical to SEQ ID NO: 21819
  Synthetic polypeptide

SEQ ID NO: 21821 - protein, 44 aa, Artificial Sequence
  Synthetic polypeptide
EVRRPSAWQPPRLRRWGPRHAKACELHSEGDSVPQDDTAVTRGL

SEQ ID NO: 21822 - protein, 44 aa, Artificial Sequence; identical to SEQ ID NO: 21821
  Synthetic polypeptide

SEQ ID NO: 21823 - protein, 104 aa, Artificial Sequence; identical to SEQ ID NO: 21811
  Synthetic polypeptide

SEQ ID NO: 21824 - protein, 104 aa, Artificial Sequence; identical to SEQ ID NO: 21811
  Synthetic polypeptide

SEQ ID NO: 21825 - protein, 37 aa, Artificial Sequence; identical to SEQ ID NO: 21813
  Synthetic polypeptide

SEQ ID NO: 21826 - protein, 37 aa, Artificial Sequence; identical to SEQ ID NO: 21813
  Synthetic polypeptide

SEQ ID NO: 21827 - protein, 44 aa, Artificial Sequence; identical to SEQ ID NO: 21815
  Synthetic polypeptide

SEQ ID NO: 21828 - protein, 44 aa, Artificial Sequence; identical to SEQ ID NO: 21815
  Synthetic polypeptide

SEQ ID NO: 21829 - protein, 36 aa, Artificial Sequence
  Synthetic polypeptide
EVRSLSARQPPHLGSPQLQGSCASCYRWHQPAVLGC

SEQ ID NO: 21830 - protein, 36 aa, Artificial Sequence; identical to SEQ ID NO: 21829
  Synthetic polypeptide

SEQ ID NO: 21831 - protein, 151 aa, Artificial Sequence
  Synthetic polypeptide
GASPPGSHPIWEVLSYKEAVLRAIDGINQRSSDANLYRLLDLDPRPTMDGDPDTPKPVSFTVKETVCPRTTQQSPEDCDFKKDGLVKRCMGTVTLNQARGSFDISCDKDNKRFALLGDFFRKSKEKIGKEFKRIVQRIKDFLRNLVPRTES

SEQ ID NO: 21832 - protein, 151 aa, Artificial Sequence; identical to SEQ ID NO: 21831
  Synthetic polypeptide

SEQ ID NO: 21833 - protein, 39 aa, Artificial Sequence
  Synthetic polypeptide
EVRSPSARQLPRLRSEEPLRPAATPSGKSSATRKLCFVL

SEQ ID NO: 21834 - protein, 39 aa, Artificial Sequence; identical to SEQ ID NO: 21833
  Synthetic polypeptide

SEQ ID NO: 21835 - protein, 37 aa, Artificial Sequence
  Synthetic polypeptide
EVRSPSARQLPRLRSEEPLRPAATPSGKMGTQTRQSL

SEQ ID NO: 21836 - protein, 37 aa, Artificial Sequence; identical to SEQ ID NO: 21835
  Synthetic polypeptide

SEQ ID NO: 21837 - protein, 44 aa, Artificial Sequence
  Synthetic polypeptide
EVRSLSARQPPHLGRWGPRHAKACELHSEGDSVPQDDTAVTRGL

SEQ ID NO: 21838 - protein, 44 aa, Artificial Sequence; identical to SEQ ID NO: 21837
  Synthetic polypeptide

SEQ ID NO: 21839 - protein, 115 aa, Artificial Sequence
  Synthetic polypeptide
GASPPGSHPIWEDGDPDTPKPVSFTVKETVCPRTTQQSPEDCDFKKDGLVKRCMGTVTLNQARGSFDISCDKDNKRFALLGDFFRKSKEKIGKEFKRIVQRIKDFLRNLVPRTES

SEQ ID NO: 21840 - protein, 115 aa, Artificial Sequence; identical to SEQ ID NO: 21839
  Synthetic polypeptide

SEQ ID NO: 21841 - protein, 8 aa, Artificial Sequence
  Synthetic polypeptide
NLNKGPAL

SEQ ID NO: 21842 - protein, 8 aa, Artificial Sequence
  Synthetic polypeptide
NLNKGPAL

SEQ ID NO: 21843 - protein, 10 aa, Artificial Sequence
  Synthetic polypeptide
IRDQLCEHGK

SEQ ID NO: 21844 - protein, 10 aa, Artificial Sequence
  Synthetic polypeptide
IRDQLCEHGK

SEQ ID NO: 21845 - protein, 34 aa, Artificial Sequence
  Synthetic polypeptide
WELDSSLPEKRTQIEKGRKNKPCNAETELKGPAL

SEQ ID NO: 21846 - protein, 34 aa, Artificial Sequence; identical to SEQ ID NO: 21845
  Synthetic polypeptide

SEQ ID NO: 21847 - protein, 13 aa, Artificial Sequence
  Synthetic polypeptide
NGIKGTSSVNTAS

SEQ ID NO: 21848 - protein, 13 aa, Artificial Sequence
  Synthetic polypeptide
NGIKGTSSVNTAS

SEQ ID NO: 21849 - protein, 54 aa, Artificial Sequence
  Synthetic polypeptide
TAQLAIPLFEDGVRPQAKERRQPLEPEKGKKMDSPLVPSEGTWTSRTVQKKRLF

SEQ ID NO: 21850 - protein, 54 aa, Artificial Sequence; identical to SEQ ID NO: 21849
  Synthetic polypeptide

SEQ ID NO: 21851 - protein, 82 aa, Artificial Sequence
  Synthetic polypeptide
CLQKERGQAELFKRRGCSKKDYRVINHLLRESLLRKLSSHQPLHLVPCVASGWKLLSPTSESVCRFHRLSLGSRDQLCEHGK

SEQ ID NO: 21852 - protein, 33 aa, Artificial Sequence
  Synthetic polypeptide
KRQENGFSPSAFRRNVDKQNCSKEEAVLRKTTE

SEQ ID NO: 21853 - protein, 33 aa, Artificial Sequence; identical to SEQ ID NO: 21852
  Synthetic polypeptide

SEQ ID NO: 21854 - protein, 43 aa, Artificial Sequence
  Synthetic polypeptide
CLQKERGQAELFKRRGCSKKDYRVINHLLRESLLRDQLCEHGK

SEQ ID NO: 21855 - protein, 700 aa, Artificial Sequence
  Synthetic polypeptide
SICLCAGQRSPLNDFQVLRGTELQHLLHAVVPGPWQEDVADAEECAGRCGPLMDCRAFHYNVSSHGCQLLPWTQHSPHTRLRRSGRCDLFQKKDYVRTCIMNNGVGYRGTMATTVGGLPCQAWSHKFPNDHKYTPTLRNGLEENFCRNPDGDPGGPWCYTTDPAVRFQSCGIKSCREAACVWCNGEEYRGAVDRTESGRECQRWDLQHPHQHPFEPGKFLDQGLDDNYCRNPDGSERPWCYTTDPQIEREFCDLPRCGSEAQPRQEATTVSCFRGKGEGYRGTANTTTAGVPCQRWDAQIPHQHRFTPEKYACKDLRENFCRNPDGSEAPWCFTLRPGMRAAFCYQIRRCTDDVRPQDCYHGAGEQYRGTVSKTRKGVQCQRWSAETPHKPQFTFTSEPHAQLEENFCRNPDGDSHGPWCYTMDPRTPFDYCALRRCADDQPPSILDPPDQVQFEKCGKRVDRLDQRRSKLRVVGGHPGNSPWTVSLRNRQGQHFCGGSLVKEQWILTARQCFSSCHMPLTGYEVWLGTLFQNPQHGEPSLQRVPVAKMVCGPSGSQLVLLKLERSVTLNQRVALICLPPEWYVVPPGTKCEIAGWGETKGTGNDTVLNVALLNVISNQECNIKHRGRVRESEMCTEGLLAPVGACEGDYGGPLACFTHNCWVLEGIIIPNRVCARSRWPAVFTRVSVFVDWIHKVMRLG

SEQ ID NO: 21856 - protein, 11 aa, Artificial Sequence
  Synthetic polypeptide
AYAFVQGSARH

SEQ ID NO: 21857 - protein, 11 aa, Artificial Sequence
  Synthetic polypeptide
AYAFVQGSARH

SEQ ID NO: 21858 - protein, 12 aa, Artificial Sequence
  Synthetic polypeptide
HMPLCRAALAIE

SEQ ID NO: 21859 - protein, 12 aa, Artificial Sequence
  Synthetic polypeptide
HMPLCRAALAIE

SEQ ID NO: 21860 - protein, 153 aa, Artificial Sequence
  Synthetic polypeptide
SICLCAGQRSPLNDFQVLRGTELQHLLHAVVPGPWQEDVADAEECAGRCGPLMDCRAFHYNVSSHGCQLLPWTQHSPHTRLRRSGRCDLFQKKGTRPLSGMAWKRTSAVTLMATPEVLGATQQTLLCASRAAASNPAGRPRVSGAMARNTAAR

SEQ ID NO: 21861 - protein, 155 aa, Artificial Sequence
  Synthetic polypeptide
GAVAHACNPSTLGGQGLGHSKEAAAPAPIGELAPGSFLAAVVDALELGPPVVISPSLSGMYSLPFLTAPGSQLPGFVPVAPICTDKINAANYASVKTPALIVYGDQDPMGQTSFEHLKQLPNHRVLIMKGAGHPCYLDKPEEWHTGLLDFLQGLQ

SEQ ID NO: 21862 - protein, 155 aa, Artificial Sequence; identical to SEQ ID NO: 21861
  Synthetic polypeptide

SEQ ID NO: 21863 - protein, 155 aa, Artificial Sequence; identical to SEQ ID NO: 21861
  Synthetic polypeptide

SEQ ID NO: 21864 - protein, 155 aa, Artificial Sequence; identical to SEQ ID NO: 21861
  Synthetic polypeptide

SEQ ID NO: 21865 - protein, 51 aa, Artificial Sequence
  Synthetic polypeptide
ARWLTPVIPALWEAKVWGTPRKQQPLPLLGSWPLAASWRLWWMPWSWAPRL

SEQ ID NO: 21866 - protein, 51 aa, Artificial Sequence; identical to SEQ ID NO: 21865
  Synthetic polypeptide

SEQ ID NO: 21867 - protein, 51 aa, Artificial Sequence; identical to SEQ ID NO: 21865
  Synthetic polypeptide

SEQ ID NO: 21868 - protein, 51 aa, Artificial Sequence; identical to SEQ ID NO: 21865
  Synthetic polypeptide

SEQ ID NO: 21869 - protein, 51 aa, Artificial Sequence; identical to SEQ ID NO: 21865
  Synthetic polypeptide

SEQ ID NO: 21870 - protein, 76 aa, Artificial Sequence
  Synthetic polypeptide
SQHFGRPRSGALQGSSSPCPYWGAGPWQLPGGCGGCLGAGPPGCDQSITEWHVLPALPHGPWLPAPGLCASGPHLH

SEQ ID NO: 21871 - protein, 76 aa, Artificial Sequence; identical to SEQ ID NO: 21870
  Synthetic polypeptide

SEQ ID NO: 21872 - protein, 76 aa, Artificial Sequence; identical to SEQ ID NO: 21870
  Synthetic polypeptide

SEQ ID NO: 21873 - protein, 76 aa, Artificial Sequence; identical to SEQ ID NO: 21870
  Synthetic polypeptide

SEQ ID NO: 21874 - protein, 76 aa, Artificial Sequence; identical to SEQ ID NO: 21870
  Synthetic polypeptide

SEQ ID NO: 21875 - protein, 133 aa, Artificial Sequence
  Synthetic polypeptide
GAVAHACNPSTLGGQGLGHSKEAAAPAPIGELAPGSFLAAVVDALELGPPVVISPSLSGMYSLPFLTAPGSQLPGFVPVAPICTDKINAANYASVKVPLCGKLRCPCQEQGRVHPWAFLIWGLDNQGVSSGRS

SEQ ID NO: 21876 - protein, 646 aa, Artificial Sequence
  Synthetic polypeptide
TWEVEVAVSRDHTTALQPGDRLTDDQGPVLMTTVAMPVFSKQNETRSKGILLGVVGTDVPVKELLKTIPKYKLGIHGYAFAITNNGYILTHPELRLLYEEGKKRRKPNYSSVDLSEVEWEDRDDVLRNAMVNRKTGKFSMEVKKTVDKGKRVLVMTNDYYYTDIKGTPFSLGVALSRGHGKYFFRGNVTIEEGLHDLEHPDVSLADEWSYCNTDLHPEHRHLSQLEAIKLYLKGKEPLLQCDKELIQEVLFDAVVSAPIEAYWTSLALNKSENSDKGVEVAFLGTRTGLSRINLFVGAEQLTNQDFLKAGDKENIFNADHFPLWYRRAAEQIPGSFVYSIPFSTGPVNKSNVVTASTSIQLLDERKSPVVAAVGIQMKLEFFQRKFWTASRQCASLDGKCSISCDDETVNCYLIDNNGFILVSEDYTQTGDFFGEIEGAVMNKLLTMGSFKRITLYDYQAMCRANKESSDGAHGLLDPYNAFLSAVKWIMTELVLFLVEFNLCSWWHSDMTAKAQKLKQTLEPCDTEYPAFVSERTIKETTGNIACEDCSKSFVIQQIPSSNLFMVVVDSSCLCESVAPITMAPIEIRYNESLKCERLKAQKIRRRPESCHGFHPEENARECGGAPSLQAQTVLLLLPLLLMLFSR

SEQ ID NO: 21877 - protein, 646 aa, Artificial Sequence; identical to SEQ ID NO: 21876
  Synthetic polypeptide

SEQ ID NO: 21878 - protein, 646 aa, Artificial Sequence; identical to SEQ ID NO: 21876
  Synthetic polypeptide

SEQ ID NO: 21879 - protein, 646 aa, Artificial Sequence; identical to SEQ ID NO: 21876
  Synthetic polypeptide

SEQ ID NO: 21880 - protein, 13 aa, Artificial Sequence
  Synthetic polypeptide
AEITLLHSSLVTG

SEQ ID NO: 21881 - protein, 13 aa, Artificial Sequence
  Synthetic polypeptide
AEITLLHSSLVTG

SEQ ID NO: 21882 - protein, 13 aa, Artificial Sequence
  Synthetic polypeptide
AEITLLHSSLVTG

SEQ ID NO: 21883 - protein, 13 aa, Artificial Sequence
  Synthetic polypeptide
AEITLLHSSLVTG

SEQ ID NO: 21884 - protein, 13 aa, Artificial Sequence
  Synthetic polypeptide
AEITLLHSSLVTG

SEQ ID NO: 21885 - protein, 13 aa, Artificial Sequence
  Synthetic polypeptide
AEITLLHSSLVTG

SEQ ID NO: 21886 - protein, 3 aa, Artificial Sequence
  Synthetic polypeptide
QAD

SEQ ID NO: 21887 - protein, 3 aa, Artificial Sequence
  Synthetic polypeptide
QAD

SEQ ID NO: 21888 - protein, 3 aa, Artificial Sequence
  Synthetic polypeptide
QAD

SEQ ID NO: 21889 - protein, 3 aa, Artificial Sequence
  Synthetic polypeptide
QAD

SEQ ID NO: 21890 - protein, 3 aa, Artificial Sequence
  Synthetic polypeptide
QAD

SEQ ID NO: 21891 - protein, 3 aa, Artificial Sequence
  Synthetic polypeptide
QAD

SEQ ID NO: 21892 - protein, 174 aa, Artificial Sequence
  Synthetic polypeptide
TWEVEVAVSRDHTTALQPGDRLTDDQGPVLMTTVAMPVFSKQNETRSKGILLGVVGTDVPVKELLKTIPKYKLGIHGYAFAITNNGYILTHPELRLLYEEGKKRRKPNYSSVDLSEVEWEDRDDVLRNAMVNRKTGKFSMEVKKTVDKGFRCGAFQRSWEIFLPRECNHRRRPA

SEQ ID NO: 21893 - protein, 174 aa, Artificial Sequence; identical to SEQ ID NO: 21892
  Synthetic polypeptide

SEQ ID NO: 21894 - protein, 276 aa, Artificial Sequence
  Synthetic polypeptide
TSVGIQMKLEFFQRKFWTASRQCASLDGKCSISCDDETVNCYLIDNNGFILVSEDYTQTGDFFGEIEGAVMNKLLTMGSFKRITLYDYQAMCRANKESSDGAHGLLDPYNAFLSAVKWIMTELVLFLVEFNLCSWWHSDMTAKAQKLKQTLEPCDTEYPAFVSERTIKETTGNIACEDCSKSFVIQQIPSSNLFMVVVDSSCLCESVAPITMAPIEIRYNESLKCERLKAQKIRRRPESCHGFHPEENARECGGAPSLQAQTVLLLLPLLLMLFSR

SEQ ID NO: 21895 - protein, 276 aa, Artificial Sequence; identical to SEQ ID NO: 21894
  Synthetic polypeptide

SEQ ID NO: 21896 - protein, 276 aa, Artificial Sequence; identical to SEQ ID NO: 21894
  Synthetic polypeptide

SEQ ID NO: 21897 - protein, 276 aa, Artificial Sequence; identical to SEQ ID NO: 21894
  Synthetic polypeptide

SEQ ID NO: 21898 - protein, 2 aa, Artificial Sequence
  Synthetic polypeptide
PL

SEQ ID NO: 21899 - protein, 2 aa, Artificial Sequence
  Synthetic polypeptide
PL

SEQ ID NO: 21900 - protein, 2 aa, Artificial Sequence
  Synthetic polypeptide
PL

SEQ ID NO: 21901 - protein, 2 aa, Artificial Sequence
  Synthetic polypeptide
PL

SEQ ID NO: 21902 - protein, 70 aa, Artificial Sequence
  Synthetic polypeptide
DGKQIISLGLNLYHRTPGRFQHWQYQVLPPEWGEGQGVASLFKKQSDPQISHVRTTYACPPPSSKKPLQA

SEQ ID NO: 21903 - protein, 70 aa, Artificial Sequence; identical to SEQ ID NO: 21902
  Synthetic polypeptide

SEQ ID NO: 21904 - protein, 70 aa, Artificial Sequence; identical to SEQ ID NO: 21902
  Synthetic polypeptide

SEQ ID NO: 21905 - protein, 70 aa, Artificial Sequence; identical to SEQ ID NO: 21902
  Synthetic polypeptide

SEQ ID NO: 21906 - protein, 70 aa, Artificial Sequence; identical to SEQ ID NO: 21902
  Synthetic polypeptide

SEQ ID NO: 21907 - protein, 70 aa, Artificial Sequence; identical to SEQ ID NO: 21902
  Synthetic polypeptide

SEQ ID NO: 21908 - protein, 70 aa, Artificial Sequence; identical to SEQ ID NO: 21902
  Synthetic polypeptide

SEQ ID NO: 21909 - protein, 70 aa, Artificial Sequence; identical to SEQ ID NO: 21902
  Synthetic polypeptide

SEQ ID NO: 21910 - protein, 70 aa, Artificial Sequence; identical to SEQ ID NO: 21902
  Synthetic polypeptide

SEQ ID NO: 21911 - protein, 76 aa, Artificial Sequence
  Synthetic polypeptide
SHWVSIYITEPLEGSSIGSTRCCPQSGVKVKELQVCLRSSQIPKSPMSVQLMPALLPLAKNHCRPKSTSSSQKIDW

SEQ ID NO: 21912 - protein, 76 aa, Artificial Sequence; identical to SEQ ID NO: 21911
  Synthetic polypeptide

SEQ ID NO: 21913 - protein, 76 aa, Artificial Sequence; identical to SEQ ID NO: 21911
  Synthetic polypeptide

SEQ ID NO: 21914 - protein, 76 aa, Artificial Sequence; identical to SEQ ID NO: 21911
  Synthetic polypeptide

SEQ ID NO: 21915 - protein, 76 aa, Artificial Sequence; identical to SEQ ID NO: 21911
  Synthetic polypeptide

SEQ ID NO: 21916 - protein, 76 aa, Artificial Sequence; identical to SEQ ID NO: 21911
  Synthetic polypeptide

SEQ ID NO: 21917 - protein, 76 aa, Artificial Sequence; identical to SEQ ID NO: 21911
  Synthetic polypeptide

SEQ ID NO: 21918 - protein, 76 aa, Artificial Sequence; identical to SEQ ID NO: 21911
  Synthetic polypeptide

SEQ ID NO: 21919 - protein, 76 aa, Artificial Sequence; identical to SEQ ID NO: 21911
  Synthetic polypeptide

SEQ ID NO: 21920 - protein, 514 aa, Artificial Sequence
  Synthetic polypeptide
QKTIAGLSLPLPPKKLIGNMDREFIAERQKGLQNYLNVITTNHILSNCELVKKFLDPNNYSANYTEIALQQVSMFFRSEPKWEVVEPLKDIGWRIRKKYFLMKIKNQPKERLVLSWADLGPDKYLSDKDFQCLIKLLPSCLHPYIYRVTFATANESSALLIRMFNEKGTLKDLIYKAKPKDPFLKKYCNPKKIQGLELQQIKTYGRQILEVLKFLHDKGFPYGHLHASNVMLDGDTCRLLDLENSLLGLPSFYRSYFSQFRKINTLESVDVHCFGHLLYEMTYGRPPDSVPVDSFPPAPSMAVVAVLESTLSCEACKNGMPTISRLLQMPLFSDVLLTTSEKPQFKIPTKLKEALRIAKECIEKRLIEEQKQIHQHRRLTRAQSHHGSEEERKKRKILARKKSKRSALENSEEHSAKYSNSNNSAGSGASSPLTSPSSPTPPSTSGISALPPPPPPPPPPAAPLPPASTEAPAQLSSQAVNGMSRGALLSSIQNFQKGTLRKAKTCDHSAPKIG

SEQ ID NO: 21921 - protein, 514 aa, Artificial Sequence; identical to SEQ ID NO: 21920
  Synthetic polypeptide

SEQ ID NO: 21922 - protein, 514 aa, Artificial Sequence; identical to SEQ ID NO: 21920
  Synthetic polypeptide

SEQ ID NO: 21923 - protein, 451 aa, Artificial Sequence
  Synthetic polypeptide
QKTIAGLSLPLPPKKLIGNMDREFIAERQKGLQNYLNVITTNHILSNCELVKKFLDPNNYSANYTEIALQQVSMFFRSEPKWEVVEPLKDIGWRIRKKYFLMKIKNQPKERLVLSWADLGPDKYLSDKDFQCLIKLLPSCLHPYIYRVTFATANESSALLIRMFNEKGTLKDLIYKAKPKDPFLKKYCNPKKIQGLELQQIKTYGRQILEVLKFLHDKGFPYGHLHASNVMLDGDTCRLLDLENSLLGLPSFYRSYFSQFRKINTLESVDVHCFGHLLYEMTYGRPPDSVPVDSFPPAPSMAVVAVLESTLSCEACKNGMPTISRLLQMPLFSDVLLTTSEKPQFKIPTKLKEALRIAKECIEKRLIEEQKQIHQHRRLTRAQSHHGSEEERKKRKILARKKSKRSALENSEEHSAKYSNSNNSAGSGASSPLTSPSSPTPPSTSVEHAPF

SEQ ID NO: 21924 - protein, 451 aa, Artificial Sequence; identical to SEQ ID NO: 21923
  Synthetic polypeptide

SEQ ID NO: 21925 - protein, 451 aa, Artificial Sequence; identical to SEQ ID NO: 21923
  Synthetic polypeptide

SEQ ID NO: 21926 - protein, 516 aa, Artificial Sequence
  Synthetic polypeptide
QKTIAGLSLPLPPKKLIGNMDREFIAERQKGLQNYLNVITTNHILSNCELVKKFLDPNNYSANYTEIALQQVSMFFRSEPKWEVVEPLKDIGWRIRKKYFLMKIKNQPKERLVLSWADLGPDKYLSDKDFQCLIKLLPSCLHPYIYRVTFATANESSALLIRMFNEKGTLKDLIYKAKPKDPFLKKYCNPKKIQGLELQQIKTYGRQILEVLKFLHDKGFPYGHLHASNVMLDGDTCRLLDLENSLLGLPSFYRSYFSQFRKINTLESVDVHCFGHLLYEMTYGRPPDSVPVDSFPPAPSMAVVAVLESTLSCEACKNGMPTISRLLQMPLFSDVLLTTSEKPQFKIPTKLKEALRIAKECIEKRLIEEQKQIHQHRRLTRAQSHHGSEEERKKRKILARKKSKRSALENSEEHSAKYSNSNNSGSGASSPLTSPSSPTPPSTSAALGLSKRCKERDICITSTSSTSTTTSSSLASCEHRGTCPALVSGCEWHEPRGLAQLHPEFPKRNFEESQNL

SEQ ID NO: 21927 - protein, 77 aa, Artificial Sequence
  Synthetic polypeptide
QKTIAGLSLPLPPKKLIGNMDREFIAERQKGLQNYLNVITTNHILSNCELVKKFLDPNNYSANYTAPLHLSGYLCHS

SEQ ID NO: 21928 - protein, 58 aa, Artificial Sequence
  Synthetic polypeptide
QKTIAGLSLPLPPKKLIGNMDREFIAERQKGLQNYLNVITTNHILSNCELVKKFLDPN

SEQ ID NO: 21929 - protein, 13 aa, Artificial Sequence
  Synthetic polypeptide
EKKEPSGSRRLQA

SEQ ID NO: 21930 - protein, 13 aa, Artificial Sequence
  Synthetic polypeptide
EKKEPSGSRRLQA

SEQ ID NO: 21931 - protein, 13 aa, Artificial Sequence
  Synthetic polypeptide
EKKEPSGSRRLQA

SEQ ID NO: 21932 - protein, 13 aa, Artificial Sequence
  Synthetic polypeptide
EKKEPSGSRRLQA

SEQ ID NO: 21933 - protein, 13 aa, Artificial Sequence
  Synthetic polypeptide
EKKEPSGSRRLQA

SEQ ID NO: 21934 - protein, 13 aa, Artificial Sequence
  Synthetic polypeptide
EKKEPSGSRRLQA

SEQ ID NO: 21935 - protein, 13 aa, Artificial Sequence
  Synthetic polypeptide
EKKEPSGSRRLQA

SEQ ID NO: 21936 - protein, 13 aa, Artificial Sequence
  Synthetic polypeptide
EKKEPSGSRRLQA

SEQ ID NO: 21937 - protein, 13 aa, Artificial Sequence
  Synthetic polypeptide
EKKEPSGSRRLQA

SEQ ID NO: 21938 - protein, 37 aa, Artificial Sequence
  Synthetic polypeptide
RKTFNLKVTKTNRKKRNHQEAEDCRPKSTSSSQKIDW

SEQ ID NO: 21939 - protein, 37 aa, Artificial Sequence; identical to SEQ ID NO: 21938
  Synthetic polypeptide

SEQ ID NO: 21940 - protein, 37 aa, Artificial Sequence; identical to SEQ ID NO: 21938
  Synthetic polypeptide

SEQ ID NO: 21941 - protein, 37 aa, Artificial Sequence; identical to SEQ ID NO: 21938
  Synthetic polypeptide

SEQ ID NO: 21942 - protein, 37 aa, Artificial Sequence; identical to SEQ ID NO: 21938
  Synthetic polypeptide

SEQ ID NO: 21943 - protein, 37 aa, Artificial Sequence; identical to SEQ ID NO: 21938
  Synthetic polypeptide

SEQ ID NO: 21944 - protein, 37 aa, Artificial Sequence; identical to SEQ ID NO: 21938
  Synthetic polypeptide

SEQ ID NO: 21945 - protein, 37 aa, Artificial Sequence; identical to SEQ ID NO: 21938
  Synthetic polypeptide

SEQ ID NO: 21946 - protein, 37 aa, Artificial Sequence; identical to SEQ ID NO: 21938
  Synthetic polypeptide

SEQ ID NO: 21947 - protein, 525 aa, Artificial Sequence
  Synthetic polypeptide
PKQIGKKGTIRKQKIAGLSLPLPPKKLIGNMDREFIAERQKGLQNYLNVITTNHILSNCELVKKFLDPNNYSANYTEIALQQVSMFFRSEPKWEVVEPLKDIGWRIRKKYFLMKIKNQPKERLVLSWADLGPDKYLSDKDFQCLIKLLPSCLHPYIYRVTFATANESSALLIRMFNEKGTLKDLIYKAKPKDPFLKKYCNPKKIQGLELQQIKTYGRQILEVLKFLHDKGFPYGHLHASNVMLDGDTCRLLDLENSLLGLPSFYRSYFSQFRKINTLESVDVHCFGHLLYEMTYGRPPDSVPVDSFPPAPSMAVVAVLESTLSCEACKNGMPTISRLLQMPLFSDVLLTTSEKPQFKIPTKLKEALRIAKECIEKRLIEEQKQIHQHRRLTRAQSHHGSEEERKKRKILARKKSKRSALENSEEHSAKYSNSNNSAGSGASSPLTSPSSPTPPSTSGISALPPPPPPPPPPAAPLPPASTEAPAQLSSQAVNGMSRGALLSSIQNFQKGTLRKAKTCDHSAPKIG

SEQ ID NO: 21948 - protein, 525 aa, Artificial Sequence; identical to SEQ ID NO: 21947
  Synthetic polypeptide

SEQ ID NO: 21949 - protein, 525 aa, Artificial Sequence; identical to SEQ ID NO: 21947
  Synthetic polypeptide

SEQ ID NO: 21950 - protein, 462 aa, Artificial Sequence
  Synthetic polypeptide
PKQIGKKGTIRKQKIAGLSLPLPPKKLIGNMDREFIAERQKGLQNYLNVITTNHILSNCELVKKFLDPNNYSANYTEIALQQVSMFFRSEPKWEVVEPLKDIGWRIRKKYFLMKIKNQPKERLVLSWADLGPDKYLSDKDFQCLIKLLPSCLHPYIYRVTFATANESSALLIRMFNEKGTLKDLIYKAKPKDPFLKKYCNPKKIQGLELQQIKTYGRQILEVLKFLHDKGFPYGHLHASNVMLDGDTCRLLDLENSLLGLPSFYRSYFSQFRKINTLESVDVHCFGHLLYEMTYGRPPDSVPVDSFPPAPSMAVVAVLESTLSCEACKNGMPTISRLLQMPLFSDVLLTTSEKPQFKIPTKLKEALRIAKECIEKRLIEEQKQIHQHRRLTRAQSHHGSEEERKKRKILARKKSKRSALENSEEHSAKYSNSNNSAGSGASSPLTSPSSPTPPSTSVEHAPF

SEQ ID NO: 21951 - protein, 462 aa, Artificial Sequence; identical to SEQ ID NO: 21950
  Synthetic polypeptide

SEQ ID NO: 21952 - protein, 462 aa, Artificial Sequence; identical to SEQ ID NO: 21950
  Synthetic polypeptide

SEQ ID NO: 21953 - protein, 527 aa, Artificial Sequence
  Synthetic polypeptide
PKQIGKKGTIRKQKIAGLSLPLPPKKLIGNMDREFIAERQKGLQNYLNVITTNHILSNCELVKKFLDPNNYSANYTEIALQQVSMFFRSEPKWEVVEPLKDIGWRIRKKYFLMKIKNQPKERLVLSWADLGPDKYLSDKDFQCLIKLLPSCLHPYIYRVTFATANESSALLIRMFNEKGTLKDLIYKAKPKDPFLKKYCNPKKIQGLELQQIKTYGRQILEVLKFLHDKGFPYGHLHASNVMLDGDTCRLLDLENSLLGLPSFYRSYFSQFRKINTLESVDVHCFGHLLYEMTYGRPPDSVPVDSFPPAPSMAVVAVLESTLSCEACKNGMPTISRLLQMPLFSDVLLTTSEKPQFKIPTKLKEALRIAKECIEKRLIEEQKQIHQHRRLTRAQSHHGSEEERKKRKILARKKSKRSALENSEEHSAKYSNSNNSGSGASSPLTSPSSPTPPSTSAALGLSKRCKERDICITSTSSTSTTTSSSLASCEHRGTCPALVSGCEWHEPRGLAQLHPEFPKRNFEESQNL

SEQ ID NO: 21954 - protein, 88 aa, Artificial Sequence
  Synthetic polypeptide
PKQIGKKGTIRKQKIAGLSLPLPPKKLIGNMDREFIAERQKGLQNYLNVITTNHILSNCELVKKFLDPNNYSANYTAPLHLSGYLCHS

SEQ ID NO: 21955 - protein, 69 aa, Artificial Sequence
  Synthetic polypeptide
PKQIGKKGTIRKQKIAGLSLPLPPKKLIGNMDREFIAERQKGLQNYLNVITTNHILSNCELVKKFLDPN

SEQ ID NO: 21956 - protein, 9 aa, Artificial Sequence
  Synthetic polypeptide
LCDPGQIGS

SEQ ID NO: 21957 - protein, 9 aa, Artificial Sequence
  Synthetic polypeptide
LCDPGQIGS

SEQ ID NO: 21958 - protein, 32 aa, Artificial Sequence
  Synthetic polypeptide
ILAPLLTSCVTLDKLAHKGLSAAFTDPDAIRS

SEQ ID NO: 21959 - protein, 32 aa, Artificial Sequence; identical to SEQ ID NO: 21958
  Synthetic polypeptide

SEQ ID NO: 21960 - protein, 177 aa, Artificial Sequence
  Synthetic polypeptide
PWTNWLIKDSVQHLQTLTQSGADQHEAWNQTTVIHLQAAKVHCYYVTVKGFTEALEKLENEPAIQQVLKRLCDLHAIHGILTNSGDFLHDAFLSGAQVDMARTAYLDLLRLIRKDAILLTDAFDFTDQCLNSALGCYDGNVYERLFQWAQKSPTNTQENPAYEEYIRPLLQSWRSKL

SEQ ID NO: 21961 - protein, 177 aa, Artificial Sequence; identical to SEQ ID NO: 21960
  Synthetic polypeptide

SEQ ID NO: 21962 - protein, 99 aa, Artificial Sequence
  Synthetic polypeptide
ISRHVLGDPEGAGRHWGPDGPARIQRVESGAHQAQEAAEPREGLSESPGAPPGAAHEPQKGPWCGQQARAAACPRAPPAEPAHQEEEGGAGSQAAAVPL

SEQ ID NO: 21963 - protein, 99 aa, Artificial Sequence; identical to SEQ ID NO: 21962
  Synthetic polypeptide

SEQ ID NO: 21964 - protein, 160 aa, Artificial Sequence
  Synthetic polypeptide
SPHSSENNLFITESAAMYSEIQRERADIGGLMARPEYREWNPELIKPKKLLNPVKASRSHQELHRELLMNHRRGLGVDSKPELQRVLEHRRRNQLIKKKKEELEAKRLQCPFEQELLRRQQRLNQLEKPPEKEEDHAPEFIKVRENLRRIATLTSEEREL

SEQ ID NO: 21965 - protein, 160 aa, Artificial Sequence; identical to SEQ ID NO: 21964
  Synthetic polypeptide

SEQ ID NO: 21966 - protein, 19 aa, Artificial Sequence
  Synthetic polypeptide
LNQPPCTRRSRGSGQTLGA

SEQ ID NO: 21967 - protein, 19 aa, Artificial Sequence
  Synthetic polypeptide
LNQPPCTRRSRGSGQTLGA

SEQ ID NO: 21968 - protein, 12 aa, Artificial Sequence
  Synthetic polypeptide
LFATYVTLAPET

SEQ ID NO: 21969 - protein, 12 aa, Artificial Sequence
  Synthetic polypeptide
LFATYVTLAPET

SEQ ID NO: 21970 - protein, 12 aa, Artificial Sequence
  Synthetic polypeptide
LFATYVTLAPET

SEQ ID NO: 21971 - protein, 12 aa, Artificial Sequence
  Synthetic polypeptide
LFATYVTLAPET

SEQ ID NO: 21972 - protein, 33 aa, Artificial Sequence
  Synthetic polypeptide
LWLQKHDKEDFPASWRSEEEMAAEAAALRVYFQ

SEQ ID NO: 21973 - protein, 33 aa, Artificial Sequence; identical to SEQ ID NO: 21972
  Synthetic polypeptide

SEQ ID NO: 21974 - protein, 33 aa, Artificial Sequence; identical to SEQ ID NO: 21972
  Synthetic polypeptide

SEQ ID NO: 21975 - protein, 33 aa, Artificial Sequence; identical to SEQ ID NO: 21972
  Synthetic polypeptide

SEQ ID NO: 21976 - protein, 57 aa, Artificial Sequence
  Synthetic polypeptide
KGPQASVFRDCDCYISVTFCNLCDFGSRNMTRRTFLPLGDQRRKWQQKPQLCGSTFS

SEQ ID NO: 21977 - protein, 57 aa, Artificial Sequence; identical to SEQ ID NO: 21976
  Synthetic polypeptide

SEQ ID NO: 21978 - protein, 57 aa, Artificial Sequence; identical to SEQ ID NO: 21976
  Synthetic polypeptide

SEQ ID NO: 21979 - protein, 57 aa, Artificial Sequence; identical to SEQ ID NO: 21976
  Synthetic polypeptide

SEQ ID NO: 21980 - protein, 100 aa, Artificial Sequence
  Synthetic polypeptide
QLHCPFSILGHVKLVSALGCLYWPLPLRGMVLPGSHMACCFCLFMTQLRFPTKPQPGFPCPLCKWPLLQLQKHDKEDFPASWRSEEEMAAEAAALRVYFQ

SEQ ID NO: 21981 - protein, 100 aa, Artificial Sequence; identical to SEQ ID NO: 21980
  Synthetic polypeptide

SEQ ID NO: 21982 - protein, 100 aa, Artificial Sequence; identical to SEQ ID NO: 21980
  Synthetic polypeptide

SEQ ID NO: 21983 - protein, 100 aa, Artificial Sequence; identical to SEQ ID NO: 21980
  Synthetic polypeptide

SEQ ID NO: 21984 - protein, 55 aa, Artificial Sequence
  Synthetic polypeptide
LSSDSPPNPSQAFPVLSASGPYSSSRNMTRRTFLPLGDQRRKWQQKPQLCGSTFS

SEQ ID NO: 21985 - protein, 55 aa, Artificial Sequence; identical to SEQ ID NO: 21984
  Synthetic polypeptide

SEQ ID NO: 21986 - protein, 55 aa, Artificial Sequence; identical to SEQ ID NO: 21984
  Synthetic polypeptide

SEQ ID NO: 21987 - protein, 55 aa, Artificial Sequence; identical to SEQ ID NO: 21984
  Synthetic polypeptide

SEQ ID NO: 21988 - protein, 60 aa, Artificial Sequence
  Synthetic polypeptide
ACFCLRLSVLATSSAWNGSSWISHGLLFLLIHDSAQIPHQTPARLSLSSLQVALTPAPET

SEQ ID NO: 21989 - protein, 60 aa, Artificial Sequence; identical to SEQ ID NO: 21988
  Synthetic polypeptide

SEQ ID NO: 21990 - protein, 60 aa, Artificial Sequence; identical to SEQ ID NO: 21988
  Synthetic polypeptide

SEQ ID NO: 21991 - protein, 60 aa, Artificial Sequence; identical to SEQ ID NO: 21988
  Synthetic polypeptide

SEQ ID NO: 21992 - protein, 999 aa, Artificial Sequence
  Synthetic polypeptide
AKVYLNNNELTAVPSLGAASSHVVSLFLQHNKIRSVEGSQLKAYLSLEVLDLSLNNITEVRNTCFPHGPPIKELNLAGNRIGTLELGAFDGLSRSLLTLRLSKNRITQLPVRAFKLPRLTQLDLNRNRIRLIEGLTFQGLNSLEVLKLQRNNISKLTDGAFWGLSKMHVLHLEYNSLVEVNSGSLYGLTALHQLHLSNNSIARIHRKGWSFCQKLHELVLSFNNLTRLDEESLAELSSLSVLRLSHNSISHIAEGAFKGLRSLRVLDLDHNEISGTIEDTSGAFSGLDSLSKLTLFGNKIKSVAKRAFSGLEGLEHLNLGGNAIRSVQFDAFVKMKNLKELHISSDSFLCDCQLKWLPPWLIGRMLQAFVTATCAHPESLKGQSIFSVPPESFVCDDFLKPQIITQPETTMAMVGKDIRFTCSAASSSSSPMTFAWKKDNEVLTNADMENFVHVHAQDGEVMEYTTILHLRQVTFGHEGRYQCVITNHFGSTYSHKARLTVNVLPSFTKTPHDITIRTTTMARLECAATGHPNPQIAWQKDGGTDFPAARERRMHVMPDDDVFFITDVKIDDAGVYSCTAQNSAGSISANATLTVLETPSLVVPLEDRVVSVGETVALQCKATGNPPPRITWFKGDRPLSLTERHHLTPDNQLLVVQNVVAEDAGRYTCEMSNTLGTERAHSQLSVLPAAGCRKDGTTVGIFTIAVVSSIVLTSLVWVCIIYQTRKKSEEYSVTNTDETVVPPDVPSYLSSQGTLSDRQETVVRTEGGPQANGHIESNGVCPRDASHFPEPDTHSVACRQPKLCAGSAYHKEPWKAMEKAEGTPGPHKMEHGGRVVCSDCNTEVDCYSRGQAFHPQPVSRDSAQPSAPNGPEPGGSDQEHSPHHQCSRTAAGSCPECQGSLYPSNHDRMLTAVKKKPMASLDGKGDSSWTLARLYHPDSTELQPASSLTSGSPERAEAQYLLVSNGHLPKACDASPESTPLTGQLPGKQRVPLLLAPKS

SEQ ID NO: 21993 - protein, 9 aa, Artificial Sequence
  Synthetic polypeptide
QKCTSIIMS

SEQ ID NO: 21994 - protein, 9 aa, Artificial Sequence
  Synthetic polypeptide
QKCTSIIMS

SEQ ID NO: 21995 - protein, 5 aa, Artificial Sequence
  Synthetic polypeptide
KSVPQ

SEQ ID NO: 21996 - protein, 5 aa, Artificial Sequence
  Synthetic polypeptide
KSVPQ

SEQ ID NO: 21997 - protein, 976 aa, Artificial Sequence
  Synthetic polypeptide
AKVYLNNNELTAVPSLGAASSHVVSLFLQHNKIRSVEGSQLKAYLSLEVLDLSLNNITEVRNTCFPHGPPIKELNLAGNRIGTLELGAFDGLSRSLLTLRLSKNRITQLPVRAFKLPRLTQLDLNRNRIRLIEGLTFQGLNSLEVLKLQRNNISKLTDGAFWGLSKMHVLHLEYNSLVEVNSGSLYGLTALHQLHLSNNSIARIHRKGWSFCQKLHELVLSFNNLTRLDEESLAELSSLSVLRLSHNSISHIAEGAFKGLRSLRVLDLDHNEISGTIEDTSGAFSGLDSLSKLLLLEPSQSAGCSSPSQPHMSAGGRTLFGNKIKSVAKRAFSGLEGLEHLNLGGNAIRSVQFDAFVKMKNLKELHISSDSFLCDCQLKWLPPWLIGRMLQAFVTATCAHPESLKGQSIFSVPPESFVCDDFLKPQIITQPETTMAMVGKDIRFTCSAASSSSSPMTFAWKKDNEVLTNADMENFVHVHAQDGEVMEYTTILHLRQVTFGHEGRYQCVITNHFGSTYSHKARLTVNVLPSFTKTPHDITIRTTTMARLECAATGHPNPQIAWQKDGGTDFPAAQTPSLVVPLEDRVVSVGETVALQCKATGNPPPRITWFKGDRPLSLTERHHLTPDNQLLVVQNVVAEDAGRYTCEMSNTLGTERAHSQLSVLPAAGCRKDGTTVGIFTIAVVSSIVLTSLVWVCIIYQTRKKSEEYSVTNTDETVVPPDVPSYLSSQGTLSDRQETVVRTEGGPQANGHIESNGVCPRDASHFPEPDTHSVACRQPKLCAGSAYHKEPWKAMEKAEGTPGPHKMEHGGRVVCSDCNTEVDCYSRGQAFHPQPVSRDSAQPSAPNGPEPGGSDQEHSPHHQCSRTAAGSCPECQGSLYPSNHDRMLTAVKKKPMASLDGKGDSSWTLARLYHPDSTELQPASSLTSGSPERAEAQYLLVSNGHLPKACDASPESTPLTGQLPGKQRVPLLLAPKS

SEQ ID NO: 21998 - protein, 27 aa, Artificial Sequence
  Synthetic polypeptide
VQRTNLWSFRSVATYCGNFVMKMPGKI

SEQ ID NO: 21999 - protein, 27 aa, Artificial Sequence
  Synthetic polypeptide
VQRTNLWSFRSVATYCGNFVMKMPGKI

SEQ ID NO: 22000 - protein, 27 aa, Artificial Sequence
  Synthetic polypeptide
VQRTNLWSFRSVATYCGNFVMKMPGKI

SEQ ID NO: 22001 - protein, 27 aa, Artificial Sequence
  Synthetic polypeptide
VQRTNLWSFRSVATYCGNFVMKMPGKI

SEQ ID NO: 22002 - protein, 850 aa, Artificial Sequence
  Synthetic polypeptide
ICCHLLWELCDENARKDLKTLPAFPTKTLQEHPSLAYCEDRVIEHYLKIKGLTRGQAVVQYMKIVEALPTYGVHYYAVKDKQGLPWWLGISYKGIGQYDIQDKVKPRKLFQWKQLENLYFREKKFAVEVHDPRRISVSRRTFGQSGLFVQTWYANSSLIKSIWVMAISQHQFYLDRKQSKAKIPSARSLDEIAMDLTETGTQRASKLVTLETKSQFIMASNGSLISSGSQDSEVSEEQKREKILELKKKEKLLQEKLLKKVEELKKICLREAELTGKMPKEYPLNIGEKPPQVRRRVGTAFKLDDNLLPSEEDPALQELESNFLIQQKLVEAAKKLANEPDLCKTVKKKRKQDYTDAMKKLQEIENAINEYRIRCGKKPSQKATVLPEDIIPSESSSLSDTTTYDDPSDAFTFPGQRSSSVPHSPRILPPKSLGIERIHFRKSSINEQFVDTRQSREMLSTHSSPYKTLERRPQGGRSMPTTPVLTRNAYSSSHLEPESSSQHCRQRSGSLESQSHLLSEMDSDKPFFSLSKSQRSSSTEILDDGSSYTSQSSTEYYCVTPVTGPYYTTQTLDTRTRGRRRSKKQNVSTSNSGSMPNLAQKDSLRNGVYSKSQEPPSSSYYIAGYTPYAECDFYYSGGYVYENDTEGQYSVNPSYRSSAHYGYERQRDYSRSFHEDEVDRVPHNPYATLRLPRKAAAKSEHITKNIHKALVAEHLRGWYQRASGQKDQGHSPQTSFDSDRGSQRCLGFAGLQVPCSPSSRASSYSSVSSTNASGNWRTQLTIGLSDYETPAHSSYTSCYGNVYNPLPSPSRQYTEISQLDGTDGNQLEDNLESSEQRLFWHEDSKPGTLV

SEQ ID NO: 22003 - protein, 850 aa, Artificial Sequence; identical to SEQ ID NO: 22002
  Synthetic polypeptide

SEQ ID NO: 22004 - protein, 108 aa, Artificial Sequence
  Synthetic polypeptide
ICCHLLWELCDENARKDLKTLPAFPTKTLQEHPSLAYCEDRVIEHYLKIKGLTRGQAVVQYMKIVEALPTYGVHYYAVKDKQGLPWWLGISYKGIGQYDIQDKVKPRK

SEQ ID NO: 22005 - protein, 37 aa, Artificial Sequence
  Synthetic polypeptide
ICCHLLWELCDENARKDLKTLPAFPTKTLQEHPSLAY

SEQ ID NO: 22006 - protein, 22 aa, Artificial Sequence
  Synthetic polypeptide
VQRTNLWSFRSVATYCGNFVMK

SEQ ID NO: 22007 - protein, 12 aa, Artificial Sequence
  Synthetic polypeptide
ICCHLLWELCDE

SEQ ID NO: 22008 - protein, 75 aa, Artificial Sequence
  Synthetic polypeptide
GCAWCLTPIIPALWETKIQKVGSSCRSLKGSLPYKGPAGVRTGRTRSSSTACPGGRNCIKSSPFSFWAADTLLQL

SEQ ID NO: 22009 - protein, 75 aa, Artificial Sequence; identical to SEQ ID NO: 22008
  Synthetic polypeptide

SEQ ID NO: 22010 - protein, 191 aa, Artificial Sequence
  Synthetic polypeptide
SQHFGRPRSKKLAALAEALKEVSLTKAQLGLELEELEAAALLVQEEETALKAAHSVSGQQTLCSSSEASDSEDSDSSVSSGNEDSGSDSEQDELKDSPSETVSSLQGPFLEESSAFLIVDGGVRRNTAIQESDASQGKPLASSWPLGVSGPLIEELGEQLKTTVQVSEPKGTTAVNRSNIQERDGCQTPNN

SEQ ID NO: 22011 - protein, 191 aa, Artificial Sequence; identical to SEQ ID NO: 22010
  Synthetic polypeptide

SEQ ID NO: 22012 - protein, 27 aa, Artificial Sequence
  Synthetic polypeptide
MCMVSHAHNPSTLGDQDPKSWQLLQKP

SEQ ID NO: 22013 - protein, 27 aa, Artificial Sequence
  Synthetic polypeptide
MCMVSHAHNPSTLGDQDPKSWQLLQKP

SEQ ID NO: 22014 - protein, 126 aa, Artificial Sequence
  Synthetic polypeptide
NPKIGSSENIRERLSLPSTPQQNFGALNIGFIISQLRKVPPHSWNCTPIGTLKRSARSWWSSSNVWSSNQSRDCSCFKTSRSFSAGKLRLSSSTPAAWRSWLSASPPKSAAPGSTSSRRTSTSSRL

SEQ ID NO: 22015 - protein, 126 aa, Artificial Sequence; identical to SEQ ID NO: 22014
  Synthetic polypeptide

SEQ ID NO: 22016 - protein, 51 aa, Artificial Sequence
  Synthetic polypeptide
ERSLHTPGTVHLLEPLRDPHAAGGAVQMSGAAIRVATAAASRPPGVFPPES

SEQ ID NO: 22017 - protein, 51 aa, Artificial Sequence; identical to SEQ ID NO: 22016
  Synthetic polypeptide

SEQ ID NO: 22018 - protein, 34 aa, Artificial Sequence
  Synthetic polypeptide
PGGDSSATESWDEELSPSTVLYTATQHTPTSITL

SEQ ID NO: 22019 - protein, 51 aa, Artificial Sequence
  Synthetic polypeptide
DQPDQHGETPSLLKIQNSQVGIAVQQKAGMRSFLLPLCCIQQHSTHLQASP

SEQ ID NO: 22020 - protein, 51 aa, Artificial Sequence; identical to SEQ ID NO: 22019
  Synthetic polypeptide

SEQ ID NO: 22021 - protein, 51 aa, Artificial Sequence; identical to SEQ ID NO: 22019
  Synthetic polypeptide

SEQ ID NO: 22022 - protein, 51 aa, Artificial Sequence; identical to SEQ ID NO: 22019
  Synthetic polypeptide

SEQ ID NO: 22023 - protein, 51 aa, Artificial Sequence; identical to SEQ ID NO: 22019
  Synthetic polypeptide

SEQ ID NO: 22024 - protein, 51 aa, Artificial Sequence; identical to SEQ ID NO: 22019
  Synthetic polypeptide

SEQ ID NO: 22025 - protein, 51 aa, Artificial Sequence; identical to SEQ ID NO: 22019
  Synthetic polypeptide

SEQ ID NO: 22026 - protein, 8 aa, Artificial Sequence
  Synthetic polypeptide
KSKIARWG

SEQ ID NO: 22027 - protein, 8 aa, Artificial Sequence
  Synthetic polypeptide
KSKIARWG

SEQ ID NO: 22028 - protein, 8 aa, Artificial Sequence
  Synthetic polypeptide
KSKIARWG

SEQ ID NO: 22029 - protein, 8 aa, Artificial Sequence
  Synthetic polypeptide
KSKIARWG

SEQ ID NO: 22030 - protein, 8 aa, Artificial Sequence
  Synthetic polypeptide
KSKIARWG

SEQ ID NO: 22031 - protein, 8 aa, Artificial Sequence
  Synthetic polypeptide
KSKIARWG

SEQ ID NO: 22032 - protein, 8 aa, Artificial Sequence
  Synthetic polypeptide
KSKIARWG

SEQ ID NO: 22033 - protein, 1314 aa, Artificial Sequence
  Synthetic polypeptide
PGGDSSATESWDEELSPSTVLYTATQHTPTSITLTVRRTKPKKRKKSPEKGRAAPKTKKIKNSPSEAQNLDENTTEGWENRIRLWTDQYEEAFTNQYSADVQNALEQHLHSSKEFVGKPTILDTINKTELACNNTVIGSQMQLQLGRVTRVQKHRKILRAARDLALDTLIIEYRGKVMLRQQFEVNGHFFKKPYPFVLFYSKFNGVEMCVDARTFGNDARFIRRSCTPNAEVRHMIADGMIHLCIYAVSAITKDAEVTIAFDYEYSNCNYKVDCACHKGNRNCPIQKRNPNATELPLLPPPPSLPTIGAETRRRKARRKELEMEQQNEASEENNDQQSQEVPEKVTVSSDHEEVDNPEEKPEEEKEEVIDDQENLAHSRRTREDRKVEAIMHAFENLEKRKKRRDQPLEQSNSDVEITTTTSETPVGEETKTEAPESEVSNSVSNVTIPSTPQSVGVNTRRSSQAGDIAAEKLVPKPPPAKPSRPRPKSRISRYRTSSAQRLKRQKQANAQQAELSQAALEEGGSNSLVTPTEAGSLDSSGENRPLTGSDPTVVSITGSHVNRAASKYPKTKKYLVTEWLNDKAEKQECPVECPLRITTDPTVLATTLNMLPGLIHSPLICTTPKHYIRFGSPFIPERRRRPLLPDGTFSSCKKRWIKQALEEGMTQTSSVPQETRTQHLYQSNENSSSSSICKDNADLLSPLKKWKSRYLMEQNVTKLLRPLSPVTPPPPNSGSKSPQLATPGSSHPGEEECRNGYSLMFSPVTSLTTASRCNTPLQFELCHRKDLDLAKVGYLDSNTNSCADRPSLLNSGHSDLAPHPSLGPTSETGFPSRSGDGHQTLVRNSDQAFRTEFNLMYAYSPLNAMPRADGLYRGSPLVGDRKPLHLDGGYCSPAEGFSSRYEHGLMKDLSRGSLSPGGERACEGVPSAPQNPPQRKKVSLLEYRKRKQEAKENSAGGGGDSAQSKSKSAGAGQGSSNSVSDTGAHGVQGSSARTPSSPHKKFSPSHSSMSHLEAVSPSDSRGTSSSHCRPQENISSRWMVPTSVERLREGGSIPKVLRSSVRVAQKGEPSPTWESNITEKDSDPADGEGPETLSSALSKGATVYSPSRYSYQLLQCDSPRTESQSLLQQSSSPFRGHPTQSPGYSYRTTALRPGNPPSHGSSESSLSSTSYSSPAHPVSTDSLAPFTGTPGYFSSQPHSGNSTGSNLPRRSCPSSAASPTLQGPSDSPTSDSVSQSSTGTLSSTSFPQNSRSSLPSDLRTISLPSAGQSAVYQASRVSAVSNSQHYPHRGSGGVHQYRLQPLQGSGVKTQTGLS

SEQ ID NO: 22034 - protein, 1314 aa, Artificial Sequence; identical to SEQ ID NO: 22033
  Synthetic polypeptide

SEQ ID NO: 22035 - protein, 1314 aa, Artificial Sequence; identical to SEQ ID NO: 22033
  Synthetic polypeptide

SEQ ID NO: 22036 - protein, 1327 aa, Artificial Sequence
  Synthetic polypeptide
PGGDSSATESWDEELSPSTVLYTATQHTPTSITLTVRRTKPKKRKKSPEKGRAAPKTKKIKAFREGSRKSLRMKNSPSEAQNLDENTTEGWENRIRLWTDQYEEAFTNQYSADVQNALEQHLHSSKEFVGKPTILDTINKTELACNNTVIGSQMQLQLGRVTRVQKHRKILRAARDLALDTLIIEYRGKVMLRQQFEVNGHFFKKPYPFVLFYSKFNGVEMCVDARTFGNDARFIRRSCTPNAEVRHMIADGMIHLCIYAVSAITKDAEVTIAFDYEYSNCNYKVDCACHKGNRNCPIQKRNPNATELPLLPPPPSLPTIGAETRRRKARRKELEMEQQNEASEENNDQQSQEVPEKVTVSSDHEEVDNPEEKPEEEKEEVIDDQENLAHSRRTREDRKVEAIMHAFENLEKRKKRRDQPLEQSNSDVEITTTTSETPVGEETKTEAPESEVSNSVSNVTIPSTPQSVGVNTRRSSQAGDIAAEKLVPKPPPAKPSRPRPKSRISRYRTSSAQRLKRQKQANAQQAELSQAALEEGGSNSLVTPTEAGSLDSSGENRPLTGSDPTVVSITGSHVNRAASKYPKTKKYLVTEWLNDKAEKQECPVECPLRITTDPTVLATTLNMLPGLIHSPLICTTPKHYIRFGSPFIPERRRRPLLPDGTFSSCKKRWIKQALEEGMTQTSSVPQETRTQHLYQSNENSSSSSICKDNADLLSPLKKWKSRYLMEQNVTKLLRPLSPVTPPPPNSGSKSPQLATPGSSHPGEEECRNGYSLMFSPVTSLTTASRCNTPLQFELCHRKDLDLAKVGYLDSNTNSCADRPSLLNSGHSDLAPHPSLGPTSETGFPSRSGDGHQTLVRNSDQAFRTEFNLMYAYSPLNAMPRADGLYRGSPLVGDRKPLHLDGGYCSPAEGFSSRYEHGLMKDLSRGSLSPGGERACEGVPSAPQNPPQRKKVSLLEYRKRKQEAKENSAGGGGDSAQSKSKSAGAGQGSSNSVSDTGAHGVQGSSARTPSSPHKKFSPSHSSMSHLEAVSPSDSRGTSSSHCRPQENISSRWMVPTSVERLREGGSIPKVLRSSVRVAQKGEPSPTWESNITEKDSDPADGEGPETLSSALSKGATVYSPSRYSYQLLQCDSPRTESQSLLQQSSSPFRGHPTQSPGYSYRTTALRPGNPPSHGSSESSLSSTSYSSPAHPVSTDSLAPFTGTPGYFSSQPHSGNSTGSNLPRRSCPSSAASPTLQGPSDSPTSDSVSQSSTGTLSSTSFPQNSRSSLPSDLRTISLPSAGQSAVYQASRVSAVSNSQHYPHRGSGGVHQYRLQPLQGSGVKTQTGLS

SEQ ID NO: 22037 - protein, 1327 aa, Artificial Sequence; identical to SEQ ID NO: 22036
  Synthetic polypeptide

SEQ ID NO: 22038 - protein, 153 aa, Artificial Sequence
  Synthetic polypeptide
PGGDSSATESWDEELSPSTVLYTATQHTPTSITLTVRRTKPKKRKKSPEKGRAAPKTKKIKNSPSEAQNLDENTTEGWENRIRLWTDQYEEAFTNQYSADVQNALEQHLHSSKEFVGKPTILDTINKTELACNNTVIGSQMQLQLGRVTRVQK

SEQ ID NO: 22039 - protein, 78 aa, Artificial Sequence
  Synthetic polypeptide
LWDPGIIFEPHFPHGLAKEEVSRQELRQRVRMADNEVMDAFRKIMAARQKKRTPTKKEKDQAWKTLKERESILKLLDG

SEQ ID NO: 22040 - protein, 78 aa, Artificial Sequence; identical to SEQ ID NO: 22039
  Synthetic polypeptide

SEQ ID NO: 22041 - protein, 39 aa, Artificial Sequence
  Synthetic polypeptide
QCLKTRVWPQPAPDLPLTNCGILGSSLSLIFLTGWQRRR

SEQ ID NO: 22042 - protein, 39 aa, Artificial Sequence; identical to SEQ ID NO: 22041
  Synthetic polypeptide

SEQ ID NO: 22043 - protein, 24 aa, Artificial Sequence
  Synthetic polypeptide
ASFSSRAGKGGGEPAGAEAAGAHG

SEQ ID NO: 22044 - protein, 24 aa, Artificial Sequence
  Synthetic polypeptide
ASFSSRAGKGGGEPAGAEAAGAHG

SEQ ID NO: 22045 - protein, 9 aa, Artificial Sequence
  Synthetic polypeptide
QGHLVKVWR

SEQ ID NO: 22046 - protein, 246 aa, Artificial Sequence
  Synthetic polypeptide
RYGGEPAMRGYLVAIFLSAVFLYYVLHCILWGTNVYWVAPVEMKRRNKIQPCLSKPAFASLLRFHQFHPFLCAADFRKIASLYGSDKFDLPYGMRTSAEYFRLALSKLQSCDLFDEFDNIPCKKCVVVGNGGVLKNKTLGEKIDSYDVIIRMNNGPVLGHEEEVGRRTTFRLFYPESVFSDPIHNDPNTTVILTAFKPHDLRWLLELLMGDKINTNGFWKKPALNLIYKPYQIRILDPFIIRTAAY

SEQ ID NO: 22047 - protein, 12 aa, Artificial Sequence
  Synthetic polypeptide
GPPGKGMEVSQP

SEQ ID NO: 22048 - protein, 20 aa, Artificial Sequence
  Synthetic polypeptide
KWLYCPRQILWSGVANEPFN

SEQ ID NO: 22049 - protein, 20 aa, Artificial Sequence
  Synthetic polypeptide
KWLYCPRQILWSGVANEPFN

SEQ ID NO: 22050 - protein, 20 aa, Artificial Sequence
  Synthetic polypeptide
KWLYCPRQILWSGVANEPFN

SEQ ID NO: 22051 - protein, 657 aa, Artificial Sequence
  Synthetic polypeptide
KRTQMEEHSMLMDRKNQYRENGYTAQGKYCGLGLQMNHSIESKGNEITLLFMSGIHVSGRGFLASYSVIDKQDLITCLDTASNFLEPEFSKYCPAGCLLPFAEISGTIPHGYRDSSPLCMAGVHAGVVSNTLGGQISVVISKGIPYYESSLANNVTSVVGHLSTSLFTFKTSGCYGTLGMESGVIADPQITASSVLEWTDHTGQENSWKPKKARLKKPGPPWAAFATDEYQWLQIDLNKEKKITGIITTGSTMVEHNYYVSAYRILYSDDGQKWTVYREPGVEQDKIFQGNKDYHQDVRNNFLPPIIARFIRVNPTQWQQKIAMKMELLGCQFIPKGRPPKLTQPPPPRNSNDLKNTTAPPKIAKGRAPKFTQPLQPRSSNEFPAQTEQTTASPDIRNTTVTPNVTKDVALAAVLVPVLVMVLTTLILILVCAWHWRNRKKKTEGTYDLPYWDRAGWWKGMKQFLPAKAVDHEETPVRYSSSEVNHLSPREVTTVLQADSAEYAQPLVGGIVGTLHQRSTFKPEEGKEAGYADLDPYNSPGQEVYHAYAEPLPITGPEYATPIIMDMSGHPTTSVGQPSTSTFKATGNQPPPLVGTYNTLLSRTDSCSSAQAQYDTPKAGKPGLPAPDELVYQVPQSTQEVSGAGRDGECDVFKEIL

SEQ ID NO: 22052 - protein, 37 aa, Artificial Sequence
  Synthetic polypeptide
NKRGHKWKNIPCSWIGRINIVKMAILPKANTVVWGCK

SEQ ID NO: 22053 - protein, 37 aa, Artificial Sequence; identical to SEQ ID NO: 22052
  Synthetic polypeptide

SEQ ID NO: 22054 - protein, 37 aa, Artificial Sequence; identical to SEQ ID NO: 22052
  Synthetic polypeptide

SEQ ID NO: 22055 - protein, 671 aa, Artificial Sequence
  Synthetic polypeptide
KRTQMEEHSMLMDRKNQYRENGYTAQGKYCGLGLQMNHSIESKGNEITLLFMSGIHVSGRGFLASYSVIDKQDLITCLDTASNFLEPEFSKYCPAGCLLPFAEISGTIPHGYRDSSPLCMAGVHAGVVSNTLGGQISVVISKGIPYYESSLANNVTSVVGHLSTSLFTFKTSGCYGTLGMESGVIADPQITASSVLEWTDHTGQENSWKPKKARLKKPGPPWAAFATDEYQWLQIDLNKEKKITGIITTGSTMVEHNYYVSAYRILYSDDGQKWTVYREPGVEQDKIFQGNKDYHQDVRNNFLPPIIARFIRVNPTQWQQKIAMKMELLGCQFIPKGRPPKLTQPPPPRNSNDLKNTTAPPKIAKGRAPKFTQPLQPRSSNEFPAQTEQTTASPDIRNTTVTPNVTKDVALAAVLVPVLVMVLTTLILILVCAWHWRNRKKKTEGTYDLPYWDRAGFYLMVSLACRHNEGWWKGMKQFLPAKAVDHEETPVRYSSSEVNHLSPREVTTVLQADSAEYAQPLVGGIVGTLHQRSTFKPEEGKEAGYADLDPYNSPGQEVYHAYAEPLPITGPEYATPIIMDMSGHPTTSVGQPSTSTFKATGNQPPPLVGTYNTLLSRTDSCSSAQAQYDTPKAGKPGLPAPDELVYQVPQSTQEVSGAGRDGECDVFKEIL

SEQ ID NO: 22056 - protein, 96 aa, Artificial Sequence
  Synthetic polypeptide
KRTQMEEHSMLMDRKNQYRENGYTAQGKYCGLGLQMNHSIESKGNEITLLFMSGIHVSGRGFLASYSVIDKQGNFHLLQWFLQFVISNNKNKMLFL

SEQ ID NO: 22057 - protein, 16 aa, Artificial Sequence
  Synthetic polypeptide
ETRPHSRRPGAQAQCH

SEQ ID NO: 22058 - protein, 16 aa, Artificial Sequence
  Synthetic polypeptide
ETRPHSRRPGAQAQCH

SEQ ID NO: 22059 - protein, 16 aa, Artificial Sequence
  Synthetic polypeptide
ETRPHSRRPGAQAQCH

SEQ ID NO: 22060 - protein, 16 aa, Artificial Sequence
  Synthetic polypeptide
ETRPHSRRPGAQAQCH

SEQ ID NO: 22061 - protein, 113 aa, Artificial Sequence
  Synthetic polypeptide
LSVVCEKRGHTAGGPGLKPSVTRPHHSLPEARVLCPGVAVRCPVCLEAPLVSGCLLQTPGALDPGTAGPPHPTGCCSGPHLPAPTVRPGPSAASAPPARGGLGGAAAPGGSAG

SEQ ID NO: 22062 - protein, 113 aa, Artificial Sequence; identical to SEQ ID NO: 22061
  Synthetic polypeptide

SEQ ID NO: 22063 - protein, 113 aa, Artificial Sequence; identical to SEQ ID NO: 22061
  Synthetic polypeptide

SEQ ID NO: 22064 - protein, 282 aa, Artificial Sequence
  Synthetic polypeptide
GVPIREPQTSNCLWFVRNEATQQEARGSSPVSLDLIIPFLRPGCCVLVWRSDVQFAWKHLLCPDVSYRHLGLLILALLALLTLLGVVLALTCRRPQSGPGPARPVLLLHAADSEAQRRLVGALAELLRAALGGGRDVIVDLWEGRHVARVGPLPWLWAARTRVAREQGTVLLLWSGADLRPVSGPDPRAAPLLALLHAAPRPLLLLAYFSRLCAKGDIPPPLRALPRYRLLRDLPRLLRALDARPFAEATSWGRLGARQRRQSRLELCSRLEREAARLADLG

SEQ ID NO: 22065 - protein, 282 aa, Artificial Sequence; identical to SEQ ID NO: 22064
  Synthetic polypeptide

SEQ ID NO: 22066 - protein, 282 aa, Artificial Sequence; identical to SEQ ID NO: 22064
  Synthetic polypeptide

SEQ ID NO: 22067 - protein, 86 aa, Artificial Sequence
  Synthetic polypeptide
LSVVCEKRGHTAGGPGLKPSVTRPHHSLPEARVLCPAPCFTQLPGRRRCLAHRGGGLCALRCGGQMSSLPGSTSCVRMSLTDTWGS

SEQ ID NO: 22068 - protein, 148 aa, Artificial Sequence
  Synthetic polypeptide
GVPIREPQTSNCLWFVRNEATQQEARGSSPVSLDLIIPFLRPGCCVLLHASLSSPGGEDAWLIGVGGSVPSGVAVRCPVCLEAPLVSGCLLQTPGALDPGTAGPPHPTGCCSGPHLPAPTVRPGPSAASAPPARGGLGGAAAPGGSAG

SEQ ID NO: 22069 - protein, 39 aa, Artificial Sequence
  Synthetic polypeptide
KSDSQAHPQEILIHYAKETSSQKSVSSVLQTPVSSRPMI

SEQ ID NO: 22070 - protein, 39 aa, Artificial Sequence; identical to SEQ ID NO: 22069
  Synthetic polypeptide

SEQ ID NO: 22071 - protein, 39 aa, Artificial Sequence; identical to SEQ ID NO: 22069
  Synthetic polypeptide

SEQ ID NO: 22072 - protein, 39 aa, Artificial Sequence; identical to SEQ ID NO: 22069
  Synthetic polypeptide

SEQ ID NO: 22073 - protein, 25 aa, Artificial Sequence
  Synthetic polypeptide
FTMQKRLHPRNLYLQFSRLLFPQGQ

SEQ ID NO: 22074 - protein, 25 aa, Artificial Sequence
  Synthetic polypeptide
FTMQKRLHPRNLYLQFSRLLFPQGQ

SEQ ID NO: 22075 - protein, 25 aa, Artificial Sequence
  Synthetic polypeptide
FTMQKRLHPRNLYLQFSRLLFPQGQ

SEQ ID NO: 22076 - protein, 25 aa, Artificial Sequence
  Synthetic polypeptide
FTMQKRLHPRNLYLQFSRLLFPQGQ

SEQ ID NO: 22077 - protein, 202 aa, Artificial Sequence
  Synthetic polypeptide
LVATESPRNFLKIRFPGPPPRDSNSLCKRDFIPEICIFSSPDSCFLKANDLTHSLSSYLKEICPKWVKLRKNHSEKKSVLMLIICSSAVRALELIRSMTAFRGDGKVIKLFAKHIKVQAQVKLLEKRVVHLGVGTPGRIKELVKQGGLNLSPLKFLVFDWNWRDQKLRRMMDIPEIRKEVFELLEMGVLSLCKSESLKLGLF

SEQ ID NO: 22078 - protein, 202 aa, Artificial Sequence; identical to SEQ ID NO: 22077
  Synthetic polypeptide

SEQ ID NO: 22079 - protein, 192 aa, Artificial Sequence
  Synthetic polypeptide
LVATESPRNFLKIRFPGPPPRDSNSLCKRDFIPEICIFSSPDSCFLKANDLTHSLSSYLKEICPKWVKLRKNHSEKKSVLMLIICSSAVRALELIRSMTAFRGDGKVIKLFAKHIKVQAQVKLLEKRVVHLGVGTPGRIKELVKQGGLNLSPLKFLVFDWNWRDQKLRRMMDIPEIRKEVFELLEMGVLSLC

SEQ ID NO: 22080 - protein, 96 aa, Artificial Sequence
  Synthetic polypeptide
LVATESPRNFLKIRFPGPPPRDSNSLCKRDFIPEICIFSSPDSCFLKANDLTHSLSSYLKEICPKWVKLRKNHSEKKSVLMLIICSSAVRALELIR

SEQ ID NO: 22081 - protein, 382 aa, Artificial Sequence
  Synthetic polypeptide
HRRRMISAFPNEVIKCKAAVAWEAGKPLSIEEIEVAPPKAHEVRIKIIATAVCHTDAYTLSGADPEGCFPVILGHEGAGIVESVGEGVTKLKAGDTVIPLYIPQCGECKFCLNPKTNLCQKIRVTQGKGLMPDGTSRFTCKGKTILHYMGTSTFSEYTVVADISVAKIDPLAPLDKVCLLGCGISTGYGAAVNTAKLEPGSVCAVFGLGGVGLAVIMGCKVAGASRIIGVDINKDKFARAKEFGATECINPQDFSKPIQEVLIEMTDGGVDYSFECIGNVKVMRAALEACHKGWGVSVVVGVAASGEEIATRPFQLVTGRTWKGTAFGGWKSVESVPKLVSEYMSKKIKVDEFVTHNLSFDEINKAFELMHSGKSIRTVVKI

SEQ ID NO: 22082 - protein, 24 aa, Artificial Sequence
  Synthetic polypeptide
FLHFQMRLSSARLQLLGRLESLSP

SEQ ID NO: 22083 - protein, 24 aa, Artificial Sequence
  Synthetic polypeptide
FLHFQMRLSSARLQLLGRLESLSP

SEQ ID NO: 22084 - protein, 24 aa, Artificial Sequence
  Synthetic polypeptide
FLHFQMRLSSARLQLLGRLESLSP

SEQ ID NO: 22085 - protein, 24 aa, Artificial Sequence
  Synthetic polypeptide
FLHFQMRLSSARLQLLGRLESLSP

SEQ ID NO: 22086 - protein, 24 aa, Artificial Sequence
  Synthetic polypeptide
FLHFQMRLSSARLQLLGRLESLSP

SEQ ID NO: 22087 - protein, 64 aa, Artificial Sequence
  Synthetic polypeptide
HRRRMISAFPNEVIKCKAAVAWEAGKPLSIEEIEVAPPKAHEVRIKVTLSSHFTSHSVENANFV

SEQ ID NO: 22088 - protein, 274 aa, Artificial Sequence
  Synthetic polypeptide
HRRRMISAFPNEVIKCKAAVAWEAGKPLSIEEIEVAPPKAHEVRIKIIATAVCHTDAYTLSGADPEGCFPVILGHEGAGIVESVGDTVIPLYIPQCGECKFCLNPKTNLCQKIRVTQGKGLMPDGTSRFTCKGKTILHYMGTSTFSEYTVVADISVAKIDPLAPLDKVCLLGCGISTGYGAAVNTAKLEPGSVCAVFGLGGVGLAVIMGCKVAGASRIIGVDINKDKFARAKEFGATECINPQDFSKPIQEVLIEMTDGGVDYSFECIGNVKVM

SEQ ID NO: 22089 - protein, 103 aa, Artificial Sequence
  Synthetic polypeptide
HRRRMISAFPNEVIKCKAAVAWEAGKPLSIEEIEVAPPKAHEVRIKIIATAVCHTDAYTLSGADPEGCFPVILGHEGAGIVESVGEGVTKLKAVWRMQILSKS

SEQ ID NO: 22090 - protein, 123 aa, Artificial Sequence
  Synthetic polypeptide
HRRRMISAFPNEVIKCKAAVAWEAGKPLSIEEIEVAPPKAHEVRIKIIATAVCHTDAYTLSGADPEGCFPVILGHEGAGIVESVGEGVTKLKAGDTVIPLYIPQCGECKFCLNPKTNLCQKIR

SEQ ID NO: 22091 - protein, 52 aa, Artificial Sequence
  Synthetic polypeptide
EENVTQRKGKKSIPLMVAAGICRSDEHVVSGNLVTPLPVILGHEAAGIVESV

SEQ ID NO: 22092 - protein, 41 aa, Artificial Sequence
  Synthetic polypeptide
HLSLLPVTARACCMMIRRECDTEEGEKVHPSDGGCRNLSFR

SEQ ID NO: 22093 - protein, 24 aa, Artificial Sequence
  Synthetic polypeptide
NSLSLSFLVCIMEFVGTFMDNSLI

SEQ ID NO: 22094 - protein, 24 aa, Artificial Sequence
  Synthetic polypeptide
NSLSLSFLVCIMEFVGTFMDNSLI

SEQ ID NO: 22095 - protein, 24 aa, Artificial Sequence
  Synthetic polypeptide
NSLSLSFLVCIMEFVGTFMDNSLI

SEQ ID NO: 22096 - protein, 24 aa, Artificial Sequence
  Synthetic polypeptide
NSLSLSFLVCIMEFVGTFMDNSLI

SEQ ID NO: 22097 - protein, 24 aa, Artificial Sequence
  Synthetic polypeptide
NSLSLSFLVCIMEFVGTFMDNSLI

SEQ ID NO: 22098 - protein, 24 aa, Artificial Sequence
  Synthetic polypeptide
NSLSLSFLVCIMEFVGTFMDNSLI

SEQ ID NO: 22099 - protein, 11 aa, Artificial Sequence
  Synthetic polypeptide
WSLWGHSWTIL

SEQ ID NO: 22100 - protein, 11 aa, Artificial Sequence
  Synthetic polypeptide
WSLWGHSWTIL

SEQ ID NO: 22101 - protein, 11 aa, Artificial Sequence
  Synthetic polypeptide
WSLWGHSWTIL

SEQ ID NO: 22102 - protein, 11 aa, Artificial Sequence
  Synthetic polypeptide
WSLWGHSWTIL

SEQ ID NO: 22103 - protein, 11 aa, Artificial Sequence
  Synthetic polypeptide
WSLWGHSWTIL

SEQ ID NO: 22104 - protein, 11 aa, Artificial Sequence
  Synthetic polypeptide
WSLWGHSWTIL

SEQ ID NO: 22105 - protein, 459 aa, Artificial Sequence
  Synthetic polypeptide
LATLRILATYLKLAEPQFPRLHNGVCGDIHGQFFDLMKLFEVGGSPANTRYLFLGDYVDRGYFSIECVLYLWALKILYPKTLFLLRGNHECRHLTEYFTFKQECKIKYSERVYDACMDAFDCLPLAALMNQQFLCVHGGLSPEINTLDDIRKLDRFKEPPAYGPMCDILWSDPLEDFGNEKTQEHFTHNTVRGCSYFYSYPAVCEFLQHNNLLSILRAHEAQDAGYRMYRKSQTTGFPSLITIFSAPNYLDVYNNKAAVLKYENNVMNIRQFNCSPHPYWLPNFMDVFTWSLPFVGEKVTEMLVNVLNICSDDELGSEEDGFDGATAAARKEVIRNKIRAIGKMARVFSVLREESESVLTLKGLTPTGMLPSGVLSGGKQTLQSATVEAIEADEAIKGFSPQHKITSFEEAKGLDRINERMPPRRDAMPSDANLNSINKALTSETNGTDSNGSNSSNIQ

SEQ ID NO: 22106 - protein, 459 aa, Artificial Sequence; identical to SEQ ID NO: 22105
  Synthetic polypeptide

SEQ ID NO: 22107 - protein, 407 aa, Artificial Sequence
  Synthetic polypeptide
LATLRILATYLKLAEPQFPRLHNGVCGDIHGQFFDLMKLFEVGGSPANTRYLFLGDYVDRGYFSIECVLYLWALKILYPKTLFLLRGNHECRHLTEYFTFKQECKIKYSERVYDACMDAFDCLPLAALMNQQFLCVHGGLSPEINTLDDIRKLDRFKEPPAYGPMCDILWSDPLEDFGNEKTQEHFTHNTVRGCSYFYSYPAVCEFLQHNNLLSILRAHEAQDAGYRMYRKSQTTGFPSLITIFSAPNYLDVYNNKVTEMLVNVLNICSDDELGSEEDGFDGATAAARKEVIRNKIRAIGKMARVFSVLREESESVLTLKGLTPTGMLPSGVLSGGKQTLQSAIKGFSPQHKITSFEEAKGLDRINERMPPRRDAMPSDANLNSINKALTSETNGTDSNGSNSSNIQ

SEQ ID NO: 22108 - protein, 449 aa, Artificial Sequence
  Synthetic polypeptide
LATLRILATYLKLAEPQFPRLHNGVCGDIHGQFFDLMKLFEVGGSPANTRYLFLGDYVDRGYFSIECVLYLWALKILYPKTLFLLRGNHECRHLTEYFTFKQECKIKYSERVYDACMDAFDCLPLAALMNQQFLCVHGGLSPEINTLDDIRKLDRFKEPPAYGPMCDILWSDPLEDFGNEKTQEHFTHNTVRGCSYFYSYPAVCEFLQHNNLLSILRAHEAQDAGYRMYRKSQTTGFPSLITIFSAPNYLDVYNNKAAVLKYENNVMNIRQFNCSPHPYWLPNFMDVFTWSLPFVGEKVTEMLVNVLNICSDDELGSEEDGFDGATAAARKEVIRNKIRAIGKMARVFSVLREESESVLTLKGLTPTGMLPSGVLSGGKQTLQSAIKGFSPQHKITSFEEAKGLDRINERMPPRRDAMPSDANLNSINKALTSETNGTDSNGSNSSNIQ

SEQ ID NO: 22109 - protein, 135 aa, Artificial Sequence
  Synthetic polypeptide
LATLRILATYLKLAEPQFPRLHNGVCGDIHGQFFDLMKLFEVGGSPANTRYLFLGDYVDRGYFSIECVLYLWALKILYPKTLFLLRGNHECRHLTEYFTFKQECKIKYSERVYDACMDAFDCLPLAALMNQQFLC

SEQ ID NO: 22110 - protein, 120 aa, Artificial Sequence
  Synthetic polypeptide
LATLRILATYLKLAEPQFPRLHNGVCGDIHGQFFDLMKLFEVGGSPANTRYLFLGDYVDRGYFSIECVLYLWALKILYPKTLFLLRGNHECRHLTEYFTFKQECKIKYSERVYDACMDAF

SEQ ID NO: 22111 - protein, 20 aa, Artificial Sequence
  Synthetic polypeptide
TQEAEVTFLITRGSLNQLIC

SEQ ID NO: 22112 - protein, 33 aa, Artificial Sequence
  Synthetic polypeptide
PGVVAHACNPSHATREAEEGESLEPRRQRLRSS

SEQ ID NO: 22113 - protein, 265 aa, Artificial Sequence
  Synthetic polypeptide
GQGFKISLTNMKKPHLYKKYKISQVWWRMPVIPATLLGRLRKENRLNPGGRGYVPHNQRKPESTHLLENQNTQEIPLAISSSSFTTSNHSVQNRDHRGGMQPCSPQRCQPPASCSPHENILPYKYTSWRPPFPKRSDRKDVQHNEWYIGEYSRQAVEEAFMKENKDGSFLVRDCSTKSKEEPYVLAVFYENKVYNVKIRFLERNQQFALGTGLRGDEKFDSVEDIIEHYKNFPIILIDGKDKTGVHRKQCHLTQPLPLTRHLLPL

SEQ ID NO: 22114 - protein, 225 aa, Artificial Sequence
  Synthetic polypeptide
TQEAEVTVLEAEKVPHNQRKPESTHLLENQNTQEIPLAISSSSFTTSNHSVQNRDHRGGMQPCSPQRCQPPASCSPHENILPYKYTSWRPPFPKRSDRKDVQHNEWYIGEYSRQAVEEAFMKENKDGSFLVRDCSTKSKEEPYVLAVFYENKVYNVKIRFLERNQQFALGTGLRGDEKFDSVEDIIEHYKNFPIILIDGKDKTGVHRKQCHLTQPLPLTRHLLPL

SEQ ID NO: 22115 - protein, 50 aa, Artificial Sequence
  Synthetic polypeptide
PGVVAHACNPSHATREAEEGESLEPRRQRLRSLKQKKFLITRGSLNQLIC

SEQ ID NO: 22116 - protein, 55 aa, Artificial Sequence
  Synthetic polypeptide
GQGFKISLTNMKKPHLYKKYKISQVWWRMPVIPATLLGRLRKENRLNPGGRGYGP

SEQ ID NO: 22117 - protein, 290 aa, Artificial Sequence
  Synthetic polypeptide
NFIPSVAVLRGDASVRKNKIPLPPPRPLITLPKKYQPLPPEPESSRPPLSQRHTFPEVQRMPSQISLRDLSEVLEAEKVPHNQRKPESTHLLENQNTQEIPLAISSSSFTTSNHSVQNRDHRGGMQPCSPQRCQPPASCSPHENILPYKYTSWRPPFPKRSDRKDVQHNEWYIGEYSRQAVEEAFMKENKDGSFLVRDCSTKSKEEPYVLAVFYENKVYNVKIRFLERNQQFALGTGLRGDEKFDSVEDIIEHYKNFPIILIDGKDKTGVHRKQCHLTQPLPLTRHLLPL

SEQ ID NO: 22118 - protein, 5 aa, Artificial Sequence
  Synthetic polypeptide
EEMHP

SEQ ID NO: 22119 - protein, 5 aa, Artificial Sequence
  Synthetic polypeptide
EEMHP

SEQ ID NO: 22120 - protein, 5 aa, Artificial Sequence
  Synthetic polypeptide
EEMHP

SEQ ID NO: 22121 - protein, 48 aa, Artificial Sequence
  Synthetic polypeptide
MSPPKLMLKLHPQCGSIERRCIRKKEQDSFTTSSASHNTSEEVPTLAP

SEQ ID NO: 22122 - protein, 48 aa, Artificial Sequence; identical to SEQ ID NO: 22121
  Synthetic polypeptide

SEQ ID NO: 22123 - protein, 48 aa, Artificial Sequence; identical to SEQ ID NO: 22121
  Synthetic polypeptide

SEQ ID NO: 22124 - protein, 73 aa, Artificial Sequence
  Synthetic polypeptide
NFIPSVAVLRGDASVRKNKIPLPPPRPLITLPKKYQPLPPEPESSRPPLSQRHTFPEVQRMPSQISLRDLSEP

SEQ ID NO: 22125 - protein, 73 aa, Artificial Sequence; identical to SEQ ID NO: 22124
  Synthetic polypeptide

SEQ ID NO: 22126 - protein, 34 aa, Artificial Sequence
  Synthetic polypeptide
EDLLNPRVQDQPGQHDSFLWRSYSCEDPWNFGSY

SEQ ID NO: 22127 - protein, 34 aa, Artificial Sequence; identical to SEQ ID NO: 22126
  Synthetic polypeptide

SEQ ID NO: 22128 - protein, 34 aa, Artificial Sequence; identical to SEQ ID NO: 22126
  Synthetic polypeptide

SEQ ID NO: 22129 - protein, 34 aa, Artificial Sequence; identical to SEQ ID NO: 22126
  Synthetic polypeptide

SEQ ID NO: 22130 - protein, 34 aa, Artificial Sequence; identical to SEQ ID NO: 22126
  Synthetic polypeptide

SEQ ID NO: 22131 - protein, 34 aa, Artificial Sequence; identical to SEQ ID NO: 22126
  Synthetic polypeptide

SEQ ID NO: 22132 - protein, 34 aa, Artificial Sequence; identical to SEQ ID NO: 22126
  Synthetic polypeptide

SEQ ID NO: 22133 - protein, 34 aa, Artificial Sequence; identical to SEQ ID NO: 22126
  Synthetic polypeptide

SEQ ID NO: 22134 - protein, 34 aa, Artificial Sequence; identical to SEQ ID NO: 22126
  Synthetic polypeptide

SEQ ID NO: 22135 - protein, 169 aa, Artificial Sequence
  Synthetic polypeptide
TQEFKTSLGNMILSCGEVIHVKILGILALIDEGETDWKLIAINANDPEASKFHDIDDVKKFKPGYLEATLNWFRLYKVPDGKPENQFAFNGEFKNKAFALEVIKSTHQCWKALLMKKCNGGAINCTNVQISDSPFRCTQEEARSLVESVSSSPNKESNEEEQVWHFLGK

SEQ ID NO: 22136 - protein, 169 aa, Artificial Sequence; identical to SEQ ID NO: 22135
  Synthetic polypeptide

SEQ ID NO: 22137 - protein, 169 aa, Artificial Sequence; identical to SEQ ID NO: 22135
  Synthetic polypeptide

SEQ ID NO: 22138 - protein, 169 aa, Artificial Sequence; identical to SEQ ID NO: 22135
  Synthetic polypeptide

SEQ ID NO: 22139 - protein, 169 aa, Artificial Sequence; identical to SEQ ID NO: 22135
  Synthetic polypeptide

SEQ ID NO: 22140 - protein, 99 aa, Artificial Sequence
  Synthetic polypeptide
TQEFKTSLGNMILSCGEVIHVKILGILALIDEGETDWKLIAINANDPEASKFHDIDDVKKFKPGYLEATLNWFRLYKVPDGKPENQFAFNGEFKNKAFA

SEQ ID NO: 22141 - protein, 82 aa, Artificial Sequence
  Synthetic polypeptide
TQEFKTSLGNMILSCGEVIHVKILGILALIDEGETDWKLIAINANDPEASKFHDIDDVKKFKPGYLEATLNWFRLYKVPDGK

SEQ ID NO: 22142 - protein, 116 aa, Artificial Sequence
  Synthetic polypeptide
TQEFKTSLGNMILSCGEVIHVKILGILALIDEGETDWKLIAINANDPEASKFHGLRNIPVYTINRIVILPSLDRSQTSSLSYLPAHQDSCVPLDAALHVVLYFCSLLGLQSYLSCF

SEQ ID NO: 22143 - protein, 35 aa, Artificial Sequence
  Synthetic polypeptide
TQEFKTSLGNMILSCGEVIHVKILGILALIDEGET

SEQ ID NO: 22144 - protein, 36 aa, Artificial Sequence
  Synthetic polypeptide
LTATSLPDSPASVCRVPGIAGFSAVSWQKWQIMMLF

SEQ ID NO: 22145 - protein, 44 aa, Artificial Sequence
  Synthetic polypeptide
CRAEAGLYCHHLDSLQPPCLILLPQSAEFLGLQDFLPSLGKNGK

SEQ ID NO: 22146 - protein, 333 aa, Artificial Sequence
  Synthetic polypeptide
FSCLSLPSSWDCRIFCRLLAKMANNDAVLKRLEQKGAEADQIIEYLKQQVSLLKEKAILQATLREEKKLRVENAKLKKEIEELKQELIQAEIQNGVKQIPFPSGTPLHANSMVSENVIQSTAVTTVSSGTKEQIKGGTGDEKKAKEKIEKKGEKKEKKQQSIAGSADSKPIDVSRLDLRIGCIITARKHPDADSLYVEEVDVGEIAPRTVVSGLVNHVPLEQMQNRMVILLCNLKPAKMRGVLSQAMVMCASSPEKIEILAPPNGSVPGDRITFDAFPGEPDKELNPKKKIWEQIQPDLHTNDECVATYKGVPFEVKGKGVCRAQTMSNSGIK

SEQ ID NO: 22147 - protein, 85 aa, Artificial Sequence
  Synthetic polypeptide
EVRSPSARQPPRLGSEERFRFPPGSGPVREVGGSPRPAGAPSGRWRAPLPGRPIWEVRSPSARPPPRLGGFSAVSWQKWQIMMLF

SEQ ID NO: 22148 - protein, 23 aa, Artificial Sequence
  Synthetic polypeptide
GAPLPGRHPVWEDFLPSLGKNGK

SEQ ID NO: 22149 - protein, 374 aa, Artificial Sequence
  Synthetic polypeptide
GAFPLSARQRPRPGGGGQPPPGRRPVWEVEGASARPPHLGSEEPLCPAATPSGRIFCRLLAKMANNDAVLKRLEQKGAEADQIIEYLKQQVSLLKEKAILQATLREEKKLRVENAKLKKEIEELKQELIQAEIQNGVKQIPFPSGTPLHANSMVSENVIQSTAVTTVSSGTKEQIKGGTGDEKKAKEKIEKKGEKKEKKQQSIAGSADSKPIDVSRLDLRIGCIITARKHPDADSLYVEEVDVGEIAPRTVVSGLVNHVPLEQMQNRMVILLCNLKPAKMRGVLSQAMVMCASSPEKIEILAPPNGSVPGDRITFDAFPGEPDKELNPKKKIWEQIQPDLHTNDECVATYKGVPFEVKGKGVCRAQTMSNSGIK

SEQ ID NO: 22150 - protein, 2 aa, Artificial Sequence
  Synthetic polypeptide
KV

SEQ ID NO: 22151 - protein, 2 aa, Artificial Sequence
  Synthetic polypeptide
KV

SEQ ID NO: 22152 - protein, 41 aa, Artificial Sequence
  Synthetic polypeptide
KYEIITTNSFQHNKKFSFNKTTRMPAATSLISPRQTGVDGS

SEQ ID NO: 22153 - protein, 41 aa, Artificial Sequence; identical to SEQ ID NO: 22152
  Synthetic polypeptide

SEQ ID NO: 22154 - protein, 44 aa, Artificial Sequence
  Synthetic polypeptide
SVTLWKEQSPGMRPPSLPGGKRSSFPTCKAKAATPGPLLEMEAC

SEQ ID NO: 22155 - protein, 32 aa, Artificial Sequence
  Synthetic polypeptide
GHPVSQVENEAHSQRAKPRQRPQDLFWRWKLV

SEQ ID NO: 22156 - protein, 44 aa, Artificial Sequence
  Synthetic polypeptide
RHVMERAEPRNEATQSPRWKTKLIPNVQSQGSDPRTSSGDGSLL

SEQ ID NO: 22157 - protein, 33 aa, Artificial Sequence
  Synthetic polypeptide
PGLVMYSCNPSSVLRWEDCWSPGVRGCVACPLP

SEQ ID NO: 22158 - protein, 33 aa, Artificial Sequence; identical to SEQ ID NO: 22157
  Synthetic polypeptide

SEQ ID NO: 22159 - protein, 33 aa, Artificial Sequence; identical to SEQ ID NO: 22157
  Synthetic polypeptide

SEQ ID NO: 22160 - protein, 33 aa, Artificial Sequence; identical to SEQ ID NO: 22157
  Synthetic polypeptide

SEQ ID NO: 22161 - protein, 86 aa, Artificial Sequence
  Synthetic polypeptide
CIPVILAQCCGGKIAGAQEFEAAWHALSREEQAKYYELARKERQLHMQLYPGWSARDNYGKKKKRKREKLQESASGTGPRMTAAYI

SEQ ID NO: 22162 - protein, 86 aa, Artificial Sequence; identical to SEQ ID NO: 22161
  Synthetic polypeptide

SEQ ID NO: 22163 - protein, 86 aa, Artificial Sequence; identical to SEQ ID NO: 22161
  Synthetic polypeptide

SEQ ID NO: 22164 - protein, 31 aa, Artificial Sequence
  Synthetic polypeptide
LSAAVGRLLEPRSSRLRGMPSPVKSRLNIMN

SEQ ID NO: 22165 - protein, 31 aa, Artificial Sequence; identical to SEQ ID NO: 22164
  Synthetic polypeptide

SEQ ID NO: 22166 - protein, 31 aa, Artificial Sequence; identical to SEQ ID NO: 22164
  Synthetic polypeptide

SEQ ID NO: 22167 - protein, 31 aa, Artificial Sequence; identical to SEQ ID NO: 22164
  Synthetic polypeptide

SEQ ID NO: 22168 - protein, 101 aa, Artificial Sequence
  Synthetic polypeptide
CIPVILAQCCGGKIAGAQEFEAAWHALSREEQAKYYELARKERQLHMQLYPGWSARDNYGKKKKRKREKLQESASGGKRSSFPTCKAKAATPGPLLEMEAC

SEQ ID NO: 22169 - protein, 27 aa, Artificial Sequence
  Synthetic polypeptide
GQEIETILANMTDADIQAFFMSIDSLC

SEQ ID NO: 22170 - protein, 27 aa, Artificial Sequence
  Synthetic polypeptide
GQEIETILANMTDADIQAFFMSIDSLC

SEQ ID NO: 22171 - protein, 17 aa, Artificial Sequence
  Synthetic polypeptide
HDRRRYPGILHEHRQSV

SEQ ID NO: 22172 - protein, 17 aa, Artificial Sequence
  Synthetic polypeptide
HDRRRYPGILHEHRQSV

SEQ ID NO: 22173 - protein, 17 aa, Artificial Sequence
  Synthetic polypeptide
HDRRRYPGILHEHRQSV

SEQ ID NO: 22174 - protein, 17 aa, Artificial Sequence
  Synthetic polypeptide
HDRRRYPGILHEHRQSV

SEQ ID NO: 22175 - protein, 17 aa, Artificial Sequence
  Synthetic polypeptide
HDRRRYPGILHEHRQSV

SEQ ID NO: 22176 - protein, 17 aa, Artificial Sequence
  Synthetic polypeptide
HDRRRYPGILHEHRQSV

SEQ ID NO: 22177 - protein, 186 aa, Artificial Sequence
  Synthetic polypeptide
GQEIETILANMTDADIQAFFMSIDSLCKKYSRETSQILEFQEKHRKRLLAFYREKISRLEESLRKSVLQIEQLQSMRSSQQTAFSTIKSSVSTKPHGCLLPPHSSAPDRLESMEVDLSPSPIRKSEIAAGPARISMISPPQDGRMAPCARRVCHFQRFTMFLHRRLSSLAAPPSVQFWKARGTHQL

SEQ ID NO: 22178 - protein, 251 aa, Artificial Sequence
  Synthetic polypeptide
GQEIETILANMTDADIQAFFMSIDSLCKKYSRETSQILEFQEKHRKRLLAFYREKISRLEESLRKSVLQIEQLQSMRSSQQTAFSTIKSSVSTKPHGCLLPPHSSAPDRLESMEVDLSPSPIRKSEIAAGPARISMISPPQDGRMGPHLTASFCFIPWLTLSKPPVPGECVISRGSPCFCIDVCPHWLLLLAFSSGRHGELTNSKTLPIYAEVQRAVLFPFQQAEGTLDTFRTPAVSVVFPLCQFERKKSF

SEQ ID NO: 22179 - protein, 77 aa, Artificial Sequence
  Synthetic polypeptide
GQEIETILANMTDADIQAFFMSIDSLCKKYSRETSQILEFQEKHRKRLLAFYREKISRLEESLRKSVLQIEQLQSLR

SEQ ID NO: 22180 - protein, 227 aa, Artificial Sequence
  Synthetic polypeptide
GQEIETILANMTDADIQAFFMSIDSLCKKYSRETSQYLRLSRGCCRLKLCPATSSKEVPRGSTHGSQAAARDPQEHWVSTTRAPRPGCRRSQSQPEAQGNTIQDAPHPLTLLHPSRTLIHTKSPWGQKLLEFIKHVCYHRHQSHRPCAPGWFCQVLQRPGAVSGEKTQQTRPAPPATCLLCLSCLSGFRHGPWRSQALPSDLVAPLFVSYTVEVSITNAGWSFPAAV

SEQ ID NO: 22181 - protein, 69 aa, Artificial Sequence
  Synthetic polypeptide
GQEIETILANMRPFPVSDSESPTARLYSCVRRAPWIPHRGTRVRLRRRTLWTRLLCTRVDFLHSLRPLP

SEQ ID NO: 22182 - protein, 42 aa, Artificial Sequence
  Synthetic polypeptide
SQHFGRLRQADHEVRRSRPSWLTCAPFLCLTASHQQHAFTAA

SEQ ID NO: 22183 - protein, 7 aa, Artificial Sequence
  Synthetic polypeptide
HAPLSCV

SEQ ID NO: 22184 - protein, 58 aa, Artificial Sequence
  Synthetic polypeptide
YQFKRTTRSSLLLPGIWICSRTRTLLKLRMCLQSFDISHITAMGRTWPGIGYNSTGTI

SEQ ID NO: 22185 - protein, 25 aa, Artificial Sequence
  Synthetic polypeptide
TNLKGRPEAVCFYQVFGFAQGHEPY

SEQ ID NO: 22186 - protein, 134 aa, Artificial Sequence
  Synthetic polypeptide
KDDQKQFAFTRYLDLLKDTNLIKTQDVFTVIRYISYNSYGKNMAWNWIQLNWDYLVNRYTLNNRNLGRIVTIAEPFNTELQLWQMESFFAKYPQAGAGEKPREQVLETVKNNIEWLKQHRNTIREWFFNLLESG

SEQ ID NO: 22187 - protein, 424 aa, Artificial Sequence
  Synthetic polypeptide
EETQESLLLLCPHQVKIQQEGIYSQTKKKALTRNRVTCIFILNFLVSRRIPCGWLMNKNEKHDDKLVMFTNQSEDSERCESMELDKKIQDLIERNASPHPKRFTPEAMPTHRNLCSLKTPGKTASMAHFVQGTSRMIAAESSTEHKECAEPSTRKNLMNSLEQKIRCLEKQRKELLEVNQQWDQQFRSMKELYERKVAELKTKLDAAERFLSTREKDPHQRQRKDDRQREDDRQRDLTRDRLQREEKEKERLNEELHELKEENKLLKGKNTLANKEKEHYECEIKRLNKALQDALNIKCSFSEDCLRKSRVEFCHEEMRTEMEVLKQQVQIYEEDFKKERSDRERLNQEKEELQQINETSQSQLNRLNSQIKACQMEKEKLEKQLKQMYCPPCNCGLVFHLQDPWVPTGPGAVQKQREHPVYPQ

SEQ ID NO: 22188 - protein, 13 aa, Artificial Sequence
  Synthetic polypeptide
TSWSPEEFHVDGS

SEQ ID NO: 22189 - protein, 71 aa, Artificial Sequence
  Synthetic polypeptide
GWSSCDGISTLIRRDTREFASSLSPPGEDTARRHLLANQEEGPHQEPSYLHLHLELPGLQKNSMWMAHEQK

SEQ ID NO: 22190 - protein, 45 aa, Artificial Sequence
  Synthetic polypeptide
PPSLHLSLVLYASCPQTLDSKFFSFGTRTGFLLLLRLCFDAAWKN

SEQ ID NO: 22191 - protein, 163 aa, Artificial Sequence
  Synthetic polypeptide
SRKKNVKRFDWLSLPAYIFLSCFMLPALKHWTPSSSALELELASFCSSDYALMRPGRIDRIIYVPLPDAATRREIFKLQFHSMPVSNEVDLDELILQTDAYSGAEIVAVCREAALLALEEDIQANLIMKRHFTQALSTVTPRIPESLRRFYEDYQEKSGLHTL

SEQ ID NO: 22192 - protein, 45 aa, Artificial Sequence
  Synthetic polypeptide
KGLTGLASQPTSFSRALCFLPSNTGLQVLQLWNSNWLPFAPQIML

SEQ ID NO: 22193 - protein, 236 aa, Artificial Sequence
  Synthetic polypeptide
PCPVRLLRVAVPEYAGVCSHLLEYAGVGAHSASLSSELLTFRDVAIEFSPEEWKCLDPDQQNLYRDVMLENYRNLVSLGVAISNPDLVTCLEQRKEPYNVKIHKIVARPPAMCSHFTQDHWPVQGIEDSFHKLILRRYEKCGHDNLQLRKGCKSLNECKLQKGGYNEFNECLSTTQSKILQCKASVKVVSKFSNSNKRKTRHTGEKHFKECGKSFQKFSHLTQHKNSSISMTTSPF

SEQ ID NO: 22194 - protein, 16 aa, Artificial Sequence
  Synthetic polypeptide
NTLVSVRTALLLVLNS

SEQ ID NO: 22195 - protein, 16 aa, Artificial Sequence
  Synthetic polypeptide
NTLVSVRTALLLVLNS

SEQ ID NO: 22196 - protein, 16 aa, Artificial Sequence
  Synthetic polypeptide
NTLVSVRTALLLVLNS

SEQ ID NO: 22197 - protein, 148 aa, Artificial Sequence
  Synthetic polypeptide
PCPVRLLRVAVPEYAGVCSHLLEYAGVGAHSASLSSELLTFRDVAIEFSPEEWKCLDPDQQNLYRDVMLENYRNLVSLGVAISNPDLVTCLEQRKEPYNVKIHKIVARPPEFFHLYDNKPILAFWRIASEKSQSASVYRQLTHRSRAT

SEQ ID NO: 22198 - protein, 509 aa, Artificial Sequence
  Synthetic polypeptide
PCPVRLLRVAVPEYAGVCSHLLEYAGVGAHSASLSSELLTFRDVAIEFSPEEWKCLDPDQQNLYRDVMLENYRNLVSLGVAISNPDLVTCLEQRKEPYNVKIHKIVARPPAMCSHFTQDHWPVQGIEDSFHKLILRRYEKCGHDNLQLRKGCKSLNECKLQKGGYNEFNECLSTTQSKILQCKASVKVVSKFSNSNKRKTRHTGEKHFKECGKSFQKFSHLTQHKVIHAGEKPYTCEECGKAFKWSLIFNEHKRIHTGEKPFTCEECGSIFTTSSHFAKHKIIHTGEKPYKCEECGKAFNRFTTLTKHKRIHAGEKPITCEECRKIFTSSSNFAKHKRIHTGEKPYKCEECGKAFNRSTTLTKHKRIHTGEKPYTCEECGKAFRQSSKLNEHKKVHTGERPYKCDECGKAFGRSRVLNEHKKIHTGEKPYKCEECGKAFRRSTDRSQHKKIHSADKPYKCKECDKAFKQFSLLSQHKKIHTVDKPYKCKDCDKAFKRFSHLNKHKKIHT

SEQ ID NO: 22199 - protein, 61 aa, Artificial Sequence
  Synthetic polypeptide
LASGPGRASVRSKFYVREPPNAKPDWLKVGFTLGTTVFLWIYLIKQHNEDILEYKRRNGLE

SEQ ID NO: 22200 - protein, 61 aa, Artificial Sequence; identical to SEQ ID NO: 22199
  Synthetic polypeptide

SEQ ID NO: 22201 - protein, 61 aa, Artificial Sequence; identical to SEQ ID NO: 22199
  Synthetic polypeptide

SEQ ID NO: 22202 - protein, 61 aa, Artificial Sequence; identical to SEQ ID NO: 22199
  Synthetic polypeptide

SEQ ID NO: 22203 - protein, 61 aa, Artificial Sequence; identical to SEQ ID NO: 22199
  Synthetic polypeptide

SEQ ID NO: 22204 - protein, 61 aa, Artificial Sequence; identical to SEQ ID NO: 22199
  Synthetic polypeptide

SEQ ID NO: 22205 - protein, 61 aa, Artificial Sequence; identical to SEQ ID NO: 22199
  Synthetic polypeptide

SEQ ID NO: 22206 - protein, 61 aa, Artificial Sequence; identical to SEQ ID NO: 22199
  Synthetic polypeptide

SEQ ID NO: 22207 - protein, 41 aa, Artificial Sequence
  Synthetic polypeptide
RGFESLGQDRCVLSNSPVALGELQCDQSSTCESRRMPNLTG

SEQ ID NO: 22208 - protein, 41 aa, Artificial Sequence; identical to SEQ ID NO: 22207
  Synthetic polypeptide

SEQ ID NO: 22209 - protein, 41 aa, Artificial Sequence; identical to SEQ ID NO: 22207
  Synthetic polypeptide

SEQ ID NO: 22210 - protein, 41 aa, Artificial Sequence; identical to SEQ ID NO: 22207
  Synthetic polypeptide

SEQ ID NO: 22211 - protein, 41 aa, Artificial Sequence; identical to SEQ ID NO: 22207
  Synthetic polypeptide

SEQ ID NO: 22212 - protein, 41 aa, Artificial Sequence; identical to SEQ ID NO: 22207
  Synthetic polypeptide

SEQ ID NO: 22213 - protein, 41 aa, Artificial Sequence; identical to SEQ ID NO: 22207
  Synthetic polypeptide

SEQ ID NO: 22214 - protein, 41 aa, Artificial Sequence; identical to SEQ ID NO: 22207
  Synthetic polypeptide

SEQ ID NO: 22215 - protein, 38 aa, Artificial Sequence
  Synthetic polypeptide
EALKASDRTGASCLTRQWPWASFSAIKVLRARAAECQT

SEQ ID NO: 22216 - protein, 38 aa, Artificial Sequence; identical to SEQ ID NO: 22215
  Synthetic polypeptide

SEQ ID NO: 22217 - protein, 38 aa, Artificial Sequence; identical to SEQ ID NO: 22215
  Synthetic polypeptide

SEQ ID NO: 22218 - protein, 38 aa, Artificial Sequence; identical to SEQ ID NO: 22215
  Synthetic polypeptide

SEQ ID NO: 22219 - protein, 38 aa, Artificial Sequence; identical to SEQ ID NO: 22215
  Synthetic polypeptide

SEQ ID NO: 22220 - protein, 38 aa, Artificial Sequence; identical to SEQ ID NO: 22215
  Synthetic polypeptide

SEQ ID NO: 22221 - protein, 38 aa, Artificial Sequence; identical to SEQ ID NO: 22215
  Synthetic polypeptide

SEQ ID NO: 22222 - protein, 38 aa, Artificial Sequence; identical to SEQ ID NO: 22215
  Synthetic polypeptide

SEQ ID NO: 22223 - protein, 22 aa, Artificial Sequence
  Synthetic polypeptide
PSSCRKTSSGLSLIPHCEKDAA

SEQ ID NO: 22224 - protein, 22 aa, Artificial Sequence
  Synthetic polypeptide
PSSCRKTSSGLSLIPHCEKDAA

SEQ ID NO: 22225 - protein, 22 aa, Artificial Sequence
  Synthetic polypeptide
PSSCRKTSSGLSLIPHCEKDAA

SEQ ID NO: 22226 - protein, 22 aa, Artificial Sequence
  Synthetic polypeptide
PSSCRKTSSGLSLIPHCEKDAA

SEQ ID NO: 22227 - protein, 45 aa, Artificial Sequence
  Synthetic polypeptide
FHIVRRMPHRECTEEYQMQKVCFQHATADGFPQVLQTSRGDLWKS

SEQ ID NO: 22228 - protein, 45 aa, Artificial Sequence; identical to SEQ ID NO: 22227
  Synthetic polypeptide

SEQ ID NO: 22229 - protein, 45 aa, Artificial Sequence; identical to SEQ ID NO: 22227
  Synthetic polypeptide

SEQ ID NO: 22230 - protein, 45 aa, Artificial Sequence; identical to SEQ ID NO: 22227
  Synthetic polypeptide

SEQ ID NO: 22231 - protein, 137 aa, Artificial Sequence
  Synthetic polypeptide
GQAQWLMPVIPARMSLTNSSACHLLCWAGTQETTDIKGLFPDITRPFKKSFDVKHGVAHQIWDFGDCFPTPPNYGKYCVRPKKPAQEALINYSRRGKGVLKHLHGRCDSESKVCSSEDSEADRYSDYGWGGPSSPFN

SEQ ID NO: 22232 - protein, 137 aa, Artificial Sequence; identical to SEQ ID NO: 22231
  Synthetic polypeptide

SEQ ID NO: 22233 - protein, 6 aa, Artificial Sequence
  Synthetic polypeptide
SQQGCH

SEQ ID NO: 22234 - protein, 6 aa, Artificial Sequence
  Synthetic polypeptide
SQQGCH

SEQ ID NO: 22235 - protein, 40 aa, Artificial Sequence
  Synthetic polypeptide
PGAVAHACNPSKDVIDKQFCLSSSLLGWYPRDYRYQRTIP

SEQ ID NO: 22236 - protein, 40 aa, Artificial Sequence; identical to SEQ ID NO: 22235
  Synthetic polypeptide

SEQ ID NO: 22237 - protein, 148 aa, Artificial Sequence
  Synthetic polypeptide
FGAVTWIRDLPWEINPLSSCSLLCEKDPPTTSGPQTDQPKKHLTNFKSGLFPDITRPFKKSFDVKHGVAHQIWDFGDCFPTPPNYGKYCVRPKKPAQEALINYSRRGKGVLKHLHGRCDSESKVCSSEDSEADRYSDYGWGGPSSPFN

SEQ ID NO: 22238 - protein, 148 aa, Artificial Sequence; identical to SEQ ID NO: 22237
  Synthetic polypeptide

SEQ ID NO: 22239 - protein, 49 aa, Artificial Sequence
  Synthetic polypeptide
LGSGTSLGRSIPCPPALCSVRKIHLRPQVLRPTSPRNISPISNPDYSLI

SEQ ID NO: 22240 - protein, 49 aa, Artificial Sequence; identical to SEQ ID NO: 22239
  Synthetic polypeptide

SEQ ID NO: 22241 - protein, 27 aa, Artificial Sequence
  Synthetic polypeptide
ERSTYDLRSSDRPAQETSHQFQIRTIP

SEQ ID NO: 22242 - protein, 27 aa, Artificial Sequence
  Synthetic polypeptide
ERSTYDLRSSDRPAQETSHQFQIRTIP

SEQ ID NO: 22243 - protein, 30 aa, Artificial Sequence
  Synthetic polypeptide
RLMLPDRLRSPLDHHGCRASGNSHSGRTIP

SEQ ID NO: 22244 - protein, 30 aa, Artificial Sequence; identical to SEQ ID NO: 22243
  Synthetic polypeptide

SEQ ID NO: 22245 - protein, 114 aa, Artificial Sequence
  Synthetic polypeptide
TITDAELRVTLTVEGLFPDITRPFKKSFDVKHGVAHQIWDFGDCFPTPPNYGKYCVRPKKPAQEALINYSRRGKGVLKHLHGRCDSESKVCSSEDSEADRYSDYGWGGPSSPFN

SEQ ID NO: 22246 - protein, 114 aa, Artificial Sequence; identical to SEQ ID NO: 22245
  Synthetic polypeptide

SEQ ID NO: 22247 - protein, 10 aa, Artificial Sequence
  Synthetic polypeptide
LSQWKDYSLI

SEQ ID NO: 22248 - protein, 10 aa, Artificial Sequence
  Synthetic polypeptide
LSQWKDYSLI

SEQ ID NO: 22249 - protein, 114 aa, Artificial Sequence
  Synthetic polypeptide
LQENKLGPALILNYGLFPDITRPFKKSFDVKHGVAHQIWDFGDCFPTPPNYGKYCVRPKKPAQEALINYSRRGKGVLKHLHGRCDSESKVCSSEDSEADRYSDYGWGGPSSPFN

SEQ ID NO: 22250 - protein, 114 aa, Artificial Sequence; identical to SEQ ID NO: 22249
  Synthetic polypeptide

SEQ ID NO: 22251 - protein, 7 aa, Artificial Sequence
  Synthetic polypeptide
ITDYSLI

SEQ ID NO: 22252 - protein, 7 aa, Artificial Sequence
  Synthetic polypeptide
ITDYSLI

SEQ ID NO: 22253 - protein, 21 aa, Artificial Sequence
  Synthetic polypeptide
DHLITGKQARARTDSKLRTIP

SEQ ID NO: 22254 - protein, 21 aa, Artificial Sequence
  Synthetic polypeptide
DHLITGKQARARTDSKLRTIP

SEQ ID NO: 22255 - protein, 19 aa, Artificial Sequence
  Synthetic polypeptide
MTLSPLFNIQSRQNCWASL

SEQ ID NO: 22256 - protein, 19 aa, Artificial Sequence
  Synthetic polypeptide
MTLSPLFNIQSRQNCWASL

SEQ ID NO: 22257 - protein, 19 aa, Artificial Sequence
  Synthetic polypeptide
MTLSPLFNIQSRQNCWASL

SEQ ID NO: 22258 - protein, 19 aa, Artificial Sequence
  Synthetic polypeptide
MTLSPLFNIQSRQNCWASL

SEQ ID NO: 22259 - protein, 64 aa, Artificial Sequence
  Synthetic polypeptide
PCLLCSIYSRGKTAGHRYNTPAPAAFSWFIFFCAFHIYFFSAFYDCCGSSHHWTDCPKIHQGLA

SEQ ID NO: 22260 - protein, 64 aa, Artificial Sequence; identical to SEQ ID NO: 22259
  Synthetic polypeptide

SEQ ID NO: 22261 - protein, 64 aa, Artificial Sequence; identical to SEQ ID NO: 22259
  Synthetic polypeptide

SEQ ID NO: 22262 - protein, 64 aa, Artificial Sequence; identical to SEQ ID NO: 22259
  Synthetic polypeptide

SEQ ID NO: 22263 - protein, 224 aa, Artificial Sequence
  Synthetic polypeptide
KRDTAVKWTHQVINDLVSFVQYTVAAKLLGIVITPLLLLLFLGSSSSVPFTSIFSQLFMTVVVPLIIGQIVRRYIKDWLERKKPPFGAISSSVLLMIIYTTFCDTFSNPNIDLDKFSLVLILFIIFSIQLSFMLLTFIFSTRNNSGFTPADTVAIIFCSTHKSLTLGIPMLKIVFAGHEHLSLISVPLLIYHPAQILLGSVLVPTIKSWMVSRQKGVKLTRPTV

SEQ ID NO: 22264 - protein, 224 aa, Artificial Sequence; identical to SEQ ID NO: 22263
  Synthetic polypeptide

SEQ ID NO: 22265 - protein, 242 aa, Artificial Sequence
  Synthetic polypeptide
KRDTAVKWTHQVINDLVSFVQYTVAAKLLGIVITPLLLLLFLGSSSSVPFTSIFSQLFMTVVVPLIIGQIVRRYIKDWLERKKPPFGAISSSVLLMIIYTTFCDTFSNPNIDLDKFSLVLILFIIFSIQLSFMLLTFIFSTRNNSGFTPADTVAIIFCSTHKSLTLGIPMLKIVFAGHEHLSLISVPLLIYHPAQILLGSVLVPTIKSWMVSRQKKLLQTRGPLANLNNPEGLEYLSIKFGH

SEQ ID NO: 22266 - protein, 242 aa, Artificial Sequence; identical to SEQ ID NO: 22265
  Synthetic polypeptide

SEQ ID NO: 22267 - protein, 19 aa, Artificial Sequence
  Synthetic polypeptide
TQHFGRPSRFLLMADLLPM

SEQ ID NO: 22268 - protein, 19 aa, Artificial Sequence
  Synthetic polypeptide
TQHFGRPSRFLLMADLLPM

SEQ ID NO: 22269 - protein, 32 aa, Artificial Sequence
  Synthetic polypeptide
PGTMAHTCKLSTLGGQADFCSWQIFFQCKRWT

SEQ ID NO: 22270 - protein, 32 aa, Artificial Sequence; identical to SEQ ID NO: 22269
  Synthetic polypeptide

SEQ ID NO: 22271 - protein, 430 aa, Artificial Sequence
  Synthetic polypeptide
RARWLTPVNSALWEAKQISAHGRSSSNVNGGPELDRCISPEGVNGNRCSESSTLLEKYKIGKVIGDGNFAVVKECIDRSTGKEFALKIIDKAKCCGKEHLIENEVSILRRVKHPNIIMLVEEMETATELFLVMELVKGGDLFDAITSSTKYTERDGSAMVYNLANALRYLHGLSIVHRDIKPENLLVCEYPDGTKSLKLGDFGLATVVEGPLYTVCGTPTYVAPEIIAETGYGLKVDIWAAGVITYILLCGFPPFRSENNLQEDLFDQILAGKLEFPAPYWDNITDSAKELISQMLQVNVEARCTAGQILSHPWVSDDASQENNMQAEVTGKLKQHFNNALPKQNSTTTGVSVIMNTALDKEGQIFCSKHCQDSGRPGMEPISPVPPSVEEIPVPGEAVPAPTPPESPTPHPPPAAPGGERAGTWRRHRD

SEQ ID NO: 22272 - protein, 430 aa, Artificial Sequence; identical to SEQ ID NO: 22271
  Synthetic polypeptide

SEQ ID NO: 22273 - protein, 18 aa, Artificial Sequence
  Synthetic polypeptide
TQHFGRPRFLLMADLLPM

SEQ ID NO: 22274 - protein, 18 aa, Artificial Sequence
  Synthetic polypeptide
TQHFGRPRFLLMADLLPM

SEQ ID NO: 22275 - protein, 18 aa, Artificial Sequence
  Synthetic polypeptide
TQHFGRPRFLLMADLLPM

SEQ ID NO: 22276 - protein, 18 aa, Artificial Sequence
  Synthetic polypeptide
TQHFGRPRFLLMADLLPM

SEQ ID NO: 22277 - protein, 31 aa, Artificial Sequence
  Synthetic polypeptide
PGTMAHTCKLSTLGGQDFCSWQIFFQCKRWT

SEQ ID NO: 22278 - protein, 31 aa, Artificial Sequence; identical to SEQ ID NO: 22277
  Synthetic polypeptide

SEQ ID NO: 22279 - protein, 31 aa, Artificial Sequence; identical to SEQ ID NO: 22277
  Synthetic polypeptide

SEQ ID NO: 22280 - protein, 31 aa, Artificial Sequence; identical to SEQ ID NO: 22277
  Synthetic polypeptide

SEQ ID NO: 22281 - protein, 429 aa, Artificial Sequence
  Synthetic polypeptide
RARWLTPVNSALWEAKISAHGRSSSNVNGGPELDRCISPEGVNGNRCSESSTLLEKYKIGKVIGDGNFAVVKECIDRSTGKEFALKIIDKAKCCGKEHLIENEVSILRRVKHPNIIMLVEEMETATELFLVMELVKGGDLFDAITSSTKYTERDGSAMVYNLANALRYLHGLSIVHRDIKPENLLVCEYPDGTKSLKLGDFGLATVVEGPLYTVCGTPTYVAPEIIAETGYGLKVDIWAAGVITYILLCGFPPFRSENNLQEDLFDQILAGKLEFPAPYWDNITDSAKELISQMLQVNVEARCTAGQILSHPWVSDDASQENNMQAEVTGKLKQHFNNALPKQNSTTTGVSVIMNTALDKEGQIFCSKHCQDSGRPGMEPISPVPPSVEEIPVPGEAVPAPTPPESPTPHPPPAAPGGERAGTWRRHRD

SEQ ID NO: 22282 - protein, 429 aa, Artificial Sequence; identical to SEQ ID NO: 22281
  Synthetic polypeptide

SEQ ID NO: 22283 - protein, 429 aa, Artificial Sequence; identical to SEQ ID NO: 22281
  Synthetic polypeptide

SEQ ID NO: 22284 - protein, 359 aa, Artificial Sequence
  Synthetic polypeptide
RARWLTPVNSALWEAKISAHGRSSSNVNGGPELDRCISPEGVNGNRCSESSTLLEKYKIGKVIGDGNFAVVKECIDRSTGKEFALKIIDKAKCCGKEHLIENEVSILRRVKHPNIIMLVEEMETATELFLVMELVKGGDLFDAITSSTKYTERDGSAMVYNLANALRYLHGLSIVHRDIKPENLLVCEYPDGTKSLKLGDFGLATVVEGPLYTVCGTPTYVAPEIIAETGYGLKVDIWAAGVITYILLCGFPPFRSENNLQEDLFDQILAGKLEFPAPYWDNITDSAKELISQMLQVNVEARCTAGQILSHPWVSDDASQENNMQAEVTGKLKQHFNNALPKQNSTTTGVSVIMFDLTV

SEQ ID NO: 22285 - protein, 42 aa, Artificial Sequence
  Synthetic polypeptide
FYKCLEIPPSLFSFLPTCEEGASFPFDHDFTVCPVFCRQTRR

SEQ ID NO: 22286 - protein, 42 aa, Artificial Sequence; identical to SEQ ID NO: 22285
  Synthetic polypeptide

SEQ ID NO: 22287 - protein, 42 aa, Artificial Sequence; identical to SEQ ID NO: 22285
  Synthetic polypeptide

SEQ ID NO: 22288 - protein, 42 aa, Artificial Sequence; identical to SEQ ID NO: 22285
  Synthetic polypeptide

SEQ ID NO: 22289 - protein, 42 aa, Artificial Sequence; identical to SEQ ID NO: 22285
  Synthetic polypeptide

SEQ ID NO: 22290 - protein, 970 aa, Artificial Sequence
  Synthetic polypeptide
VLMRSDDFISVWKFLLHSSLSCQLVKKVPVSPSTMISLCAQYSADKREDEKMCDHLIRAAKYRDHVTATQLIQKIINILTDKHGAWGNSAVSRPLEFWRLDYWEDDLRRRRRFVRNPLGSTHPEATLKTAVEHATDEDILAKGKQSIRSQALGNQNSENEILLEGDDDTLSSVDEKDLENLAGPVSLSTPAQLVAPSVVVKGTLSVTSSELYFEVDEEDPNFKKIDPKILAYTEGLHGKWLFTEIRSIFSRRYLLQNTALEIFMANRVAVMFNFPDPATVKKVVNYLPRVGVGTSFGLPQTRRISLASPRQLFKASNMTQRWQHREISNFEYLMFLNTIAGRSYNDLNQYPVFPWVITNYESEELDLTLPTNFRDLSKPIGALNPKRAAFFAERYESWEDDQVPKFHYGTHYSTASFVLAWLLRIEPFTTYFLNLQGGKFDHADRTFSSISRAWRNSQRDTSDIKELIPEFYYLPEMFVNFNNYNLGVMDDGTVVSDVELPPWAKTSEEFVHINRLALESEFVSCQLHQWIDLIFGYKQQGPEAVRALNVFYYLTYEGAVNLNSITDPVLREAVEAQIRSFGQTPSQLLIEPHPPRGSAMQVSPLMFTDKAQQDVIMVLKFPSNSPVTHVAANTQPGLATPAVITVTANRLFAVNKWHNLPAHQGAVQDQPYQLPVEIDPLIASNTGMHRRQITDLLDQSIQVHSQCFVITSDNRYILVCGFWDKSFRVYSTDTGRLIQVVFGHWDVVTCLARSESYIGGNCYILSGSRDATLLLWYWNGKCSGIGDNPGSETAAPRAILTGHDYEVTCAAVCAELGLVLSGSQEGPCLIHSMNGDLLRTLEGPENCLKPKLIQASREGHCVIFYENGLFCTFSVNGKLQATMETDDNIRAIQLSRDGQYLLTGGDRGVVVVRQVSDLKQLFAYPGCDAGIRAMALSYDQRCIISGMASGSIVLFYNDFNRWHHEYQTRY

SEQ ID NO: 22291 - protein, 970 aa, Artificial Sequence; identical to SEQ ID NO: 22290
  Synthetic polypeptide

SEQ ID NO: 22292 - protein, 969 aa, Artificial Sequence
  Synthetic polypeptide
VLMRSDDFISVWKFLLHSSLSCQLVKKVPVSPSTMISLCAQYSADKREDEKMCDHLIRAAKYRDHVTATQLIQKIINILTDKHGAWGNSAVSRPLEFWRLDYWEDDLRRRRRFVRNPLGSTHPEATLKTAVEHATDEDILAKGKQSIRSQALGNQNSENEILLEGDDDTLSSVDEKDLENLAGPVSLSTPAQLVAPSVVVKGTLSVTSSELYFEVDEEDPNFKKIDPKILAYTEGLHGKWLFTEIRSIFSRRYLLQNTALEIFMANRVAVMFNFPDPATVKKVVNYLPRVGVGTSFGLPQTRRISLASPRQLFKASNMTQRWQHREISNFEYLMFLNTIAGRSYNDLNQYPVFPWVITNYESEELDLTLPTNFRDLSKPIGALNPKRAAFFAERYESWEDDQVPKFHYGTHYSTASFVLAWLLRIEPFTTYFLNLQGGKFDHADRTFSSISRAWRNSQRDTSDIKELIPEFYYLPEMFVNFNNYNLGVMDDGTVVSDVELPPWAKTSEEFVHINRLALESEFVSCQLHQWIDLIFGYKQQGPEAVRALNVFYYLTYEGAVNLNSITDPVLREAVEAQIRSFGQTPSQLLIEPHPPRGSAMQVSPLMFTDKAQQDVIMVLKFPSNSPVTHVAANTQPGLATPAVITVTANRLFAVNKWHNLPAHQGAVQDQPYQLPVEIDPLIASNTGMHRRQITDLLDQSIQVHSQCFVITSDNRYILVCGFWDKSFRVYSTDTGRLIQVVFGHWDVVTCLARSESYIGGNCYILSGSRDATLLLWYWNGKCSGIGDNPGETAAPRAILTGHDYEVTCAAVCAELGLVLSGSQEGPCLIHSMNGDLLRTLEGPENCLKPKLIQASREGHCVIFYENGLFCTFSVNGKLQATMETDDNIRAIQLSRDGQYLLTGGDRGVVVVRQVSDLKQLFAYPGCDAGIRAMALSYDQRCIISGMASGSIVLFYNDFNRWHHEYQTRY

SEQ ID NO: 22293 - protein, 981 aa, Artificial Sequence
  Synthetic polypeptide
VLMRSDDFISVWKFLLHSSLSCQLVKKVPVSPSTMISLCAQYSADKREDEKMCDHLIRAAKYRDHVTATQLIQKIINILTDKHGAWGNSAVSRPLEFWRLDYWEDDLRRRRRFVRNPLGSTHPEATLKTAVEHVCIFKLRENSKATDEDILAKGKQSIRSQALGNQNSENEILLEGDDDTLSSVDEKDLENLAGPVSLSTPAQLVAPSVVVKGTLSVTSSELYFEVDEEDPNFKKIDPKILAYTEGLHGKWLFTEIRSIFSRRYLLQNTALEIFMANRVAVMFNFPDPATVKKVVNYLPRVGVGTSFGLPQTRRISLASPRQLFKASNMTQRWQHREISNFEYLMFLNTIAGRSYNDLNQYPVFPWVITNYESEELDLTLPTNFRDLSKPIGALNPKRAAFFAERYESWEDDQVPKFHYGTHYSTASFVLAWLLRIEPFTTYFLNLQGGKFDHADRTFSSISRAWRNSQRDTSDIKELIPEFYYLPEMFVNFNNYNLGVMDDGTVVSDVELPPWAKTSEEFVHINRLALESEFVSCQLHQWIDLIFGYKQQGPEAVRALNVFYYLTYEGAVNLNSITDPVLREAVEAQIRSFGQTPSQLLIEPHPPRGSAMQVSPLMFTDKAQQDVIMVLKFPSNSPVTHVAANTQPGLATPAVITVTANRLFAVNKWHNLPAHQGAVQDQPYQLPVEIDPLIASNTGMHRRQITDLLDQSIQVHSQCFVITSDNRYILVCGFWDKSFRVYSTDTGRLIQVVFGHWDVVTCLARSESYIGGNCYILSGSRDATLLLWYWNGKCSGIGDNPGSETAAPRAILTGHDYEVTCAAVCAELGLVLSGSQEGPCLIHSMNGDLLRTLEGPENCLKPKLIQASREGHCVIFYENGLFCTFSVNGKLQATMETDDNIRAIQLSRDGQYLLTGGDRGVVVVRQVSDLKQLFAYPGCDAGIRAMALSYDQRCIISGMASGSIVLFYNDFNRWHHEYQTRY

SEQ ID NO: 22294 - protein, 693 aa, Artificial Sequence
  Synthetic polypeptide
VLMRSDDFISVWKFLLHSSLSCQLVKKVPVSPSTMISLCAQYSADKREDEKMCDHLIRAAKYRDHVTATQLIQKIINILTDKHGAWGNSAVSRPLEFWRLDYWEDDLRRRRRFVRNPLGSTHPEATLKTAVEHATDEDILAKGKQSIRSQALGNQNSENEILLEGDDDTLSSVDEKDLENLAGPVSLSTPAQLVAPSVVVKGTLSVTSSELYFEVDEEDPNFKKIDPKILAYTEGLHGKWLFTEIRSIFSRRYLLQNTALEIFMANRVAVMFNFPDPATVKKVVNYLPRVGVGTSFGLPQTRRISLASPRQLFKASNMTQRWQHREISNFEYLMFLNTIAGRSYNDLNQYPVFPWVITNYESEELDLTLPTNFRDLSKPIGALNPKRAAFFAERYESWEDDQVPKFHYGTHYSTASFVLAWLLRIEPFTTYFLNLQGGKFDHADRTFSSISRAWRNSQRDTSDIKELIPEFYYLPEMFVNFNNYNLGVMDDGTVVSDVELPPWAKTSEEFVHINRLALESEFVSCQLHQWIDLIFGYKQQGPEAVRALNVFYYLTYEGAVNLNSITDPVLREAVEAQIRSFGQTPSQLLIEPHPPRGSAMQVSPLMFTDKAQQDVIMVLKFPSNSPVTHVAANTQPGLATPAVITVTANRLFAVNKWHNLPAHQGAVQDQPYQLPVEIDPLIGLSLPSLFAIH

SEQ ID NO: 22295 - protein, 422 aa, Artificial Sequence
  Synthetic polypeptide
EQEDPYRKKKLQEKREGNLQNLNWSKSRTCRKNKKRGVAPVSRPPEQSDLKLVCSDFERSELSSDINVRSWCIQESTREVCKADAEIASSLPAAQREAEGYYQKPEKKCVDKFCSDSSSDCGSSSGSVRASRGSWGSWSSTSSSDGDKKPMVDAQHFLPAGDSVSQNDFPSEAPISLNLSHNICNPMTVNSLPQYAEPSCPSLPAGPTGVEEDKGLYSPGDLWPTPPVCVTSSLNCTLENGVPCVIQESAPVHNSFIDWSATCEGQFSSAYCPLELNDYNAFPEENMNYANGFPCPADVQTDFIDHNSQSTWNTPPNMPAAWGHASFISSPPYLTSTRSLSPMSGLFGSIWAPQSDVYENCCPINPTTEHSTHMENQAVVCKEYYPGFNPFRAYMNLDIWTTTANRNANFPLSRDSSYCGNV

SEQ ID NO: 22296 - protein, 422 aa, Artificial Sequence; identical to SEQ ID NO: 22295
  Synthetic polypeptide

SEQ ID NO: 22297 - protein, 422 aa, Artificial Sequence; identical to SEQ ID NO: 22295
  Synthetic polypeptide

SEQ ID NO: 22298 - protein, 422 aa, Artificial Sequence; identical to SEQ ID NO: 22295
  Synthetic polypeptide

SEQ ID NO: 22299 - protein, 32 aa, Artificial Sequence
  Synthetic polypeptide
YNLQKPGGGIESKKILIGRKSFRRKEKEIYKI

SEQ ID NO: 22300 - protein, 32 aa, Artificial Sequence; identical to SEQ ID NO: 22299
  Synthetic polypeptide

SEQ ID NO: 22301 - protein, 32 aa, Artificial Sequence; identical to SEQ ID NO: 22299
  Synthetic polypeptide

SEQ ID NO: 22302 - protein, 32 aa, Artificial Sequence; identical to SEQ ID NO: 22299
  Synthetic polypeptide

SEQ ID NO: 22303 - protein, 22 aa, Artificial Sequence
  Synthetic polypeptide
PSKNSNIICKNQEVGLRARRSL

SEQ ID NO: 22304 - protein, 22 aa, Artificial Sequence
  Synthetic polypeptide
PSKNSNIICKNQEVGLRARRSL

SEQ ID NO: 22305 - protein, 22 aa, Artificial Sequence
  Synthetic polypeptide
PSKNSNIICKNQEVGLRARRSL

SEQ ID NO: 22306 - protein, 22 aa, Artificial Sequence
  Synthetic polypeptide
PSKNSNIICKNQEVGLRARRSL

SEQ ID NO: 22307 - protein, 39 aa, Artificial Sequence
  Synthetic polypeptide
GRAQWLTPAIPALWEAEADRSLEETVFHKMIFLLKLPSP

SEQ ID NO: 22308 - protein, 39 aa, Artificial Sequence; identical to SEQ ID NO: 22307
  Synthetic polypeptide

SEQ ID NO: 22309 - protein, 39 aa, Artificial Sequence; identical to SEQ ID NO: 22307
  Synthetic polypeptide

SEQ ID NO: 22310 - protein, 39 aa, Artificial Sequence; identical to SEQ ID NO: 22307
  Synthetic polypeptide

SEQ ID NO: 22311 - protein, 29 aa, Artificial Sequence
  Synthetic polypeptide
AGRSGSHLQSQHFGRPKQTDHLRRQCFTK

SEQ ID NO: 22312 - protein, 29 aa, Artificial Sequence
  Synthetic polypeptide
AGRSGSHLQSQHFGRPKQTDHLRRQCFTK

SEQ ID NO: 22313 - protein, 29 aa, Artificial Sequence
  Synthetic polypeptide
AGRSGSHLQSQHFGRPKQTDHLRRQCFTK

SEQ ID NO: 22314 - protein, 29 aa, Artificial Sequence
  Synthetic polypeptide
AGRSGSHLQSQHFGRPKQTDHLRRQCFTK

SEQ ID NO: 22315 - protein, 36 aa, Artificial Sequence
  Synthetic polypeptide
GAPLLGRNPVWETCRLPKCMGCFQGCIYFKTSLQHY

SEQ ID NO: 22316 - protein, 36 aa, Artificial Sequence; identical to SEQ ID NO: 22315
  Synthetic polypeptide

SEQ ID NO: 22317 - protein, 71 aa, Artificial Sequence
  Synthetic polypeptide
DVGSTSAPPPCLGCEERLCWAATLSGRHVDCQSVWDAFKGAFISKHPCNITEEDYQPLMKLGTQTVPCNKK

SEQ ID NO: 22318 - protein, 39 aa, Artificial Sequence
  Synthetic polypeptide
GASLPGRPSSEMWGAPLPRRPVWDVRSASAGPQPCLGDM

SEQ ID NO: 22319 - protein, 39 aa, Artificial Sequence; identical to SEQ ID NO: 22318
  Synthetic polypeptide

SEQ ID NO: 22320 - protein, 249 aa, Artificial Sequence
  Synthetic polypeptide
DVGSTSAPPPCLGCEERLCWAATLSGRHVDCQSVWDAFKGAFISKHPCNITEEDYQPLMKLGTQTVPCNKILLWSRIKDLAHQFTQVQRDMFTLEDTLLGYLADDLTWCGEFNTSKINYQSCPDWRKDCSNNPVSVFWKTVSRRFAEAACDVVHVMLNGSRSKIFDKNSTFGSVEVHNLQPEKVQTLEAWVIHGGREDSRDLCQDPTIKELESIISKRNIQFSCKNIYRPDKFLQCVKNPEDSSCTSEI

SEQ ID NO: 22321 - protein, 26 aa, Artificial Sequence
  Synthetic polypeptide
GAPLLGRNPVWEVRSVSARPPRLRDM

SEQ ID NO: 22322 - protein, 26 aa, Artificial Sequence
  Synthetic polypeptide
GAPLLGRNPVWEVRSVSARPPRLRDM

SEQ ID NO: 22323 - protein, 25 aa, Artificial Sequence
  Synthetic polypeptide
ETCRLPKCMGCFQGCIYFKTSLQHY

SEQ ID NO: 22324 - protein, 25 aa, Artificial Sequence
  Synthetic polypeptide
ETCRLPKCMGCFQGCIYFKTSLQHY

SEQ ID NO: 22325 - protein, 94 aa, Artificial Sequence
  Synthetic polypeptide
GASLPGRPSSEMWGAPLPRRPVWDVRSASAGPQPCLGGEECLCPAAPSERHVDCQSVWDAFKGAFISKHPCNITEEDYQPLMKLGTQTVPCNKK

SEQ ID NO: 22326 - protein, 272 aa, Artificial Sequence
  Synthetic polypeptide
GASLPGRPSSEMWGAPLPRRPVWDVRSASAGPQPCLGGEECLCPAAPSERHVDCQSVWDAFKGAFISKHPCNITEEDYQPLMKLGTQTVPCNKILLWSRIKDLAHQFTQVQRDMFTLEDTLLGYLADDLTWCGEFNTSKINYQSCPDWRKDCSNNPVSVFWKTVSRRFAEAACDVVHVMLNGSRSKIFDKNSTFGSVEVHNLQPEKVQTLEAWVIHGGREDSRDLCQDPTIKELESIISKRNIQFSCKNIYRPDKFLQCVKNPEDSSCTSEI

SEQ ID NO: 22327 - protein, 30 aa, Artificial Sequence
  Synthetic polypeptide
ERREGEESAREGGLFPRGADQEYSAFRVGM

SEQ ID NO: 22328 - protein, 29 aa, Artificial Sequence
  Synthetic polypeptide
SERGEREKRARERGGYFLGAPIKNTVHFE

SEQ ID NO: 22329 - protein, 29 aa, Artificial Sequence
  Synthetic polypeptide
SERGEREKRARERGGYFLGAPIKNTVHFE

SEQ ID NO: 22330 - protein, 29 aa, Artificial Sequence
  Synthetic polypeptide
SERGEREKRARERGGYFLGAPIKNTVHFE

SEQ ID NO: 22331 - protein, 29 aa, Artificial Sequence
  Synthetic polypeptide
SERGEREKRARERGGYFLGAPIKNTVHFE

SEQ ID NO: 22332 - protein, 17 aa, Artificial Sequence
  Synthetic polypeptide
VREERGRRERERGGAIS

SEQ ID NO: 22333 - protein, 17 aa, Artificial Sequence
  Synthetic polypeptide
VREERGRRERERGGAIS

SEQ ID NO: 22334 - protein, 17 aa, Artificial Sequence
  Synthetic polypeptide
VREERGRRERERGGAIS

SEQ ID NO: 22335 - protein, 17 aa, Artificial Sequence
  Synthetic polypeptide
VREERGRRERERGGAIS

SEQ ID NO: 22336 - protein, 106 aa, Artificial Sequence
  Synthetic polypeptide
ERREGEESAREGGLFPRGADQEYSAFRVGMVQFSTSEFRLTPHIDNLEVANSFAVTNAFCSQFSRGVYAIFGFYDKKSVNTITSFCGTLHVSFITPSFPTDGTHPF

SEQ ID NO: 22337 - protein, 865 aa, Artificial Sequence
  Synthetic polypeptide
ERREGEESAREGGLFPRGADQEYSAFRVGMVQFSTSEFRLTPHIDNLEVANSFAVTNAFCSQFSRGVYAIFGFYDKKSVNTITSFCGTLHVSFITPSFPTDGTHPFVIQMRPDLKGALLSLIEYYQWDKFAYLYDSDRGLSTLQAVLDSAAEKKWQVTAINVGNINNDKKDEMYRSLFQDLELKKERRVILDCERDKVNDIVDQVITIGKHVKGYHYIIANLGFTDGDLLKIQFGGANVSGFQIVDYDDSLVSKFIERWSTLEEKEYPGAHTTTIKYTSALTYDAVQVMTEAFRNLRKQRIEISRRGNAGDCLANPAVPWGQGVEIERALKQVQVEGLSGNIKFDQNGKRINYTINIMELKTNGPRKIGYWSEVDKMVVTLTELPSGNDTSGLENKTVVVTTILESPYVMMKKNHEMLEGNERYEGYCVDLAAEIAKHCGFKYKLTIVGDGKYGARDADTKIWNGMVGELVYGKADIAIAPLTITLVREEVIDFSKPFMSLGISIMIKKPQKSKPGVFSFLDPLAYEIWMCIVFAYIGVSVVLFLVSRFSPYEWHTEEFEDGRETQSSESTNEFGIFNSLWFSLGAFMQQGCDISPRSLSGRIVGGVWWFFTLIIISSYTANLAAFLTVERMVSPIESAEDLSKQTEIAYGTLDSGSTKEFFRRSKIAVFDKMWTYMRSAEPSVFVRTTAEGVARVRKSKGKYAYLLESTMNEYIEQRKPCDTMKVGGNLDSKGYGIATPKGSSLRTPVNLAVLKLSEQGVLDKLKNKWWYDKGECGAKDSGSKEKTSALSLSNVAGVFYILVGGLGLAMLVALIEFCYKSRAEAKRMKVAKNAQNINPSSSQNSQNFATYKEGYNVYGIESVKI

SEQ ID NO: 22338 - protein, 865 aa, Artificial Sequence
  Synthetic polypeptide
ERREGEESAREGGLFPRGADQEYSAFRVGMVQFSTSEFRLTPHIDNLEVANSFAVTNAFCSQFSRGVYAIFGFYDKKSVNTITSFCGTLHVSFITPSFPTDGTHPFVIQMRPDLKGALLSLIEYYQWDKFAYLYDSDRGLSTLQAVLDSAAEKKWQVTAINVGNINNDKKDEMYRSLFQDLELKKERRVILDCERDKVNDIVDQVITIGKHVKGYHYIIANLGFTDGDLLKIQFGGANVSGFQIVDYDDSLVSKFIERWSTLEEKEYPGAHTTTIKYTSALTYDAVQVMTEAFRNLRKQRIEISRRGNAGDCLANPAVPWGQGVEIERALKQVQVEGLSGNIKFDQNGKRINYTINIMELKTNGPRKIGYWSEVDKMVVTLTELPSGNDTSGLENKTVVVTTILESPYVMMKKNHEMLEGNERYEGYCVDLAAEIAKHCGFKYKLTIVGDGKYGARDADTKIWNGMVGELVYGKADIAIAPLTITLVREEVIDFSKPFMSLGISIMIKKPQKSKPGVFSFLDPLAYEIWMCIVFAYIGVSVVLFLVSRFSPYEWHTEEFEDGRETQSSESTNEFGIFNSLWFSLGAFMQQGCDISPRSLSGRIVGGVWWFFTLIIISSYTANLAAFLTVERMVSPIESAEDLSKQTEIAYGTLDSGSTKEFFRRSKIAVFDKMWTYMRSAEPSVFVRTTAEGVARVRKSKGKYAYLLESTMNEYIEQRKPCDTMKVGGNLDSKGYGIATPKGSSLRNAVNLAVLKLNEQGLLDKLKNKWWYDKGECGSGGGDSKEKTSALSLSNVAGVFYILVGGLGLAMLVALIEFCYKSRAEAKRMKVAKNAQNINPSSSQNSQNFATYKEGYNVYGIESVKI

SEQ ID NO: 22339 - protein, 42 aa, Artificial Sequence
  Synthetic polypeptide
DLTGLSGVSAFASSSFSLALPCKNCLSPPTMILRPPQTCGIK

SEQ ID NO: 22340 - protein, 42 aa, Artificial Sequence; identical to SEQ ID NO: 22339
  Synthetic polypeptide

SEQ ID NO: 22341 - protein, 42 aa, Artificial Sequence; identical to SEQ ID NO: 22339
  Synthetic polypeptide

SEQ ID NO: 22342 - protein, 42 aa, Artificial Sequence; identical to SEQ ID NO: 22339
  Synthetic polypeptide

SEQ ID NO: 22343 - protein, 55 aa, Artificial Sequence
  Synthetic polypeptide
GLPRHVELSDPVESARRSETKHHCSNCGTKCCSELCHSRNPETSHYLEKEQYYSK

SEQ ID NO: 22344 - protein, 55 aa, Artificial Sequence; identical to SEQ ID NO: 22343
  Synthetic polypeptide

SEQ ID NO: 22345 - protein, 55 aa, Artificial Sequence; identical to SEQ ID NO: 22343
  Synthetic polypeptide

SEQ ID NO: 22346 - protein, 55 aa, Artificial Sequence; identical to SEQ ID NO: 22343
  Synthetic polypeptide

SEQ ID NO: 22347 - protein, 31 aa, Artificial Sequence
  Synthetic polypeptide
FSKPCLLLRPRLSFIGLWIFLLCFLPISMEE

SEQ ID NO: 22348 - protein, 33 aa, Artificial Sequence
  Synthetic polypeptide
FSLFFSYPNSSLDLVKFHLLPEVLNDSPNHACS

SEQ ID NO: 22349 - protein, 33 aa, Artificial Sequence; identical to SEQ ID NO: 22348
  Synthetic polypeptide

SEQ ID NO: 22350 - protein, 33 aa, Artificial Sequence; identical to SEQ ID NO: 22348
  Synthetic polypeptide

SEQ ID NO: 22351 - protein, 33 aa, Artificial Sequence; identical to SEQ ID NO: 22348
  Synthetic polypeptide

SEQ ID NO: 22352 - protein, 42 aa, Artificial Sequence
  Synthetic polypeptide
SSTSFLKSSMILQTMLAPETKAVIHWIMDIPFVLSANLHGGD

SEQ ID NO: 22353 - protein, 90 aa, Artificial Sequence
  Synthetic polypeptide
FSKPCLLLRPRLSFIGLWIFLLCFLPISMEETLWPIIHMMRRGVVVLTNTAPPQMTPFSKAWPGHTLLSTRPCLTPIGHHVARMMMTAAL

SEQ ID NO: 22354 - protein, 267 aa, Artificial Sequence
  Synthetic polypeptide
SSTSFLKSSMILQTMLAPETKAVIHWIMDIPFVLSANLHGGDLVANYPYDETRSGSAHEYSSSPDDAIFQSLARAYSSFNPAMSDPNRPPCRKNDDDSSFVDGTTNGGAWYSVPGGMQDFNYLSSNCFEITVELSCEKFPPEETLKTYWEDNKNSLISYLEQIHRGVKGFVRDLQGNPIANATISVEGIDHDVTSAKDGDYWRLLIPGNYKLTASAPGYLAITKKVAVPYSPAAGVDFELESFSERKEEEKEELMEWWKMMSETLNF

SEQ ID NO: 22355 - protein, 40 aa, Artificial Sequence
  Synthetic polypeptide
FSKPCLLLRPRLSFIGLWIFLLCFLPISMEETLWPIIHMM

SEQ ID NO: 22356 - protein, 50 aa, Artificial Sequence
  Synthetic polypeptide
SSTSFLKSSMILQTMLAPETKAVIHWIMDIPFVLSANLHGGDLVANYPYD

SEQ ID NO: 22357 - protein, 49 aa, Artificial Sequence
  Synthetic polypeptide
FSKPCLLLRPRLSFIGLWIFLLCFLPISMEETLWPIIHMMRRGVVVLTN

SEQ ID NO: 22358 - protein, 60 aa, Artificial Sequence
  Synthetic polypeptide
SSTSFLKSSMILQTMLAPETKAVIHWIMDIPFVLSANLHGGDLVANYPYDETRSGSAHEY

SEQ ID NO: 22359 - protein, 27 aa, Artificial Sequence
  Synthetic polypeptide
KKKKKKKKKKKKKKEDRKSLQKRTARS

SEQ ID NO: 22360 - protein, 27 aa, Artificial Sequence
  Synthetic polypeptide
KKKKKKKKKKKKKKEDRKSLQKRTARS

SEQ ID NO: 22361 - protein, 27 aa, Artificial Sequence
  Synthetic polypeptide
KKKKKKKKKKKKKKEDRKSLQKRTARS

SEQ ID NO: 22362 - protein, 27 aa, Artificial Sequence
  Synthetic polypeptide
KKKKKKKKKKKKKKEDRKSLQKRTARS

SEQ ID NO: 22363 - protein, 27 aa, Artificial Sequence
  Synthetic polypeptide
KKKKKKKKKKKKKKEDRKSLQKRTARS

SEQ ID NO: 22364 - protein, 427 aa, Artificial Sequence
  Synthetic polypeptide
KKKKKKKKKKKKKKRIGRVFKNALQEAEARFREIKLQREARETQESERKPPPYKHIKVNKPYGKVQIYTADISEIPKCNCKPTDENPCGFDSECLNRMLMFECHPQVCPAGEFCQNQCFTKRQYPETKIIKTDGKGWGLVAKRDIRKGEFVNEYVGELIDEEECMARIKHAHENDITHFYMLTIDKDRIIDAGPKGNYSRFMNHSCQPNCETLKWTVNGDTRVGLFAVCDIPAGTELTFNYNLDCLGNEKTVCRCGASNCSGFLGDRPKTSTTLSSEEKGKKTKKKTRRRRAKGEGKRQSEDECFRCGDGGQLVLCDRKFCTKAYHLSCLGLGKRPFGKWECPWHHCDVCGKPSTSFCHLCPNSFCKEHQDGTAFSCTPDGRSYCCEHDLGAASVRSTKTEKPPPEPGKPKGKRRRRRGWRRVTEGK

SEQ ID NO: 22365 - protein, 427 aa, Artificial Sequence; identical to SEQ ID NO: 22364
  Synthetic polypeptide

SEQ ID NO: 22366 - protein, 427 aa, Artificial Sequence; identical to SEQ ID NO: 22364
  Synthetic polypeptide

SEQ ID NO: 22367 - protein, 427 aa, Artificial Sequence; identical to SEQ ID NO: 22364
  Synthetic polypeptide

SEQ ID NO: 22368 - protein, 427 aa, Artificial Sequence; identical to SEQ ID NO: 22364
  Synthetic polypeptide

SEQ ID NO: 22369 - protein, 57 aa, Artificial Sequence
  Synthetic polypeptide
KKKKKKKKKKKKKRGSEESSKTHCKKLKLVFVKLSFRGKPEKHRRASASPHHTSTSR

SEQ ID NO: 22370 - protein, 57 aa, Artificial Sequence; identical to SEQ ID NO: 22369
  Synthetic polypeptide

SEQ ID NO: 22371 - protein, 57 aa, Artificial Sequence; identical to SEQ ID NO: 22369
  Synthetic polypeptide

SEQ ID NO: 22372 - protein, 57 aa, Artificial Sequence; identical to SEQ ID NO: 22369
  Synthetic polypeptide

SEQ ID NO: 22373 - protein, 57 aa, Artificial Sequence; identical to SEQ ID NO: 22369
  Synthetic polypeptide

SEQ ID NO: 22374 - protein, 22 aa, Artificial Sequence
  Synthetic polypeptide
KKKKKKKKKKKKKKEDRKSLQK

SEQ ID NO: 22375 - protein, 22 aa, Artificial Sequence
  Synthetic polypeptide
KKKKKKKKKKKKKKRIGRVFKN

SEQ ID NO: 22376 - protein, 22 aa, Artificial Sequence
  Synthetic polypeptide
KKKKKKKKKKKKKRGSEESSKT

SEQ ID NO: 22377 - protein, 339 aa, Artificial Sequence
  Synthetic polypeptide
TQVIPLVLGCLVKLKSIRNFSEEDTVCHKMPKAHKEKVFEMIINPGDNVLLDEPAYSGTLQSLHPLGCNIINVASDESGIVPDSLRDILSRWKPEDAKNPQKNTPKFLYTVPNGNNPTGNSLTSERKKEIYELARKYDFLIIEDDPYYFLQFNKFRVPTFLSMDVDGRVIRADSFSKIISSGLRIGFLTGPKPLIERVILHIQVSTLHPSTFNQLMISQLLHEWGEEGFMAHVDRVIDFYSNQKDAILAAADKWLTGLAEWHVPAAGMFLWIKVKGINDVKELIEEKAVKMGVLMLPGNAFYVDSSAPSPYLRASFSSASPEQMDVAFQVLAQLIKESL

SEQ ID NO: 22378 - protein, 339 aa, Artificial Sequence; identical to SEQ ID NO: 22377
  Synthetic polypeptide

SEQ ID NO: 22379 - protein, 339 aa, Artificial Sequence; identical to SEQ ID NO: 22377
  Synthetic polypeptide

SEQ ID NO: 22380 - protein, 339 aa, Artificial Sequence; identical to SEQ ID NO: 22377
  Synthetic polypeptide

SEQ ID NO: 22381 - protein, 28 aa, Artificial Sequence
  Synthetic polypeptide
SLSQLETFRRRILFVIRCQKLIRKRCLK

SEQ ID NO: 22382 - protein, 28 aa, Artificial Sequence
  Synthetic polypeptide
SLSQLETFRRRILFVIRCQKLIRKRCLK

SEQ ID NO: 22383 - protein, 28 aa, Artificial Sequence
  Synthetic polypeptide
SLSQLETFRRRILFVIRCQKLIRKRCLK

SEQ ID NO: 22384 - protein, 28 aa, Artificial Sequence
  Synthetic polypeptide
SLSQLETFRRRILFVIRCQKLIRKRCLK

SEQ ID NO: 22385 - protein, 28 aa, Artificial Sequence
  Synthetic polypeptide
SLSQLETFRRRILFVIRCQKLIRKRCLK

SEQ ID NO: 22386 - protein, 28 aa, Artificial Sequence
  Synthetic polypeptide
SLSQLETFRRRILFVIRCQKLIRKRCLK

SEQ ID NO: 22387 - protein, 28 aa, Artificial Sequence
  Synthetic polypeptide
SLSQLETFRRRILFVIRCQKLIRKRCLK

SEQ ID NO: 22388 - protein, 4 aa, Artificial Sequence
  Synthetic polypeptide
GKGV

SEQ ID NO: 22389 - protein, 4 aa, Artificial Sequence
  Synthetic polypeptide
GKGV

SEQ ID NO: 22390 - protein, 4 aa, Artificial Sequence
  Synthetic polypeptide
GKGV

SEQ ID NO: 22391 - protein, 4 aa, Artificial Sequence
  Synthetic polypeptide
GKGV

SEQ ID NO: 22392 - protein, 4 aa, Artificial Sequence
  Synthetic polypeptide
GKGV

SEQ ID NO: 22393 - protein, 4 aa, Artificial Sequence
  Synthetic polypeptide
GKGV

SEQ ID NO: 22394 - protein, 4 aa, Artificial Sequence
  Synthetic polypeptide
GKGV

SEQ ID NO: 22395 - protein, 143 aa, Artificial Sequence
  Synthetic polypeptide
TQVIPLVLGCLVKLKSIRNFSEEDTVCHKMPKAHKEKVFEMIINPGDNVLLDEPAYSGTLQSLHPLGCNIINVASDESGIVPDSLRDILSRWKPEDAKNPQKNTPKFLYTVPNGNNPTGNSLTSERKKEIYELARKYDFLIIE

SEQ ID NO: 22396 - protein, 123 aa, Artificial Sequence
  Synthetic polypeptide
TQVIPLVLGCLVKLKSIRNFSEEDTVCHKMPKAHKEKVFEMIINPGDNVLLDEPAYSGTLQSLHPLGCNIINVASDESGIVPDSLRDILSRWKPEDAKNPQKNTPKFLYTVPNGNNPTGNSLT

SEQ ID NO: 22397 - protein, 94 aa, Artificial Sequence
  Synthetic polypeptide
TQVIPLVLGCLVKLKSIRNFSEEDTVCHKMPKAHKEKVFEMIINPGDNVLLDEPAYSGTLQSLHPLGCNIINVASDESGIVPDSLRDILSRWKP

SEQ ID NO: 22398 - protein, 39 aa, Artificial Sequence
  Synthetic polypeptide
VFKIAYPSLDSSPDLLNQKLWRRFLWTKDLFRDSLQQSM

SEQ ID NO: 22399 - protein, 22 aa, Artificial Sequence
  Synthetic polypeptide
IRNSGDVFFGPKISFVIPCNNQ

SEQ ID NO: 22400 - protein, 29 aa, Artificial Sequence
  Synthetic polypeptide
NCISILGLLPRPTESETLETFSLDQRSLS

SEQ ID NO: 22401 - protein, 39 aa, Artificial Sequence
  Synthetic polypeptide
VFKIAYPSLDSSPDLLNQKLWRDVFFGPKISFVIPCNNQ

SEQ ID NO: 22402 - protein, 16 aa, Artificial Sequence
  Synthetic polypeptide
IRNSGETFSLDQRSLS

SEQ ID NO: 22403 - protein, 37 aa, Artificial Sequence
  Synthetic polypeptide
NCISILGLLPRPTESETLERRFLWTKDLFRDSLQQSM

SEQ ID NO: 22404 - protein, 7 aa, Artificial Sequence
  Synthetic polypeptide
VTETKSH

SEQ ID NO: 22405 - protein, 78 aa, Artificial Sequence
  Synthetic polypeptide
QKRRVTEEVRGGLPGKDHPGGPEVPSPEGPRGGEAAAGKRGDRPGPEQGPGGSVGPPGQPEEGADAHPVAGEDSGAED

SEQ ID NO: 22406 - protein, 110 aa, Artificial Sequence
  Synthetic polypeptide
AEIMPLHSSLSDRNEESLKKCVEDYLARITQEGQRYQALKAHAEEKLQLANEEIAQVRSKAQAEALALQASLRKEQMRIQSLEKTVEQKTKENEELTRICDDLISKMEKI

SEQ ID NO: 22407 - protein, 35 aa, Artificial Sequence
  Synthetic polypeptide
LSDHSSCSISHSSGETNEGVLNAVSNAWGAFPMPL

SEQ ID NO: 22408 - protein, 35 aa, Artificial Sequence; identical to SEQ ID NO: 22407
  Synthetic polypeptide

SEQ ID NO: 22409 - protein, 35 aa, Artificial Sequence; identical to SEQ ID NO: 22407
  Synthetic polypeptide

SEQ ID NO: 22410 - protein, 35 aa, Artificial Sequence; identical to SEQ ID NO: 22407
  Synthetic polypeptide

SEQ ID NO: 22411 - protein, 35 aa, Artificial Sequence; identical to SEQ ID NO: 22407
  Synthetic polypeptide

SEQ ID NO: 22412 - protein, 35 aa, Artificial Sequence; identical to SEQ ID NO: 22407
  Synthetic polypeptide

SEQ ID NO: 22413 - protein, 35 aa, Artificial Sequence; identical to SEQ ID NO: 22407
  Synthetic polypeptide

SEQ ID NO: 22414 - protein, 19 aa, Artificial Sequence
  Synthetic polypeptide
VIIVPALLAIHLEKQMRVF

SEQ ID NO: 22415 - protein, 19 aa, Artificial Sequence
  Synthetic polypeptide
VIIVPALLAIHLEKQMRVF

SEQ ID NO: 22416 - protein, 19 aa, Artificial Sequence
  Synthetic polypeptide
VIIVPALLAIHLEKQMRVF

SEQ ID NO: 22417 - protein, 19 aa, Artificial Sequence
  Synthetic polypeptide
VIIVPALLAIHLEKQMRVF

SEQ ID NO: 22418 - protein, 19 aa, Artificial Sequence
  Synthetic polypeptide
VIIVPALLAIHLEKQMRVF

SEQ ID NO: 22419 - protein, 19 aa, Artificial Sequence
  Synthetic polypeptide
VIIVPALLAIHLEKQMRVF

SEQ ID NO: 22420 - protein, 19 aa, Artificial Sequence
  Synthetic polypeptide
VIIVPALLAIHLEKQMRVF

SEQ ID NO: 22421 - protein, 21 aa, Artificial Sequence
  Synthetic polypeptide
ASVQQRLNQCTHSHGRRVYNR

SEQ ID NO: 22422 - protein, 21 aa, Artificial Sequence
  Synthetic polypeptide
ASVQQRLNQCTHSHGRRVYNR

SEQ ID NO: 22423 - protein, 21 aa, Artificial Sequence
  Synthetic polypeptide
ASVQQRLNQCTHSHGRRVYNR

SEQ ID NO: 22424 - protein, 21 aa, Artificial Sequence
  Synthetic polypeptide
ASVQQRLNQCTHSHGRRVYNR

SEQ ID NO: 22425 - protein, 21 aa, Artificial Sequence
  Synthetic polypeptide
ASVQQRLNQCTHSHGRRVYNR

SEQ ID NO: 22426 - protein, 92 aa, Artificial Sequence
  Synthetic polypeptide
ISALIPTEEEFTTDEADETRSNETQNPHKPSPSRLSTGASADAVWDNGIDDAYFLEATEDAELAEAAENSLLSYNSEVDEIPDELIIEVLQE

SEQ ID NO: 22427 - protein, 92 aa, Artificial Sequence; identical to SEQ ID NO: 22426
  Synthetic polypeptide

SEQ ID NO: 22428 - protein, 92 aa, Artificial Sequence; identical to SEQ ID NO: 22426
  Synthetic polypeptide

SEQ ID NO: 22429 - protein, 92 aa, Artificial Sequence; identical to SEQ ID NO: 22426
  Synthetic polypeptide

SEQ ID NO: 22430 - protein, 73 aa, Artificial Sequence
  Synthetic polypeptide
VISNLEFQVCLSFSAATFESVHSFPRKKSLQQMKQMKLGAMKPRILINHHLAGCQQVHLLMLSGIMALMMLIF

SEQ ID NO: 22431 - protein, 73 aa, Artificial Sequence; identical to SEQ ID NO: 22430
  Synthetic polypeptide

SEQ ID NO: 22432 - protein, 73 aa, Artificial Sequence; identical to SEQ ID NO: 22430
  Synthetic polypeptide

SEQ ID NO: 22433 - protein, 73 aa, Artificial Sequence; identical to SEQ ID NO: 22430
  Synthetic polypeptide

SEQ ID NO: 22434 - protein, 30 aa, Artificial Sequence
  Synthetic polypeptide
ISALIPTEEEFTTDEADETRSNETQNPHKP

SEQ ID NO: 22435 - protein, 49 aa, Artificial Sequence
  Synthetic polypeptide
VISNLEFQVCLSFSAATFESVHSFPRKKSLQQMKQMKLGAMKPRILINH

SEQ ID NO: 22436 - protein, 23 aa, Artificial Sequence
  Synthetic polypeptide
VSGQVLAYGKVFTDPGQNKKTKG

SEQ ID NO: 22437 - protein, 23 aa, Artificial Sequence
  Synthetic polypeptide
VSGQVLAYGKVFTDPGQNKKTKG

SEQ ID NO: 22438 - protein, 36 aa, Artificial Sequence
  Synthetic polypeptide
IESLDRCWPMVRFSLTQAKIRKLKVRATAETTTNKI

SEQ ID NO: 22439 - protein, 36 aa, Artificial Sequence; identical to SEQ ID NO: 22438
  Synthetic polypeptide

SEQ ID NO: 22440 - protein, 19 aa, Artificial Sequence
  Synthetic polypeptide
PSWVSAQGCPLGHSVPALL

SEQ ID NO: 22441 - protein, 121 aa, Artificial Sequence
  Synthetic polypeptide
KPFLLMCTASADRPGCQPKAAPSVTLFPPSSEELQANKATLVCLISDFYPGAVTVAWKADSSPVKAGVETTTPSKQSNNKYAASSYLSLTPEQWKSHRSYSCQVTHEGSTVEKTVAPTECS

SEQ ID NO: 22442 - protein, 39 aa, Artificial Sequence
  Synthetic polypeptide
CALPQLTVLGVSPRLPPRSLCSRPPLRSFKPTRPHWCVS

SEQ ID NO: 22443 - protein, 661 aa, Artificial Sequence
  Synthetic polypeptide
NGTKGGAFRRRLGHDCKALVSGIHAFMKEALGASSPFWPCEDTAGRHHLGSMEPAPDTESATTLILDFPAFRPVGDRRGLSEGRRRHGFTVRSKDSLPTHFTRNVQKAIDKYTCKSLSSFSSSGSHTPTGAHTSWSGSATQSSTTGSSTERGSVYSWRDDEFDEASSQSVQRLLWEVEEMLFEGKVNPQTQSLLAECGEWTRRSLHLRVLGRQLILPTDKGVQHFQGSTPASAVHRPPLSACGHSSNIRELCISGSQIVPAALSASALPGPDDTGVADLTARSSLEEEVYHVDGKIEEYFAFDRKEDDDECLEQKPAQPGRKWRKLGLPPVSPRDCVKDAVAAEVFDHVWTNMVELLEELIRKHWETTLTEGKKQRETLKVAGNRFPHVLVPHAHADGASGPPSGHAEAHGISLASRLNPPQIHHFSSSFYSDMNGVMTIQAKPLQRRPAYFADRTQNEKEDKASGGGAGALSSAPHRLGRASDTHGLSPSAKKTPVPWRLPSLASDSQRLKTPNIYSDEVLRGTKLPTGVDHMASPLVQTSRSRFPPLVTETRGQNTAVPGCRLVSYRGRHLQNRVLSAMPDGTERSRLRERTATLERLSRPSTTHTFRQSDTPRKSSLTQMEFAAHTWTGQSILTGSQYVPKSFQRTTLTFKRRFQVTS

SEQ ID NO: 22444 - protein, 26 aa, Artificial Sequence
  Synthetic polypeptide
SWTSQPSDLWEIEEDCQKDVEGTVLL

SEQ ID NO: 22445 - protein, 69 aa, Artificial Sequence
  Synthetic polypeptide
QRERDRDEDSHGNEDAFLAAHAWTATPSSSCSAPCRTCGRQPAAWTRGRRPYCCRQSAVPCVPAGQRGT

SEQ ID NO: 22446 - protein, 69 aa, Artificial Sequence; identical to SEQ ID NO: 22445
  Synthetic polypeptide

SEQ ID NO: 22447 - protein, 69 aa, Artificial Sequence; identical to SEQ ID NO: 22445
  Synthetic polypeptide

SEQ ID NO: 22448 - protein, 91 aa, Artificial Sequence
  Synthetic polypeptide
GYFKYGFRKETETTSKGTSKYDRERETEMKTVMGMKMHFWPPMRGLPRLRVHAARPAGPAEDSLQPGRADGDPTAAGRAPCPVCLLASGAL

SEQ ID NO: 22449 - protein, 91 aa, Artificial Sequence; identical to SEQ ID NO: 22448
  Synthetic polypeptide

SEQ ID NO: 22450 - protein, 91 aa, Artificial Sequence; identical to SEQ ID NO: 22448
  Synthetic polypeptide

SEQ ID NO: 22451 - protein, 55 aa, Artificial Sequence
  Synthetic polypeptide
RCIFGRPCVDCHAFEFMQRALQDLRKTACSLDARTETLLLQAERRALCACWPAGH

SEQ ID NO: 22452 - protein, 55 aa, Artificial Sequence; identical to SEQ ID NO: 22451
  Synthetic polypeptide

SEQ ID NO: 22453 - protein, 55 aa, Artificial Sequence; identical to SEQ ID NO: 22451
  Synthetic polypeptide

SEQ ID NO: 22454 - protein, 15 aa, Artificial Sequence
  Synthetic polypeptide
QKRLLSIRCVPSAVL

SEQ ID NO: 22455 - protein, 39 aa, Artificial Sequence
  Synthetic polypeptide
GYSEKTAVCNQEGDSHQTTSLPAPLSWTSSLQNYDKSGY

SEQ ID NO: 22456 - protein, 63 aa, Artificial Sequence
  Synthetic polypeptide
KSDFRELSLFLPGEDTVRRQPSAIRKGTLTRQQVFQHLYLGLPASRIMTKAVIEHSLCTKCCP

SEQ ID NO: 22457 - protein, 143 aa, Artificial Sequence
  Synthetic polypeptide
LREGRGSPLGYLSLPCGASLRGTLTSLSDAFQRALPGGKLSWWNASPEQQVAGPRGGLTQWLNTGKELALGVRTSETWRLGCRWKRPLCLGHIYSSGRRESFQEPDWRCSLWQLHSVGGRFEMYQTAWIDSLPLLSFLVTSVT

SEQ ID NO: 22458 - protein, 143 aa, Artificial Sequence; identical to SEQ ID NO: 22457
  Synthetic polypeptide

SEQ ID NO: 22459 - protein, 451 aa, Artificial Sequence
  Synthetic polypeptide
TPGRNWHLESGHLKLGGWDADGKGPCVWDTFTHQGGERVFKNQTGDVACGSYTLWEEDLKCIKQLGLTHYRFSLSWSRLLPDGTTGFINQKGIDYYNKIIDDLLKNGVTPIVTLYHFDLPQTLEDQGGWLSEAIIESFDKYAQFCFSTFGDRVKQWITINEANVLSVMSYDLGMFPPGIPHFGTGGYQAAHNLIKAHARSWHSYDSLFRKKQKGMVSLSLFAVWLEPADPNSVSDQEAAKRAITFHLDLFAKPIFIDGDYPEVVKSQIASMSQKQGYPSSRLPEFTEEEKKMIKGTADFFAVQYYTTRLIKYQENKKGELGILQDAEIEFFPDPSWKNVDWIYVVPWGVCKLLKYIKDTYNNPVIYITENGFPQSDPAPLDDTQRWEYFRQTFQELFKAIQLDKVNLQVYCAWSLLDNFEWNQGYSSRFGLFHVDFEDPARPRVPYTSAKE

SEQ ID NO: 22460 - protein, 33 aa, Artificial Sequence
  Synthetic polypeptide
NLEAGMQMEKALVSGTHLLIREEREFSRTRLAM

SEQ ID NO: 22461 - protein, 33 aa, Artificial Sequence; identical to SEQ ID NO: 22460
  Synthetic polypeptide

SEQ ID NO: 22462 - protein, 144 aa, Artificial Sequence
  Synthetic polypeptide
TPGRNWHLESGHLKLGGWDADGKGPCVWDTFTHQGGERVFKNQTGDVACGSYTLWEEDLKCIKQLGLTHYRFSLSWSRLLPDGTTGFINQKAIQLDKVNLQVYCAWSLLDNFEWNQGYSSRFGLFHVDFEDPARPRVPYTSAKE

SEQ ID NO: 22463 - protein, 39 aa, Artificial Sequence
  Synthetic polypeptide
LPAVASPEEAGMQMEKALVSGTHLLIREEREFSRTRLAM

SEQ ID NO: 22464 - protein, 39 aa, Artificial Sequence; identical to SEQ ID NO: 22463
  Synthetic polypeptide

SEQ ID NO: 22465 - protein, 99 aa, Artificial Sequence
  Synthetic polypeptide
AAFGKLLLSAGFVNQFYPSPFMGSNDFLLLQALRRLGCRWKRPLCLGHIYSSGRRESFQEPDWRCSLWQLHSVGGRFEMYQTAWIDSLPLLSFLVTSVT

SEQ ID NO: 22466 - protein, 99 aa, Artificial Sequence; identical to SEQ ID NO: 22465
  Synthetic polypeptide

SEQ ID NO: 22467 - protein, 101 aa, Artificial Sequence
  Synthetic polypeptide
PRTSNSRFLGFGTPTGFLVPQLADGLLRDLVIMEKNKPTNKLSLKLITQIRTASYLSNQSELLQWRCFIGGKYGITPFQTSGDNYPCLLGTSFFKGVRNYL

SEQ ID NO: 22468 - protein, 10 aa, Artificial Sequence
  Synthetic polypeptide
SWKKTNQPTN

SEQ ID NO: 22469 - protein, 60 aa, Artificial Sequence
  Synthetic polypeptide
CFLTSNIELQVLRLWDSDWLPCSSACRWTIEGPCDHGKKQTNQQTEPETDNTDTYSIIFK

SEQ ID NO: 22470 - protein, 283 aa, Artificial Sequence
  Synthetic polypeptide
SKLSQGQKTKHRMFSLIGVPRHHRGEIWKFLAEQFHLKHQFPSKQQPKDVPYKELLKQLTSQQHAILIDLGRTFPTHPYFSAQLGAGQLSLYNILKAYSLLDQEVGYCQGLSFVAGILLLHMSEEEAFKMLKFLMFDMGLRKQYRPDMIILQMEKTINQVFEMDIAKQLQAYEVEYHVLQEELIDSSPLSDNQRMDKLEKTNSSLRKQNLDLLEQLQVANGRIQSLEATIEKLLSSESKLKQAMLTLELERSALLQTVEELRRRSAEPSDREPECTQPEPTGD

SEQ ID NO: 22471 - protein, 24 aa, Artificial Sequence
  Synthetic polypeptide
QTVARTENQTSHVLTHRCATSSPR

SEQ ID NO: 22472 - protein, 24 aa, Artificial Sequence
  Synthetic polypeptide
QTVARTENQTSHVLTHRCATSSPR

SEQ ID NO: 22473 - protein, 386 aa, Artificial Sequence
  Synthetic polypeptide
SKLSQGQKTKHRMFSLIGVPRHHRGEIWKFLAEQFHLKHQFPSKQQPKDVPYKELLKQLTSQQHAILIDLGRTFPTHPYFSAQLGAGQLSLYNILKAYSLLDQEVGYCQGLSFVAGILLLHMSEEEAFKMLKFLMFDMGLRKQYRPDMIILQIQMYQLSRLLHDYHRDLYNHLEEHEIGPSLYAAPWFLTMFASQFPLGFVARVFDMIFLQGTEVIFKVALSLLGSHKPLILQHENLETIVDFIKSTLPNLGLVQMEKTINQVFEMDIAKQLQAYEVEYHVLQEELIDSSPLSDNQRMDKLEKTNSSLRKQNLDLLEQLQVANGRIQSLEATIEKLLSSESKLKQAMLTLELERSALLQTVEELRRRSAEPSDREPECTQPEPTGD

SEQ ID NO: 22474 - protein, 157 aa, Artificial Sequence
  Synthetic polypeptide
HLTLLTVITYLHVCLPLECELLEGRNPVFIHLCVPVPSTVPGSWNHPSVIVQPGKRPLPVESPDTQRKRRIHRCDYDGCNKVYTKSSHLKAHRRTHTGEKPYKCTWEGCTWKFARSDELTRHFRKHTGIKPFQCPDCDRSFSRSDHLALHRKRHMLV

SEQ ID NO: 22475 - protein, 71 aa, Artificial Sequence
  Synthetic polypeptide
SVSSSRAGTLFLFIFVSRCQAQCLAHGITLRSSCSLGRDLYLWNPRILKGSGGYTDVIMMDATKCTLKAPT

SEQ ID NO: 22476 - protein, 54 aa, Artificial Sequence
  Synthetic polypeptide
APRGQEPCFYSSLCPGAKHSAWLMESPFGHRAAWEETFTCGIPGYSKEAEDTQM

SEQ ID NO: 22477 - protein, 85 aa, Artificial Sequence
  Synthetic polypeptide
TREAEVAVSKVRDPRANFDQSLRVLKHAKKVQPDVISKTSIMLGLGENDEQVYATMKALREADVDCLTLGQYMQPTRRHLKVNFS

SEQ ID NO: 22478 - protein, 135 aa, Artificial Sequence
  Synthetic polypeptide
TREAEVAVSKVRDPRANFDQSLRVLKHAKKVQPDVISKTSIMLGLGENDEQVYATMKALREADVDCLTLGQYMQPTRRHLKVEEYITPEKFKYWEKVGNELGFHYTASGPLVRSSYKAGEFFLKNLVAKRKTKDL

SEQ ID NO: 22479 - protein, 135 aa, Artificial Sequence; identical to SEQ ID NO: 22478
  Synthetic polypeptide

SEQ ID NO: 22480 - protein, 135 aa, Artificial Sequence; identical to SEQ ID NO: 22478
  Synthetic polypeptide

SEQ ID NO: 22481 - protein, 5 aa, Artificial Sequence
  Synthetic polypeptide
PTCQD

SEQ ID NO: 22482 - protein, 5 aa, Artificial Sequence
  Synthetic polypeptide
PTCQD

SEQ ID NO: 22483 - protein, 5 aa, Artificial Sequence
  Synthetic polypeptide
PTCQD

SEQ ID NO: 22484 - protein, 5 aa, Artificial Sequence
  Synthetic polypeptide
PTCQD

SEQ ID NO: 22485 - protein, 5 aa, Artificial Sequence
  Synthetic polypeptide
PTCQD

SEQ ID NO: 22486 - protein, 5 aa, Artificial Sequence
  Synthetic polypeptide
PTCQD

SEQ ID NO: 22487 - protein, 5 aa, Artificial Sequence
  Synthetic polypeptide
PTCQD

SEQ ID NO: 22488 - protein, 45 aa, Artificial Sequence
  Synthetic polypeptide
SQNFGRPRQVDYLRSGVQDHPSQHARTKRSGRILSRKKSFFFYQY

SEQ ID NO: 22489 - protein, 45 aa, Artificial Sequence; identical to SEQ ID NO: 22488
  Synthetic polypeptide

SEQ ID NO: 22490 - protein, 45 aa, Artificial Sequence; identical to SEQ ID NO: 22488
  Synthetic polypeptide

SEQ ID NO: 22491 - protein, 45 aa, Artificial Sequence; identical to SEQ ID NO: 22488
  Synthetic polypeptide

SEQ ID NO: 22492 - protein, 45 aa, Artificial Sequence; identical to SEQ ID NO: 22488
  Synthetic polypeptide

SEQ ID NO: 22493 - protein, 45 aa, Artificial Sequence; identical to SEQ ID NO: 22488
  Synthetic polypeptide

SEQ ID NO: 22494 - protein, 45 aa, Artificial Sequence; identical to SEQ ID NO: 22488
  Synthetic polypeptide

SEQ ID NO: 22495 - protein, 451 aa, Artificial Sequence
  Synthetic polypeptide
GQEFKTILANMPGLKEVVESCRGKNLFFSTNIDDAIKEADLVFISVNTPTKTYGMGKGRAADLKYIEACARRIVQNSNGYKIVTEKSTVPVRAAESIRRIFDANTKPNLNLQVLSNPEFLAEGTAIKDLKNPDRVLIGGDETPEGQRAVQALCAVYEHWVPREKILTTNTWSSELSKLAANAFLAQRISSINSISALCEATGADVEEVATAIGMDQRIGNKFLKASVGFGGSCFQKDVLNLVYLCEALNLPEVARYWQQVIDMNDYQRRRFASRIIDSLFNTVTDKKIAILGFAFKKDTGDTRESSSIYISKYLMDEGAHLHIYDPKVPREQIVVDLSHPGVSEDDQVSRLVTISKDPYEACDGAHAVVICTEWDMFKELDYERIHKKMLKPAFIFDGRRVLDGLHNELQTIGFQIETIGKKVSSKRIPYAPSGEIPKFSLQDPPNKKPKV

SEQ ID NO: 22496 - protein, 451 aa, Artificial Sequence; identical to SEQ ID NO: 22495
  Synthetic polypeptide

SEQ ID NO: 22497 - protein, 384 aa, Artificial Sequence
  Synthetic polypeptide
GQEFKTILANMPGLKEVVESCRGKNLFFSTNIDDAIKEADLVFISVLSNPEFLAEGTAIKDLKNPDRVLIGGDETPEGQRAVQALCAVYEHWVPREKILTTNTWSSELSKLAANAFLAQRISSINSISALCEATGADVEEVATAIGMDQRIGNKFLKASVGFGGSCFQKDVLNLVYLCEALNLPEVARYWQQVIDMNDYQRRRFASRIIDSLFNTVTDKKIAILGFAFKKDTGDTRESSSIYISKYLMDEGAHLHIYDPKVPREQIVVDLSHPGVSEDDQVSRLVTISKDPYEACDGAHAVVICTEWDMFKELDYERIHKKMLKPAFIFDGRRVLDGLHNELQTIGFQIETIGKKVSSKRIPYAPSGEIPKFSLQDPPNKKPKV

SEQ ID NO: 22498 - protein, 125 aa, Artificial Sequence
  Synthetic polypeptide
GQEFKTILANMPGLKEVVESCRGKNLFFSTNIDDAIKEADLVFISVNTPTKTYGMGKGRAADLKYIEACARRIVQNSNGYKIVTEKSTVPVRAAESIRRIFDANTKPNLNLQVLSNPEFLAEGTA

SEQ ID NO: 22499 - protein, 110 aa, Artificial Sequence
  Synthetic polypeptide
GQEFKTILANMPGLKEVVESCRGKNLFFSTNIDDAIKEADLVFISVNTPTKTYGMGKGRAADLKYIEACARRIVQNSNGYKIVTEKSTVPVRAAESIRRIFDANTKPNLN

SEQ ID NO: 22500 - protein, 87 aa, Artificial Sequence
  Synthetic polypeptide
GQEFKTILANMPGLKEVVESCRGKNLFFSTNIDDAIKEADLVFISVNTPTKTYGMGKGRAADLKYIEACARRIVQNSNGYKIVTEKS

SEQ ID NO: 22501 - protein, 41 aa, Artificial Sequence
  Synthetic polypeptide
GQEFKTILANMPGLKEVVESCRGKNLFFSTNIDDAIKEADL

SEQ ID NO: 22502 - protein, 463 aa, Artificial Sequence
  Synthetic polypeptide
GQVWWLVRVIPELWEAKAGGLPEPGLKEVVESCRGKNLFFSTNIDDAIKEADLVFISVNTPTKTYGMGKGRAADLKYIEACARRIVQNSNGYKIVTEKSTVPVRAAESIRRIFDANTKPNLNLQVLSNPEFLAEGTAIKDLKNPDRVLIGGDETPEGQRAVQALCAVYEHWVPREKILTTNTWSSELSKLAANAFLAQRISSINSISALCEATGADVEEVATAIGMDQRIGNKFLKASVGFGGSCFQKDVLNLVYLCEALNLPEVARYWQQVIDMNDYQRRRFASRIIDSLFNTVTDKKIAILGFAFKKDTGDTRESSSIYISKYLMDEGAHLHIYDPKVPREQIVVDLSHPGVSEDDQVSRLVTISKDPYEACDGAHAVVICTEWDMFKELDYERIHKKMLKPAFIFDGRRVLDGLHNELQTIGFQIETIGKKVSSKRIPYAPSGEIPKFSLQDPPNKKPKV

SEQ ID NO: 22503 - protein, 463 aa, Artificial Sequence; identical to SEQ ID NO: 22502
  Synthetic polypeptide

SEQ ID NO: 22504 - protein, 16 aa, Artificial Sequence
  Synthetic polypeptide
SQNFGRPRQVDYLSQD

SEQ ID NO: 22505 - protein, 16 aa, Artificial Sequence
  Synthetic polypeptide
SQNFGRPRQVDYLSQD

SEQ ID NO: 22506 - protein, 16 aa, Artificial Sequence
  Synthetic polypeptide
SQNFGRPRQVDYLSQD

SEQ ID NO: 22507 - protein, 16 aa, Artificial Sequence
  Synthetic polypeptide
SQNFGRPRQVDYLSQD

SEQ ID NO: 22508 - protein, 16 aa, Artificial Sequence
  Synthetic polypeptide
SQNFGRPRQVDYLSQD

SEQ ID NO: 22509 - protein, 16 aa, Artificial Sequence
  Synthetic polypeptide
SQNFGRPRQVDYLSQD

SEQ ID NO: 22510 - protein, 16 aa, Artificial Sequence
  Synthetic polypeptide
SQNFGRPRQVDYLSQD

SEQ ID NO: 22511 - protein, 396 aa, Artificial Sequence
  Synthetic polypeptide
GQVWWLVRVIPELWEAKAGGLPEPGLKEVVESCRGKNLFFSTNIDDAIKEADLVFISVLSNPEFLAEGTAIKDLKNPDRVLIGGDETPEGQRAVQALCAVYEHWVPREKILTTNTWSSELSKLAANAFLAQRISSINSISALCEATGADVEEVATAIGMDQRIGNKFLKASVGFGGSCFQKDVLNLVYLCEALNLPEVARYWQQVIDMNDYQRRRFASRIIDSLFNTVTDKKIAILGFAFKKDTGDTRESSSIYISKYLMDEGAHLHIYDPKVPREQIVVDLSHPGVSEDDQVSRLVTISKDPYEACDGAHAVVICTEWDMFKELDYERIHKKMLKPAFIFDGRRVLDGLHNELQTIGFQIETIGKKVSSKRIPYAPSGEIPKFSLQDPPNKKPKV

SEQ ID NO: 22512 - protein, 137 aa, Artificial Sequence
  Synthetic polypeptide
GQVWWLVRVIPELWEAKAGGLPEPGLKEVVESCRGKNLFFSTNIDDAIKEADLVFISVNTPTKTYGMGKGRAADLKYIEACARRIVQNSNGYKIVTEKSTVPVRAAESIRRIFDANTKPNLNLQVLSNPEFLAEGTA

SEQ ID NO: 22513 - protein, 122 aa, Artificial Sequence
  Synthetic polypeptide
GQVWWLVRVIPELWEAKAGGLPEPGLKEVVESCRGKNLFFSTNIDDAIKEADLVFISVNTPTKTYGMGKGRAADLKYIEACARRIVQNSNGYKIVTEKSTVPVRAAESIRRIFDANTKPNLN

SEQ ID NO: 22514 - protein, 99 aa, Artificial Sequence
  Synthetic polypeptide
GQVWWLVRVIPELWEAKAGGLPEPGLKEVVESCRGKNLFFSTNIDDAIKEADLVFISVNTPTKTYGMGKGRAADLKYIEACARRIVQNSNGYKIVTEKS

SEQ ID NO: 22515 - protein, 53 aa, Artificial Sequence
  Synthetic polypeptide
GQVWWLVRVIPELWEAKAGGLPEPGLKEVVESCRGKNLFFSTNIDDAIKEADL

SEQ ID NO: 22516 - protein, 163 aa, Artificial Sequence
  Synthetic polypeptide
QNGTLRRDFNHINVELSLLGKKKKRLRVDKWWGNRKELATVRTICSHVQNMIKGVTLGFRYKMRSVYAHFPINVVIQENGSLVEIRNFLGEKYIRRVRMRPGVACSVSQAQKDELILEGNDIELVSNSAALIQQATTVKNKDIRKFLDGIYVSEKGTVQQADE

SEQ ID NO: 22517 - protein, 163 aa, Artificial Sequence; identical to SEQ ID NO: 22516
  Synthetic polypeptide

SEQ ID NO: 22518 - protein, 163 aa, Artificial Sequence; identical to SEQ ID NO: 22516
  Synthetic polypeptide

SEQ ID NO: 22519 - protein, 16 aa, Artificial Sequence
  Synthetic polypeptide
NGNRMEPCGGTSITSM

SEQ ID NO: 22520 - protein, 16 aa, Artificial Sequence
  Synthetic polypeptide
NGNRMEPCGGTSITSM

SEQ ID NO: 22521 - protein, 16 aa, Artificial Sequence
  Synthetic polypeptide
NGNRMEPCGGTSITSM

SEQ ID NO: 22522 - protein, 16 aa, Artificial Sequence
  Synthetic polypeptide
NGNRMEPCGGTSITSM

SEQ ID NO: 22523 - protein, 16 aa, Artificial Sequence
  Synthetic polypeptide
NGNRMEPCGGTSITSM

SEQ ID NO: 22524 - protein, 41 aa, Artificial Sequence
  Synthetic polypeptide
MCTRMWNTLTKMVTEWNPAEGLQSHQCRTQPSWKEKKEAPG

SEQ ID NO: 22525 - protein, 41 aa, Artificial Sequence; identical to SEQ ID NO: 22524
  Synthetic polypeptide

SEQ ID NO: 22526 - protein, 41 aa, Artificial Sequence; identical to SEQ ID NO: 22524
  Synthetic polypeptide

SEQ ID NO: 22527 - protein, 41 aa, Artificial Sequence; identical to SEQ ID NO: 22524
  Synthetic polypeptide

SEQ ID NO: 22528 - protein, 41 aa, Artificial Sequence; identical to SEQ ID NO: 22524
  Synthetic polypeptide

SEQ ID NO: 22529 - protein, 152 aa, Artificial Sequence
  Synthetic polypeptide
QNGTLRRDFNHINVELSLLGKKKKRLRVDKWWGNRKELATVRTICSHVQNMIKGVTLGFRYKMRSVYAHFPINVVIQENGSLVEIRNFLGEKYIRRVRMRPVSQAQKDELILEGNDIELVSNSAALIQQATTVKNKDIRKFLDGIYVSEKGT

SEQ ID NO: 22530 - protein, 137 aa, Artificial Sequence
  Synthetic polypeptide
QNGTLRRDFNHINVELSLLGKKKKRLRVDKWWGNRKELATVRTICSHVQNMIKGVTLGFRYKMRSVYAHFPINVVIQENGSLVEIRNFLGEKYIRRVRMRPGVACSVSQAQKDELILEGNDIELVSNSAALIQQATT

SEQ ID NO: 22531 - protein, 29 aa, Artificial Sequence
  Synthetic polypeptide
GGGGGGRGGGGGGGRSGGGGGGRAKIKLK

SEQ ID NO: 22532 - protein, 29 aa, Artificial Sequence
  Synthetic polypeptide
GGGGGGRGGGGGGGRSGGGGGGRAKIKLK

SEQ ID NO: 22533 - protein, 29 aa, Artificial Sequence
  Synthetic polypeptide
GGGGGGRGGGGGGGRSGGGGGGRAKIKLK

SEQ ID NO: 22534 - protein, 29 aa, Artificial Sequence
  Synthetic polypeptide
GGGGGGRGGGGGGGRSGGGGGGRAKIKLK

SEQ ID NO: 22535 - protein, 27 aa, Artificial Sequence
  Synthetic polypeptide
EEAVEEEVAAVAVVVAVAEEADEQKSN

SEQ ID NO: 22536 - protein, 27 aa, Artificial Sequence
  Synthetic polypeptide
EEAVEEEVAAVAVVVAVAEEADEQKSN

SEQ ID NO: 22537 - protein, 27 aa, Artificial Sequence
  Synthetic polypeptide
EEAVEEEVAAVAVVVAVAEEADEQKSN

SEQ ID NO: 22538 - protein, 27 aa, Artificial Sequence
  Synthetic polypeptide
EEAVEEEVAAVAVVVAVAEEADEQKSN

SEQ ID NO: 22539 - protein, 185 aa, Artificial Sequence
  Synthetic polypeptide
RWRRRRTSKNQIKVDLVDENFTELRGEIAGPPDTPYEGGRYQLEIKIPETYPFNPPKVRFITKIWHPNISSVTGAICLDILKDQWAAAMTLRTVLLSLQALLAAAEPDDPQDAVVANQYKQNPEMFKQTARLWAHVYAGAPVSSPEYTKKIENLCAMGFDRNAVIVALSSKSWDVETATELLLSN

SEQ ID NO: 22540 - protein, 108 aa, Artificial Sequence
  Synthetic polypeptide
RWRRRRTSKNQIKVDLVDENFTELRGEIAGPPDTPYEGGRYQLEIKIPETYPFNPPKYKQNPEMFKQTARLWAHVYAGAPVSSPEYTKKIENLCAMGFDRNAVIVALS

SEQ ID NO: 22541 - protein, 124 aa, Artificial Sequence
  Synthetic polypeptide
RWRRRRTSKNQIKVDLVDENFTELRGEIAGPPDTPYEGGRYQLEIKIPETYPFNPPKYKQNPEMFKQTARLWAHVYAGAPVSSPEYTKKIENLCAMGFDRNAVIVALSSKSWDVETATELLLSN

SEQ ID NO: 22542 - protein, 142 aa, Artificial Sequence
  Synthetic polypeptide
RWRRRRTSKNQIKVDLVDENFTELRGEIAGPPDTPYEGGRYQLEIKIPETYPFNPPKVRFITKIWHPNISSVTGAICLDILKDQWAAAMTLRTVLLSLQALLAAAEPDDPQDAVVANQNAVIVALSSKSWDVETATELLLSN

SEQ ID NO: 22543 - protein, 37 aa, Artificial Sequence
  Synthetic polypeptide
GGGGGGRGGGGGGGRSGGGGGGRKIPTRDKNTRNIPI

SEQ ID NO: 22544 - protein, 37 aa, Artificial Sequence; identical to SEQ ID NO: 22543
  Synthetic polypeptide

SEQ ID NO: 22545 - protein, 37 aa, Artificial Sequence; identical to SEQ ID NO: 22543
  Synthetic polypeptide

SEQ ID NO: 22546 - protein, 37 aa, Artificial Sequence; identical to SEQ ID NO: 22543
  Synthetic polypeptide

SEQ ID NO: 22547 - protein, 169 aa, Artificial Sequence
  Synthetic polypeptide
EEAVEEEVAAVAVVVAVAEEAGGRYQLEIKIPETYPFNPPKVRFITKIWHPNISSVTGAICLDILKDQWAAAMTLRTVLLSLQALLAAAEPDDPQDAVVANQYKQNPEMFKQTARLWAHVYAGAPVSSPEYTKKIENLCAMGFDRNAVIVALSSKSWDVETATELLLSN

SEQ ID NO: 22548 - protein, 11 aa, Artificial Sequence
  Synthetic polypeptide
RWRRRREEDTN

SEQ ID NO: 22549 - protein, 11 aa, Artificial Sequence
  Synthetic polypeptide
RWRRRREEDTN

SEQ ID NO: 22550 - protein, 11 aa, Artificial Sequence
  Synthetic polypeptide
RWRRRREEDTN

SEQ ID NO: 22551 - protein, 11 aa, Artificial Sequence
  Synthetic polypeptide
RWRRRREEDTN

SEQ ID NO: 22552 - protein, 92 aa, Artificial Sequence
  Synthetic polypeptide
EEAVEEEVAAVAVVVAVAEEAGGRYQLEIKIPETYPFNPPKYKQNPEMFKQTARLWAHVYAGAPVSSPEYTKKIENLCAMGFDRNAVIVALS

SEQ ID NO: 22553 - protein, 108 aa, Artificial Sequence
  Synthetic polypeptide
EEAVEEEVAAVAVVVAVAEEAGGRYQLEIKIPETYPFNPPKYKQNPEMFKQTARLWAHVYAGAPVSSPEYTKKIENLCAMGFDRNAVIVALSSKSWDVETATELLLSN

SEQ ID NO: 22554 - protein, 126 aa, Artificial Sequence
  Synthetic polypeptide
EEAVEEEVAAVAVVVAVAEEAGGRYQLEIKIPETYPFNPPKVRFITKIWHPNISSVTGAICLDILKDQWAAAMTLRTVLLSLQALLAAAEPDDPQDAVVANQNAVIVALSSKSWDVETATELLLSN

SEQ ID NO: 22555 - protein, 1312 aa, Artificial Sequence
  Synthetic polypeptide
VTFKTHPPRPVKPSDNCSLDQMVVKTFMDMDQDSEDEKQQYLPLALHLASEFFLRNPNKDVRLLVACCLADIFRIYAPEAPYTSHDKLKDIFLFITRQLKGLEDTKSPQFNRYFYLLENLAWVKSYNICFELEDCNEIFIQLFRTLFSVINNSHNKKVQMHMLDLMSSIIMEGDGVTQELLDSILINLIPAHKNLNKQSFDLAKVLLKRTVQTIEACIANFFNQVLVLGRSSVSDLSEHVFDLIQELFAIDPHLLLSVMPQLEFKLKSNDGEERLAVVRLLAKLFGSKDSDLATQNRPLWQCFLGRFNDIHVPVRLESVKFASHCLMNHPDLAKDLTEYLKVRSHDPEEAIRHDVIVTIITAAKRDLALVNDQLLGFVRERTLDKRWRVRKEAMMGLAQLYKKYCLHGEAGKEAAEKVSWIKDKLLHIYYQNSIDDKLLVEKIFAQYLVPHNLETEERMKCLYYLYASLDPNAVKALNEMWKCQNMLRSHVRELLDLHKQPTSEANCSAMFGKLMTIAKNLPDPGKAQDFVKKFNQVLGDDEKLRSQLELLISPTCSCKQADICVREIARKLANPKQPTNPFLEMVKFLLERIAPVHIDSEAISALVKLMNKSIEGTADDEEEGVSPDTAIRSGLELLKVLSFTHPTSFHSAETYESLLQCLRMEDDKVAEAAIQIFRNTGHKIETDLPQIRSTLIPILHQKAKRGTPHQAKQAVHCIHAIFTNKEVQLAQIFEPLSRSLNADVPEQLITPLVSLGHISMLAPDQFASPMKSVVANFIVKDLLMNDRSTGEKNGKLWSPDEEVSPEVLAKVQAIKLLVRWLLGMKNNQSKSANSTLRLLSAMLVSEGDLTEQKRISKSDMSRLRLAAGSAIMKLAQEPCYHEIITPEQFQLCALVINDECYQVRQIFAQKLHKALVKLLLPLEYMAIFALCAKDPVKERRAHARQCLLKNISIRREYIKQNPMATEKLLSLLPEYVVPYMIHLLAHDPDFTRSQDVDQLRDIKECLWFMLEVLMTKNENNSHAFMKKMAENIKLTRDAQSPDESKTNEKLYTVCDVALCVINSKSALCNADSPKDPVLPMKFFTQPEKDFCNDKSYISEETRVLLLTGKPKPAGVLGAVNKPLSATGRKPYVRSTGTETGSNINVNSELNPSTGNRSREQSSEAAETGVSENEENPVRIISVTPVKNIDPVKNKEINSDQATQGNISSDRGKKRTVTAAGAENIQQKTDEKVDESGPPAPSKPRRGRRPKSESQGNATKNDDLNKPINKGRKRAAVGQESPGGLEAGNAKAPKLQDLAKKAAPAERQIDLQR

SEQ ID NO: 22556 - protein, 27 aa, Artificial Sequence
  Synthetic polypeptide
NRKNELPSKHTLHAQSSLQITAALTRW

SEQ ID NO: 22557 - protein, 27 aa, Artificial Sequence
  Synthetic polypeptide
NRKNELPSKHTLHAQSSLQITAALTRW

SEQ ID NO: 22558 - protein, 16 aa, Artificial Sequence
  Synthetic polypeptide
PDGSENLYGYGSGLRR

SEQ ID NO: 22559 - protein, 16 aa, Artificial Sequence
  Synthetic polypeptide
PDGSENLYGYGSGLRR

SEQ ID NO: 22560 - protein, 575 aa, Artificial Sequence
  Synthetic polypeptide
VTFKTHPPRPVKPSDNCSLDQMVVKTFMDMDQDSEDEKQQYLPLALHLASEFFLRNPNKDVRLLVACCLADIFRIYAPEAPYTSHDKLKDIFLFITRQLKGLEDTKSPQFNRYFYLLENLAWVKSYNICFELEDCNEIFIQLFRTLFSVINNSHNKKVQMHMLDLMSSIIMEGDGVTQELLDSILINLIPAHKNLNKQSFDLAKVLLKRTVQTIEACIANFFNQVLVLGRSSVSDLSEHVFDLIQELFAIDPHLLLSVMPQLEFKLKSNDGEERLAVVRLLAKLFGSKDSDLATQNRPLWQCFLGRFNDIHVPVRLESVKFASHCLMNHPDLAKDLTEYLKVRSHDPEEAIRHDVIVTIITAAKRDLALVNDQLLGFVRERTLDKRWRVRKEAMMGLAQLYKKYCLHGEAGKEAAEKVSWIKDKLLHIYYQNSIDDKLLVEKIFAQYLVPHNLETEERMKCLYYLYASLDPNAVKALNEMWKCQNMLRSHVRELLDLHKQPTSEANCSAMFGKLMTIAKNLPDPGKAQDFVKKFNQVLGDDEKLRSQLELLISPTCSCKQADICVVSKSYFTLFL

SEQ ID NO: 22561 - protein, 10 aa, Artificial Sequence
  Synthetic polypeptide
CTPWHMVNTT

SEQ ID NO: 22562 - protein, 8 aa, Artificial Sequence
  Synthetic polypeptide
LSAHPGIW

SEQ ID NO: 22563 - protein, 187 aa, Artificial Sequence
  Synthetic polypeptide
LVHTLAYGKYYIATMALITASTALTIMVMNIHFCGAEARPVPHWARVVILKYMSRVLFVYDVGESCLSPHHSRERDHLTKVYSKLPESNLKAARNKDLSRKKDMNKRLKNDLGCQGKNPQEAESYCAQYKVLTRNIEYIAKCLKDHKATNSKGSEWKKVAKVIDRFFMWIFFIMVFVMTILIIARAD

SEQ ID NO: 22564 - protein, 121 aa, Artificial Sequence
  Synthetic polypeptide
RPVYPHDGISCSNLKEQEKILAETQPELGTWGDGKGEDELSPEEIQMFEQENQRLIGEMNSLFDEVRQIEGRVVEISRLQEIFTEKVLQQEAEIDSIHQLVVGATENIKEGNEDIREVPHL

SEQ ID NO: 22565 - protein, 40 aa, Artificial Sequence
  Synthetic polypeptide
KNKKKFWLKHNLNWERGEMAKAKMSYPQKKYKCLNRKISD

SEQ ID NO: 22566 - protein, 40 aa, Artificial Sequence; identical to SEQ ID NO: 22565
  Synthetic polypeptide

SEQ ID NO: 22567 - protein, 40 aa, Artificial Sequence; identical to SEQ ID NO: 22565
  Synthetic polypeptide

SEQ ID NO: 22568 - protein, 40 aa, Artificial Sequence; identical to SEQ ID NO: 22565
  Synthetic polypeptide

SEQ ID NO: 22569 - protein, 25 aa, Artificial Sequence
  Synthetic polypeptide
LWLKTSVSSRWNIMQQFKRTRKNFG

SEQ ID NO: 22570 - protein, 25 aa, Artificial Sequence
  Synthetic polypeptide
LWLKTSVSSRWNIMQQFKRTRKNFG

SEQ ID NO: 22571 - protein, 25 aa, Artificial Sequence
  Synthetic polypeptide
LWLKTSVSSRWNIMQQFKRTRKNFG

SEQ ID NO: 22572 - protein, 25 aa, Artificial Sequence
  Synthetic polypeptide
LWLKTSVSSRWNIMQQFKRTRKNFG

SEQ ID NO: 22573 - protein, 25 aa, Artificial Sequence
  Synthetic polypeptide
LWLKTSVSSRWNIMQQFKRTRKNFG

SEQ ID NO: 22574 - protein, 148 aa, Artificial Sequence
  Synthetic polypeptide
RPVYPHDGISCSNLKEQEKILAETQPELGTWGDGKGEDELSPEEIQMFEQENQRLIGEMNSLFDEVRQIEGRVVEISRLQEIFTEKVLQQEAEIDSIHQLVVGATENIKEGNEDIREAIKNNAGFRVWILFFLVMCSFSLLFLDWYDS

SEQ ID NO: 22575 - protein, 54 aa, Artificial Sequence
  Synthetic polypeptide
RPVYPHDGISCSNLKEQEKILAETQPELGTWGDGKGEDELSPEEIQMANRRESG

SEQ ID NO: 22576 - protein, 40 aa, Artificial Sequence
  Synthetic polypeptide
KNKKKFWLKHNLNWERGEMAKAKMSYPQKKYKWQIEGRVV

SEQ ID NO: 22577 - protein, 67 aa, Artificial Sequence
  Synthetic polypeptide
RPVYPHDGISCSNLKEQEKILAETQPELGTWGDGKGEDELSPEEIQMFEQENQRLIGEMNSLFDEVR

SEQ ID NO: 22578 - protein, 63 aa, Artificial Sequence
  Synthetic polypeptide
RPVYPHDGISCSNLKEQEKILAETQPELGTWGDGKGEDELSPEEIQMFEQENQRLIGEMNSLF

SEQ ID NO: 22579 - protein, 285 aa, Artificial Sequence
  Synthetic polypeptide
DRARWLTPIMPALWEAEAGGSRGPEIGTILANMISHIGKLRDFLLEHRKDYINAYSHTMSEYGRMTDTERDQIDQDAQIFMRTCSEAIQQLRTEAHKEIHSQQVKEHRTAVLDFIEDYLKRVCKLYSEQRAIRVKRVVDKKRLSKLEPEPNTKTRESTSSEKVSQSPSKDSEENPATEERPEKILAETQPELGTWGDGKGEDELSPEEIQMFEQENQRLIGEMNSLFDEVRQIEGRVVEISRLQEIFTEKVLQQEAEIDSIHQLVVGATENIKEGNEDIREVPHL

SEQ ID NO: 22580 - protein, 20 aa, Artificial Sequence
  Synthetic polypeptide
HDFSHWQTERFSSGTQERLY

SEQ ID NO: 22581 - protein, 20 aa, Artificial Sequence
  Synthetic polypeptide
HDFSHWQTERFSSGTQERLY

SEQ ID NO: 22582 - protein, 312 aa, Artificial Sequence
  Synthetic polypeptide
DRARWLTPIMPALWEAEAGGSRGPEIGTILANMISHIGKLRDFLLEHRKDYINAYSHTMSEYGRMTDTERDQIDQDAQIFMRTCSEAIQQLRTEAHKEIHSQQVKEHRTAVLDFIEDYLKRVCKLYSEQRAIRVKRVVDKKRLSKLEPEPNTKTRESTSSEKVSQSPSKDSEENPATEERPEKILAETQPELGTWGDGKGEDELSPEEIQMFEQENQRLIGEMNSLFDEVRQIEGRVVEISRLQEIFTEKVLQQEAEIDSIHQLVVGATENIKEGNEDIREAIKNNAGFRVWILFFLVMCSFSLLFLDWYDS

SEQ ID NO: 22583 - protein, 40 aa, Artificial Sequence
  Synthetic polypeptide
SHPPCYPQFNFPVSVTHGQLWFEFYPLTSSQKERFLTLAN

SEQ ID NO: 22584 - protein, 40 aa, Artificial Sequence; identical to SEQ ID NO: 22583
  Synthetic polypeptide

SEQ ID NO: 22585 - protein, 54 aa, Artificial Sequence
  Synthetic polypeptide
NSPIPHVIHSLIFQFQLLMVNCGSNFILSLHHKKKDFSHWQTERFSSGTQERLY

SEQ ID NO: 22586 - protein, 54 aa, Artificial Sequence; identical to SEQ ID NO: 22585
  Synthetic polypeptide

SEQ ID NO: 22587 - protein, 276 aa, Artificial Sequence
  Synthetic polypeptide
FSSFSYSWSTVVRILSSHFITKRKISHIGKLRDFLLEHRKDYINAYSHTMSEYGRMTDTERDQIDQDAQIFMRTCSEAIQQLRTEAHKEIHSQQVKEHRTAVLDFIEDYLKRVCKLYSEQRAIRVKRVVDKKRLSKLEPEPNTKTRESTSSEKVSQSPSKDSEENPATEERPEKILAETQPELGTWGDGKGEDELSPEEIQMFEQENQRLIGEMNSLFDEVRQIEGRVVEISRLQEIFTEKVLQQEAEIDSIHQLVVGATENIKEGNEDIREVPHL

SEQ ID NO: 22588 - protein, 303 aa, Artificial Sequence
  Synthetic polypeptide
FSSFSYSWSTVVRILSSHFITKRKISHIGKLRDFLLEHRKDYINAYSHTMSEYGRMTDTERDQIDQDAQIFMRTCSEAIQQLRTEAHKEIHSQQVKEHRTAVLDFIEDYLKRVCKLYSEQRAIRVKRVVDKKRLSKLEPEPNTKTRESTSSEKVSQSPSKDSEENPATEERPEKILAETQPELGTWGDGKGEDELSPEEIQMFEQENQRLIGEMNSLFDEVRQIEGRVVEISRLQEIFTEKVLQQEAEIDSIHQLVVGATENIKEGNEDIREAIKNNAGFRVWILFFLVMCSFSLLFLDWYDS

SEQ ID NO: 22589 - protein, 36 aa, Artificial Sequence
  Synthetic polypeptide
LTPAIPELWEAVDHMKLRVQDQPGQHNLDSLAGHHW

SEQ ID NO: 22590 - protein, 184 aa, Artificial Sequence
  Synthetic polypeptide
EFKTSLGNITWIHLLVIIGSILSYFLFAIVFGAMCVTCNPPSNPYWIMQEHMLDPVFYLVCILTTSIALLPRFVYRVLQGSLFPSPILRAKHFDRLTPEERTKALKKWRGAGKMNQVTSKYANQSAGKSGRRPMPGPSAVFAMKSASSCAIEQGNLSLCETALDQGYSETKAFEMAGPSKGKES

SEQ ID NO: 22591 - protein, 115 aa, Artificial Sequence
  Synthetic polypeptide
EHSRRDNDQDINPGIRASNGNPLWVPSLCTGALFSLCFTLLNLATALFWSMFVTARAELSLAVHHCPPLSFAAIADLLLTSIPLDPARYETIHEEQYYQYTAVFCNHAQCDCTRY

SEQ ID NO: 22592 - protein, 699 aa, Artificial Sequence
  Synthetic polypeptide
LPSLWIRQDMKLSMKNNIINTQQSFVTMPNVIVPDIEKEIRRMENGACSSFSEDDDSASTSEESENENPHARGSFSYKSLRKGGPSQREQYLPGAIALFNVNNSSNKDQEPEEKKKKKKEKKSKSDDKNENKNDPEKKKKKKDKEKKKKEEKSKDKKEEEKKEVVVIDPSGNTYYNWLFCITLPVMYNWTMVIARACFDELQSDYLEYWLILDYVSDIVYLIDMFVRTRTGYLEQGLLVKEELKLINKYKSNLQFKLDVLSLIPTDLLYFKLGWNYPEIRLNRLLRFSRMFEFFQRTETRTNYPNIFRISNLVMYIVIIIHWNACVFYSISKAIGFGNDTWVYPDINDPEFGRLARKYVYSLYWSTLTLTTIGETPPPVRDSEYVFVVVDFLIGVLIFATIVGNIGSMISNMNAARAEFQARIDAIKQYMHFRNVSKDMEKRVIKWFDYLWTNKKTVDEKEVLKYLPDKLRAEIAINVHLDTLKKVRIFADCEAGLLVELVLKLQPQVYSPGDYICKKGDIGREMYIIKEGKLAVVADDGVTQFVVLSDGSYFGEISILNIKGSKAGNRRTANIKSIGYSDLFCLSKDDLMEALTEYPDAKTMLEEKGKQILMKDGLLDLNIANAGSDPKDLEEKVTRMEGSVDLLQTRFARILAEYESMQQKLKQRLTKVEKFLKPLIDTEFSSIEGPGAESGPIDST

SEQ ID NO: 22593 - protein, 31 aa, Artificial Sequence
  Synthetic polypeptide
AFACRPPLPTTVVCCHRRPAADFHPSGSGKI

SEQ ID NO: 22594 - protein, 59 aa, Artificial Sequence
  Synthetic polypeptide
FLHLQKVDRNFSPAGLQWELEKIYFKCLARCPAPRHLAALNIWAAEPPSLHPPQTQDEP

SEQ ID NO: 22595 - protein, 182 aa, Artificial Sequence
  Synthetic polypeptide
TGTSPLRGCNGNWRKYISSALRDARHRGTWRHSISGRLSPPACTLRKHKTNRKPRTPFTTAQLLALERKFRQKQYLSIAERAEFSSSLSLTETQVKIWFQNRRAKAKRLQEAELEKLKMAAKPMLPPAAFGLSFPLGGPAAVAAAAGASLYGASGPFQRAALPVAPVGLYTAHVGYSMYHLT

SEQ ID NO: 22596 - protein, 49 aa, Artificial Sequence
  Synthetic polypeptide
PGILVSSFAKSRQELLPCGVAMGIGENIFQVPCAMPGTEALGGTQYLGG

SEQ ID NO: 22597 - protein, 47 aa, Artificial Sequence
  Synthetic polypeptide
PSLHASSVLLDFSASRTVIWQLILDLDHCPKLHLLVSWDLALERYHT

SEQ ID NO: 22598 - protein, 42 aa, Artificial Sequence
  Synthetic polypeptide
KGCVQPLLLLSVSCTSLPWDNPHYMPALCSWTSQPPELLFGS

SEQ ID NO: 22599 - protein, 42 aa, Artificial Sequence; identical to SEQ ID NO: 22598
  Synthetic polypeptide

SEQ ID NO: 22600 - protein, 42 aa, Artificial Sequence; identical to SEQ ID NO: 22598
  Synthetic polypeptide

SEQ ID NO: 22601 - protein, 123 aa, Artificial Sequence
  Synthetic polypeptide
VPYKKDVFSLSSCSLFHALPCHGITLTTCQLCALGLLSLQNCYLAANSRFGSLPKVALAGLLGFGLGKVSYIGVCQSKFHFFEDQLRGAGFGPQHNRHCLLTCEECKIKHGLSEKGDSQPSAS

SEQ ID NO: 22602 - protein, 39 aa, Artificial Sequence
  Synthetic polypeptide
PSLHASSVLLDFSASRTVIWQLILDLDHCPKLHALPPYL

SEQ ID NO: 22603 - protein, 68 aa, Artificial Sequence
  Synthetic polypeptide
VPYKKDVFSLSSCSLFHALPCHGITLTTCQLCALGLLSLQNCYLAANSRFGSLPKVARTASLPVRNAK

SEQ ID NO: 22604 - protein, 33 aa, Artificial Sequence
  Synthetic polypeptide
PSLHASSVLLDFSASRTVIWQLILDLDHCPKLH

SEQ ID NO: 22605 - protein, 57 aa, Artificial Sequence
  Synthetic polypeptide
VPYKKDVFSLSSCSLFHALPCHGITLTTCQLCALGLLSLQNCYLAANSRFGSLPKVA

SEQ ID NO: 22606 - protein, 81 aa, Artificial Sequence
  Synthetic polypeptide
SSVLAWHLIAQTGRMIAEIWDLVPPGIPDLPTFFGGGSEVYLLLKNSFFGSSHSLHQGRQACLLLHRQIAVFSLSPITRNP

SEQ ID NO: 22607 - protein, 81 aa, Artificial Sequence; identical to SEQ ID NO: 22606
  Synthetic polypeptide

SEQ ID NO: 22608 - protein, 81 aa, Artificial Sequence; identical to SEQ ID NO: 22606
  Synthetic polypeptide

SEQ ID NO: 22609 - protein, 32 aa, Artificial Sequence
  Synthetic polypeptide
APSLGTLNIQGCGHRILSRRVEMPGPCPAEFV

SEQ ID NO: 22610 - protein, 32 aa, Artificial Sequence; identical to SEQ ID NO: 22609
  Synthetic polypeptide

SEQ ID NO: 22611 - protein, 32 aa, Artificial Sequence; identical to SEQ ID NO: 22609
  Synthetic polypeptide

SEQ ID NO: 22612 - protein, 50 aa, Artificial Sequence
  Synthetic polypeptide
KRRVFLHKLSLPAAIHVRCDLLLLAFCQDCEASPAMWNSKFQWSCKEVHA

SEQ ID NO: 22613 - protein, 50 aa, Artificial Sequence; identical to SEQ ID NO: 22612
  Synthetic polypeptide

SEQ ID NO: 22614 - protein, 50 aa, Artificial Sequence; identical to SEQ ID NO: 22612
  Synthetic polypeptide

SEQ ID NO: 22615 - protein, 328 aa, Artificial Sequence
  Synthetic polypeptide
DVTCSSLPSARIVRHPQPCGTQSSNGPVKKSMREKAVERRSVNKEHNSNFKAGYIPIDEDRLHKTGLRGRKGNLAICVIILLFILAVINLIITLVIWAVIRIGPNGCDSMEFHESGLLRFKQVSDMGVIHPLYKSTVGGRRNENLVITGNNQPIVFQQGTTKLSVENNKTSITSDIGMQFFDPRTQNILFSTDYETHEFHLPSGVKSLNVQKASTERITSNATSDLNIKVDGRAIVRGNEGVFIMGKTIEFHMGGNMELKAENSIILNGSVMVSTTRLPSSSSGDQLGSGDWVRYKLCMCADGTLFKVQVTSQNMGCQISDNPCGNTH

SEQ ID NO: 22616 - protein, 14 aa, Artificial Sequence
  Synthetic polypeptide
GIPSHVELKVPMVL

SEQ ID NO: 22617 - protein, 14 aa, Artificial Sequence
  Synthetic polypeptide
GIPSHVELKVPMVL

SEQ ID NO: 22618 - protein, 14 aa, Artificial Sequence
  Synthetic polypeptide
GIPSHVELKVPMVL

SEQ ID NO: 22619 - protein, 114 aa, Artificial Sequence
  Synthetic polypeptide
DVTCSSLPSARIVRHPQPCGTQSSNGPVKKSMREKAVERRSVNKEHNSNFKAGYIPIDEDRLHKTGLRGRKGNLAICVIILLFILAVINLILPGSQARDRRAFSGIPDAYRKKI

SEQ ID NO: 22620 - protein, 114 aa, Artificial Sequence; identical to SEQ ID NO: 22619
  Synthetic polypeptide

SEQ ID NO: 22621 - protein, 13 aa, Artificial Sequence
  Synthetic polypeptide
AMMVPLHTSLDLD

SEQ ID NO: 22622 - protein, 13 aa, Artificial Sequence
  Synthetic polypeptide
AMMVPLHTSLDLD

SEQ ID NO: 22623 - protein, 13 aa, Artificial Sequence
  Synthetic polypeptide
AMMVPLHTSLDLD

SEQ ID NO: 22624 - protein, 144 aa, Artificial Sequence
  Synthetic polypeptide
AEEFKAAVSYDGATAHQPRFGLSNKFESEFPSSLTGKVAPEEFKASINRVNSCLKKNLPVNVRWLLCGCLCCCCTLGCSMWPVICLSKRTRRSIEKLLEWENNRLYHKLCLHWRLSKRKCETNNMMEYVILIEFLPKTPIFRPD

SEQ ID NO: 22625 - protein, 125 aa, Artificial Sequence
  Synthetic polypeptide
AEEFKAAVSYDGATAHQPRFGLSNKFESEFPSSLTGKVAPEEFKASINRVNSCLKKNLPVNVRWLLCGCLCCCCTLGCSMWPVICLSKRLCLHWRLSKRKCETNNMMEYVILIEFLPKTPIFRPD

SEQ ID NO: 22626 - protein, 116 aa, Artificial Sequence
  Synthetic polypeptide
AEEFKAAVSYDGATAHQPRFGLSNKFESEFPSSLTGKVAPEEFKASINRVNSCLKKNLPVNTRRSIEKLLEWENNRLYHKLCLHWRLSKRKCETNNMMEYVILIEFLPKTPIFRPD

SEQ ID NO: 22627 - protein, 42 aa, Artificial Sequence
  Synthetic polypeptide
GGPGGVSQSYGDFPSGVPGLRLSSHRAEPNPLPAFITLYPSK

SEQ ID NO: 22628 - protein, 131 aa, Artificial Sequence
  Synthetic polypeptide
GDQGEFPRAMGTSHPAFLVLGCLLTGLSLILCQLSLPSILPNENEKVVQLNSSFSLRCFGESEVSWQYPMSEEESSDVEIRNEENNSGLFVTVLEVSSASAAHTGLYTCYYNHTQTEENELEGRHIYIYVP

SEQ ID NO: 22629 - protein, 19 aa, Artificial Sequence
  Synthetic polypeptide
GTRGSFPELWGLPIRRSWS

SEQ ID NO: 22630 - protein, 21 aa, Artificial Sequence
  Synthetic polypeptide
FLHFHLSFPELWGLPIRRSWS

SEQ ID NO: 22631 - protein, 151 aa, Artificial Sequence
  Synthetic polypeptide
IGTAPVYSSQHQRCRRWVISAFPSEFPRAMGTSHPAFLVLGCLLTGLSLILCQLSLPSILPNENEKVVQLNSSFSLRCFGESEVSWQYPMSEEESSDVEIRNEENNSGLFVTVLEVSSASAAHTGLYTCYYNHTQTEENELEGRHIYIYVP

SEQ ID NO: 22632 - protein, 257 aa, Artificial Sequence
  Synthetic polypeptide
FHCAPRGSDHNLGYFSHFYIISVLWNGFLLWCLTQSLFLGAPFPSWLHGLLRILGAAQFQGGELALSAFLVLVFLWLHSLRRLFECLYVSVFSNVMIHVVQYCFGLVYYVLVGLTVLSQVPMDGRNAYITGKNLLMQARWFHILGMMMFIWSSAHQYKCHVILGNLRKNKAGVVIHCNHRIPFGDWFEYVSSPNYLAELMIYVSMAVTFGFHNLTWWLVVTNVFFNQALSAFLSHQFYKSKFVSYPKHRKAFLPFLF

SEQ ID NO: 22633 - protein, 69 aa, Artificial Sequence
  Synthetic polypeptide
STVLHEAQTITWDIFPTFISSQCCGMASCFGALLNLCSWEHLFQAGFMVCSEFSGRHSSREGSWHCLHS

SEQ ID NO: 22634 - protein, 146 aa, Artificial Sequence
  Synthetic polypeptide
PGIFFPLLYHLSAVEWLPALVPYSISVPGSTFSKLASWFAQNSRGGTVPGRGAGTVCILSASISVAAQLTKTLRVPLRQCLLQCHDSRRAVLFWTCLLCPCWPNCAEPSANGWQECLHNREKSIDASTVVPYSWDDDVHLVICPSV

SEQ ID NO: 22635 - protein, 146 aa, Artificial Sequence
  Synthetic polypeptide
FHCAPRGSDHNLGYFSHFYIISVLWNGFLLWCLTQSLFLGAPFPSWLHGLLRILGAAQFQGVVIHCNHRIPFGDWFEYVSSPNYLAELMIYVSMAVTFGFHNLTWWLVVTNVFFNQALSAFLSHQFYKSKFVSYPKHRKAFLPFLF

SEQ ID NO: 22636 - protein, 84 aa, Artificial Sequence
  Synthetic polypeptide
STVLHEAQTITWDIFPTFISSQCCGMASCFGALLNLCSWEHLFQAGFMVCSEFSGRHSSREWSFTVTTGSHLETGLNMFLPLTT

SEQ ID NO: 22637 - protein, 55 aa, Artificial Sequence
  Synthetic polypeptide
PGIFFPLLYHLSAVEWLPALVPYSISVPGSTFSKLASWFAQNSRGGTVPGSGHSL

SEQ ID NO: 22638 - protein, 26 aa, Artificial Sequence
  Synthetic polypeptide
GRVWWFMPLIPALQEAEEGSWHCLHS

SEQ ID NO: 22639 - protein, 113 aa, Artificial Sequence
  Synthetic polypeptide
AGCGGSCLSSQHFRRLRRGAGTVCILSASISVAAQLTKTLRVPLRQCLLQCHDSRRAVLFWTCLLCPCWPNCAEPSANGWQECLHNREKSIDASTVVPYSWDDDVHLVICPSV

SEQ ID NO: 22640 - protein, 41 aa, Artificial Sequence
  Synthetic polypeptide
GRVWWFMPLIPALQEAEEWSFTVTTGSHLETGLNMFLPLTT

SEQ ID NO: 22641 - protein, 41 aa, Artificial Sequence; identical to SEQ ID NO: 22640
  Synthetic polypeptide

SEQ ID NO: 22642 - protein, 22 aa, Artificial Sequence
  Synthetic polypeptide
AGCGGSCLSSQHFRRLRSGHSL

SEQ ID NO: 22643 - protein, 22 aa, Artificial Sequence
  Synthetic polypeptide
AGCGGSCLSSQHFRRLRSGHSL

SEQ ID NO: 22644 - protein, 32 aa, Artificial Sequence
  Synthetic polypeptide
ETSNINRKAKNIHELNYIKNKTSFSKGLHGKR

SEQ ID NO: 22645 - protein, 32 aa, Artificial Sequence; identical to SEQ ID NO: 22644
  Synthetic polypeptide

SEQ ID NO: 22646 - protein, 32 aa, Artificial Sequence; identical to SEQ ID NO: 22644
  Synthetic polypeptide

SEQ ID NO: 22647 - protein, 18 aa, Artificial Sequence
  Synthetic polypeptide
ITLKIKLLSAKDYMEKDR

SEQ ID NO: 22648 - protein, 18 aa, Artificial Sequence
  Synthetic polypeptide
ITLKIKLLSAKDYMEKDR

SEQ ID NO: 22649 - protein, 18 aa, Artificial Sequence
  Synthetic polypeptide
ITLKIKLLSAKDYMEKDR

SEQ ID NO: 22650 - protein, 128 aa, Artificial Sequence
  Synthetic polypeptide
NFFQQRTTWKKIDDTCSSFLSIDSQPQASNALEELCFMIMGMLPKPQEQDEKDNTKRFLFHYSKTQKLGKSNVVSSVVHPLLQLVPHLHERRMKRFRVDEEFQSPFASQSRGYFLFRPRNGRRSAGFI

SEQ ID NO: 22651 - protein, 101 aa, Artificial Sequence
  Synthetic polypeptide
NFFQQRTTWKKIDDTCSSFLSIDSQPQASNALEELCFMIMGMLPKPQSSVVHPLLQLVPHLHERRMKRFRVDEEFQSPFASQSRGYFLFRPRNGRRSAGFI

SEQ ID NO: 22652 - protein, 103 aa, Artificial Sequence
  Synthetic polypeptide
NFFQQRTTWKKIDDTCSSFLSIDSQPQASNALEELCFMIMGMLPKPQEQDEKDNTKRFLFHYSKTQKLGKSNVVEEFQSPFASQSRGYFLFRPRNGRRSAGFI

SEQ ID NO: 22653 - protein, 143 aa, Artificial Sequence
  Synthetic polypeptide
LTPVIPALWEAKAGGSRGQKIETILANKHFFEGVEARVAQGIREEEVSYQLAFNKQELRKVIKEYPGKEVKKGLDNLYKKVDKHLCEEENLLQVVWHSMQDEFIRQYKHFEGLIARCYPGSGVTMEFTIQDILDYCSSIAQSH

SEQ ID NO: 22654 - protein, 143 aa, Artificial Sequence; identical to SEQ ID NO: 22653
  Synthetic polypeptide

SEQ ID NO: 22655 - protein, 143 aa, Artificial Sequence; identical to SEQ ID NO: 22653
  Synthetic polypeptide

SEQ ID NO: 22656 - protein, 16 aa, Artificial Sequence
  Synthetic polypeptide
LTSISLKVLKLAWHRA

SEQ ID NO: 22657 - protein, 16 aa, Artificial Sequence
  Synthetic polypeptide
LTSISLKVLKLAWHRA

SEQ ID NO: 22658 - protein, 16 aa, Artificial Sequence
  Synthetic polypeptide
LTSISLKVLKLAWHRA

SEQ ID NO: 22659 - protein, 4 aa, Artificial Sequence
  Synthetic polypeptide
QAFL

SEQ ID NO: 22660 - protein, 4 aa, Artificial Sequence
  Synthetic polypeptide
QAFL

SEQ ID NO: 22661 - protein, 4 aa, Artificial Sequence
  Synthetic polypeptide
QAFL

SEQ ID NO: 22662 - protein, 64 aa, Artificial Sequence
  Synthetic polypeptide
ENRLNLGGRGLGCSTVLSPEGSAQFAAQIFGLSNHLVWSKLRASILNTWISLKQADKKIRECNL

SEQ ID NO: 22663 - protein, 64 aa, Artificial Sequence; identical to SEQ ID NO: 22662
  Synthetic polypeptide

SEQ ID NO: 22664 - protein, 64 aa, Artificial Sequence; identical to SEQ ID NO: 22662
  Synthetic polypeptide

SEQ ID NO: 22665 - protein, 64 aa, Artificial Sequence; identical to SEQ ID NO: 22662
  Synthetic polypeptide

SEQ ID NO: 22666 - protein, 27 aa, Artificial Sequence
  Synthetic polypeptide
TWEAEVLAVQPYFLQKDQLNLLLRYLG

SEQ ID NO: 22667 - protein, 27 aa, Artificial Sequence
  Synthetic polypeptide
TWEAEVLAVQPYFLQKDQLNLLLRYLG

SEQ ID NO: 22668 - protein, 27 aa, Artificial Sequence
  Synthetic polypeptide
TWEAEVLAVQPYFLQKDQLNLLLRYLG

SEQ ID NO: 22669 - protein, 27 aa, Artificial Sequence
  Synthetic polypeptide
TWEAEVLAVQPYFLQKDQLNLLLRYLG

SEQ ID NO: 22670 - protein, 27 aa, Artificial Sequence
  Synthetic polypeptide
TWEAEVLAVQPYFLQKDQLNLLLRYLG

SEQ ID NO: 22671 - protein, 77 aa, Artificial Sequence
  Synthetic polypeptide
KYKNYLGMVVSICNPSYSEAEVGESLEPGRQRSWLFNRTFSRRISSICCSDIWVKQPFGMEQTASKHFEHMDFLEAG

SEQ ID NO: 22672 - protein, 77 aa, Artificial Sequence; identical to SEQ ID NO: 22671
  Synthetic polypeptide

SEQ ID NO: 22673 - protein, 77 aa, Artificial Sequence; identical to SEQ ID NO: 22671
  Synthetic polypeptide

SEQ ID NO: 22674 - protein, 77 aa, Artificial Sequence; identical to SEQ ID NO: 22671
  Synthetic polypeptide

SEQ ID NO: 22675 - protein, 52 aa, Artificial Sequence
  Synthetic polypeptide
ENRLNLGGRGLGCSTVLSPEGSAQFAAQIFGLSNHLVWSKLRASILNTWISL

SEQ ID NO: 22676 - protein, 74 aa, Artificial Sequence
  Synthetic polypeptide
KYKNYLGMVVSICNPSYSEAEVGESLEPGRQRSWLFNRTFSRRISSICCSDIWVKQPFGMEQTASKHFEHMDFL

SEQ ID NO: 22677 - protein, 78 aa, Artificial Sequence
  Synthetic polypeptide
ERAGTMSAETASGPTEDQVEILEYNFNKVDKHPDSTTLCLIAAEAGLSEEETQKWFKQRLAKWRRSEGLPSECRSVTD

SEQ ID NO: 22678 - protein, 78 aa, Artificial Sequence; identical to SEQ ID NO: 22677
  Synthetic polypeptide

SEQ ID NO: 22679 - protein, 99 aa, Artificial Sequence
  Synthetic polypeptide
ERAGTMSAETASGPTEDQVEILEYNFNKVDKHPDSTTLCLIAAEAGLSEEETQGSDLISRSKIWHPESSPQREGYPHDSLPCLAFDYFSLLPPQCKEMV

SEQ ID NO: 22680 - protein, 52 aa, Artificial Sequence
  Synthetic polypeptide
ERAGTMSAETASGPTEDQVEILEYNFNKVDKHPDSTTLCLIAAEAGLSEEET

SEQ ID NO: 22681 - protein, 69 aa, Artificial Sequence
  Synthetic polypeptide
EVRSPSARQPPPLRTRRDHVGGDRERPHRGPGGNPGVQLQQGRQAPGFHHAVPHRGRGRPFRGGDPEMV

SEQ ID NO: 22682 - protein, 69 aa, Artificial Sequence; identical to SEQ ID NO: 22681
  Synthetic polypeptide

SEQ ID NO: 22683 - protein, 105 aa, Artificial Sequence
  Synthetic polypeptide
EVRRPSARQPPRLRSEEPLRPAAAPSENAQGPCRRRPRAAPQRTRWKSWSTTSTRSTSTRIPPRCASSRPRQAFPRRRPRNGLSSAWQSGGAQKACPQSADPSQT

SEQ ID NO: 22684 - protein, 105 aa, Artificial Sequence; identical to SEQ ID NO: 22683
  Synthetic polypeptide

SEQ ID NO: 22685 - protein, 67 aa, Artificial Sequence
  Synthetic polypeptide
EVRSPSARQPPPLRTRRDHVGGDRERPHRGPGGNPGVQLQQGRQAPGFHHAVPHRGRGRPFRGGDPG

SEQ ID NO: 22686 - protein, 83 aa, Artificial Sequence
  Synthetic polypeptide
EVRRPSARQPPRLRSEEPLRPAAAPSENAQGPCRRRPRAAPQRTRWKSWSTTSTRSTSTRIPPRCASSRPRQAFPRRRPRVVI

SEQ ID NO: 22687 - protein, 65 aa, Artificial Sequence
  Synthetic polypeptide
EVRSPSARQPPPLRTRRDHVGGDRERPHRGPGGNPGVQLQQGRQAPGFHHAVPHRGRGRPFRGGD

SEQ ID NO: 22688 - protein, 79 aa, Artificial Sequence
  Synthetic polypeptide
EVRRPSARQPPRLRSEEPLRPAAAPSENAQGPCRRRPRAAPQRTRWKSWSTTSTRSTSTRIPPRCASSRPRQAFPRRRP

SEQ ID NO: 22689 - protein, 78 aa, Artificial Sequence; identical to SEQ ID NO: 22677
  Synthetic polypeptide

SEQ ID NO: 22690 - protein, 78 aa, Artificial Sequence; identical to SEQ ID NO: 22677
  Synthetic polypeptide

SEQ ID NO: 22691 - protein, 127 aa, Artificial Sequence
  Synthetic polypeptide
GASLPGRPLSEMWGAPLPRNPVWEVRSVSARPPRLRSEETLRPATAPSENAQGPCRRRPRAAPQRTRWKSWSTTSTRSTSTRIPPRCASSRPRQAFPRRRPRNGLSSAWQSGGAQKACPQSADPSQT

SEQ ID NO: 22692 - protein, 127 aa, Artificial Sequence; identical to SEQ ID NO: 22691
  Synthetic polypeptide

SEQ ID NO: 22693 - protein, 69 aa, Artificial Sequence
  Synthetic polypeptide
EVRRPSARQPPRLRTRRDHVGGDRERPHRGPGGNPGVQLQQGRQAPGFHHAVPHRGRGRPFRGGDPEMV

SEQ ID NO: 22694 - protein, 69 aa, Artificial Sequence; identical to SEQ ID NO: 22693
  Synthetic polypeptide

SEQ ID NO: 22695 - protein, 99 aa, Artificial Sequence; identical to SEQ ID NO: 22679
  Synthetic polypeptide

SEQ ID NO: 22696 - protein, 105 aa, Artificial Sequence
  Synthetic polypeptide
GASLPGRPLSEMWGAPLPRNPVWEVRSVSARPPRLRSEETLRPATAPSENAQGPCRRRPRAAPQRTRWKSWSTTSTRSTSTRIPPRCASSRPRQAFPRRRPRVVI

SEQ ID NO: 22697 - protein, 67 aa, Artificial Sequence
  Synthetic polypeptide
EVRRPSARQPPRLRTRRDHVGGDRERPHRGPGGNPGVQLQQGRQAPGFHHAVPHRGRGRPFRGGDPG

SEQ ID NO: 22698 - protein, 52 aa, Artificial Sequence; identical to SEQ ID NO: 22680
  Synthetic polypeptide

SEQ ID NO: 22699 - protein, 101 aa, Artificial Sequence
  Synthetic polypeptide
GASLPGRPLSEMWGAPLPRNPVWEVRSVSARPPRLRSEETLRPATAPSENAQGPCRRRPRAAPQRTRWKSWSTTSTRSTSTRIPPRCASSRPRQAFPRRRP

SEQ ID NO: 22700 - protein, 65 aa, Artificial Sequence
  Synthetic polypeptide
EVRRPSARQPPRLRTRRDHVGGDRERPHRGPGGNPGVQLQQGRQAPGFHHAVPHRGRGRPFRGGD

SEQ ID NO: 22701 - protein, 78 aa, Artificial Sequence; identical to SEQ ID NO: 22677
  Synthetic polypeptide

SEQ ID NO: 22702 - protein, 78 aa, Artificial Sequence; identical to SEQ ID NO: 22677
  Synthetic polypeptide

SEQ ID NO: 22703 - protein, 99 aa, Artificial Sequence; identical to SEQ ID NO: 22679
  Synthetic polypeptide

SEQ ID NO: 22704 - protein, 52 aa, Artificial Sequence; identical to SEQ ID NO: 22680
  Synthetic polypeptide

SEQ ID NO: 22705 - protein, 103 aa, Artificial Sequence
  Synthetic polypeptide
DVGSASAPQPRLGGEERLCPAAPSENAQGPCRRRPRAAPQRTRWKSWSTTSTRSTSTRIPPRCASSRPRQAFPRRRPRNGLSSAWQSGGAQKACPQSADPSQT

SEQ ID NO: 22706 - protein, 103 aa, Artificial Sequence; identical to SEQ ID NO: 22705
  Synthetic polypeptide

SEQ ID NO: 22707 - protein, 91 aa, Artificial Sequence
  Synthetic polypeptide
GASLPGRPLSEMWGAPLPRNPVWEVRSVSARPPRLRTRRDHVGGDRERPHRGPGGNPGVQLQQGRQAPGFHHAVPHRGRGRPFRGGDPEMV

SEQ ID NO: 22708 - protein, 91 aa, Artificial Sequence; identical to SEQ ID NO: 22707
  Synthetic polypeptide

SEQ ID NO: 22709 - protein, 81 aa, Artificial Sequence
  Synthetic polypeptide
DVGSASAPQPRLGGEERLCPAAPSENAQGPCRRRPRAAPQRTRWKSWSTTSTRSTSTRIPPRCASSRPRQAFPRRRPRVVI

SEQ ID NO: 22710 - protein, 89 aa, Artificial Sequence
  Synthetic polypeptide
GASLPGRPLSEMWGAPLPRNPVWEVRSVSARPPRLRTRRDHVGGDRERPHRGPGGNPGVQLQQGRQAPGFHHAVPHRGRGRPFRGGDPG

SEQ ID NO: 22711 - protein, 77 aa, Artificial Sequence
  Synthetic polypeptide
DVGSASAPQPRLGGEERLCPAAPSENAQGPCRRRPRAAPQRTRWKSWSTTSTRSTSTRIPPRCASSRPRQAFPRRRP

SEQ ID NO: 22712 - protein, 87 aa, Artificial Sequence
  Synthetic polypeptide
GASLPGRPLSEMWGAPLPRNPVWEVRSVSARPPRLRTRRDHVGGDRERPHRGPGGNPGVQLQQGRQAPGFHHAVPHRGRGRPFRGGD

SEQ ID NO: 22713 - protein, 68 aa, Artificial Sequence
  Synthetic polypeptide
DVGSASAPQPRLGARRDHVGGDRERPHRGPGGNPGVQLQQGRQAPGFHHAVPHRGRGRPFRGGDPEMV

SEQ ID NO: 22714 - protein, 68 aa, Artificial Sequence; identical to SEQ ID NO: 22713
  Synthetic polypeptide

SEQ ID NO: 22715 - protein, 101 aa, Artificial Sequence
  Synthetic polypeptide
GASLPGRPLSEMWGAPLPRNPVWERAGTMSAETASGPTEDQVEILEYNFNKVDKHPDSTTLCLIAAEAGLSEEETQKWFKQRLAKWRRSEGLPSECRSVTD

SEQ ID NO: 22716 - protein, 101 aa, Artificial Sequence; identical to SEQ ID NO: 22715
  Synthetic polypeptide

SEQ ID NO: 22717 - protein, 135 aa, Artificial Sequence
  Synthetic polypeptide
SQLATTSTSQPPALASQSAEIAASAWPPPRLGSEERLCPAAHCLRCGERLCPATPSGSAQGPCRRRPRAAPQRTRWKSWSTTSTRSTSTRIPPRCASSRPRQAFPRRRPRNGLSSAWQSGGAQKACPQSADPSQT

SEQ ID NO: 22718 - protein, 135 aa, Artificial Sequence; identical to SEQ ID NO: 22717
  Synthetic polypeptide

SEQ ID NO: 22719 - protein, 66 aa, Artificial Sequence
  Synthetic polypeptide
DVGSASAPQPRLGARRDHVGGDRERPHRGPGGNPGVQLQQGRQAPGFHHAVPHRGRGRPFRGGDPG

SEQ ID NO: 22720 - protein, 122 aa, Artificial Sequence
  Synthetic polypeptide
GASLPGRPLSEMWGAPLPRNPVWERAGTMSAETASGPTEDQVEILEYNFNKVDKHPDSTTLCLIAAEAGLSEEETQGSDLISRSKIWHPESSPQREGYPHDSLPCLAFDYFSLLPPQCKEMV

SEQ ID NO: 22721 - protein, 113 aa, Artificial Sequence
  Synthetic polypeptide
SQLATTSTSQPPALASQSAEIAASAWPPPRLGSEERLCPAAHCLRCGERLCPATPSGSAQGPCRRRPRAAPQRTRWKSWSTTSTRSTSTRIPPRCASSRPRQAFPRRRPRVVI

SEQ ID NO: 22722 - protein, 64 aa, Artificial Sequence
  Synthetic polypeptide
DVGSASAPQPRLGARRDHVGGDRERPHRGPGGNPGVQLQQGRQAPGFHHAVPHRGRGRPFRGGD

SEQ ID NO: 22723 - protein, 75 aa, Artificial Sequence
  Synthetic polypeptide
GASLPGRPLSEMWGAPLPRNPVWERAGTMSAETASGPTEDQVEILEYNFNKVDKHPDSTTLCLIAAEAGLSEEET

SEQ ID NO: 22724 - protein, 109 aa, Artificial Sequence
  Synthetic polypeptide
SQLATTSTSQPPALASQSAEIAASAWPPPRLGSEERLCPAAHCLRCGERLCPATPSGSAQGPCRRRPRAAPQRTRWKSWSTTSTRSTSTRIPPRCASSRPRQAFPRRRP

SEQ ID NO: 22725 - protein, 100 aa, Artificial Sequence
  Synthetic polypeptide
ELERARKWILPQTLGEECRPANPHFRLPISRSVRCGWRSVRCPACCRHTCGRTTRAPSAASWADWAASLKSPRGVSCRGMTCCCAQPSGGWHSAATPWPP

SEQ ID NO: 22726 - protein, 100 aa, Artificial Sequence; identical to SEQ ID NO: 22725
  Synthetic polypeptide

SEQ ID NO: 22727 - protein, 442 aa, Artificial Sequence
  Synthetic polypeptide
ARECKCPLGTGKGKKMDSAPDPRGGVQTCQPSFQASDLQKRKVWMEECALSSVLQTHLREDHEGTIRGVLGRLGGLTEESTRCVLQGHDLLLRSALRRLALRGNALATLTQMRLSGKKHLLQELREQRALEQGSSQCLDEHQWQLLRALEARVLEEASRLEEEAQQTRLQLQQRLLAEAQEVGQLLQQHMECAIGQALLVHARNAATKSRAKDRDDFKRTLMEAAVESVYVTSAGVSRLVQAYYQQIGRIMEDHEERKLQHLKTLQGERMENYKLRKKQELSNPSSGSRTAGGAHETSQAVHQRMLSQQKRFLAQFPVHQQMRLHAQQQQAGVMDLLEAQLETQLQEAEQNFISELAALARVPLAESKLLPAKRGLLEKPLRTKRKKPLPQERGDLGVPNNEDLASGDQTSGSLSSKRLSQQESEAGDSGNSKKMLKRRSNL

SEQ ID NO: 22728 - protein, 442 aa, Artificial Sequence; identical to SEQ ID NO: 22727
  Synthetic polypeptide

SEQ ID NO: 22729 - protein, 151 aa, Artificial Sequence
  Synthetic polypeptide
QPTCATAVEYNIFEGMECHGSPLVVISQGKIVFEDGNINVNKGMGRFIPRKAFPEHLYQRVKIRNKVFGLQGVSRGMYDGPVYEVPATPKYATPAPSAKSSPSKHQPPPIRNLHQSNFSLSGAQIDDNNPRRTGHRIVAPPGGRSNITSLG

SEQ ID NO: 22730 - protein, 151 aa, Artificial Sequence; identical to SEQ ID NO: 22729
  Synthetic polypeptide

SEQ ID NO: 22731 - protein, 151 aa, Artificial Sequence; identical to SEQ ID NO: 22729
  Synthetic polypeptide

SEQ ID NO: 22732 - protein, 22 aa, Artificial Sequence
  Synthetic polypeptide
SLHAQRRWSTTSSRVWSATAPH

SEQ ID NO: 22733 - protein, 22 aa, Artificial Sequence
  Synthetic polypeptide
SLHAQRRWSTTSSRVWSATAPH

SEQ ID NO: 22734 - protein, 22 aa, Artificial Sequence
  Synthetic polypeptide
SLHAQRRWSTTSSRVWSATAPH

SEQ ID NO: 22735 - protein, 32 aa, Artificial Sequence
  Synthetic polypeptide
AYMRNGGGVQHLRGYGVPRLPTSGHQPGQDRL

SEQ ID NO: 22736 - protein, 32 aa, Artificial Sequence; identical to SEQ ID NO: 22735
  Synthetic polypeptide

SEQ ID NO: 22737 - protein, 32 aa, Artificial Sequence; identical to SEQ ID NO: 22735
  Synthetic polypeptide

SEQ ID NO: 22738 - protein, 563 aa, Artificial Sequence
  Synthetic polypeptide
LISKSDRLLIKGGRIINDDQSLYADVYLEDGLIKQIGENLIVPGGVKTIEANGRMVIPGGIDVNTYLQKPSQGMTAADDFFQGTRAALVGGTTMIIDHVVPEPGSSLLTSFEKWHEAADTKSCCDYSLHVDITSWYDGVREELEVLVQDKGVNSFQVYMAYKDVYQMSDSQLYEAFTFLKGLGAVILVHAENGDLIAQEQKRILEMGITGPEGHALSRPEELEAEAVFRAITIAGRINCPVYITKVMSKSAADIIALARKKGPLVFGEPIAASLGTDGTHYWSKNWAKAAAFVTSPPLSPDPTTPDYLTSLLACGDLQVTGSGHCPYSTAQKAVGKDNFTLIPEGVNGIEERMTVVWDKAVATGKMDENQFVAVTSTNAAKIFNLYPRKGRIAVGSDADVVIWDPDKLKTITAKSHKSAVEYNIFEGMECHGSPLVVISQGKIVFEDGNINVNKGMGRFIPRKAFPEHLYQRVKIRNKVFGLQGVSRGMYDGPVYEVPATPKYATPAPSAKSSPSKHQPPPIRNLHQSNFSLSGAQIDDNNPRRTGHRIVAPPGGRSNITSLG

SEQ ID NO: 22739 - protein, 563 aa, Artificial Sequence; identical to SEQ ID NO: 22738
  Synthetic polypeptide

SEQ ID NO: 22740 - protein, 563 aa, Artificial Sequence; identical to SEQ ID NO: 22738
  Synthetic polypeptide

SEQ ID NO: 22741 - protein, 33 aa, Artificial Sequence
  Synthetic polypeptide
ARVTDSSSKVDGSSTMTNPFMLTSTWRMDLSNK

SEQ ID NO: 22742 - protein, 33 aa, Artificial Sequence; identical to SEQ ID NO: 22741
  Synthetic polypeptide

SEQ ID NO: 22743 - protein, 33 aa, Artificial Sequence; identical to SEQ ID NO: 22741
  Synthetic polypeptide

SEQ ID NO: 22744 - protein, 7 aa, Artificial Sequence
  Synthetic polypeptide
LLTDKQE

SEQ ID NO: 22745 - protein, 7 aa, Artificial Sequence
  Synthetic polypeptide
LLTDKQE

SEQ ID NO: 22746 - protein, 7 aa, Artificial Sequence
  Synthetic polypeptide
LLTDKQE

SEQ ID NO: 22747 - protein, 41 aa, Artificial Sequence
  Synthetic polypeptide
GQAQWLTPVIPALWEAEAGQDFTGMAWLSSPSLPKMGCTPT

SEQ ID NO: 22748 - protein, 41 aa, Artificial Sequence; identical to SEQ ID NO: 22747
  Synthetic polypeptide

SEQ ID NO: 22749 - protein, 41 aa, Artificial Sequence; identical to SEQ ID NO: 22747
  Synthetic polypeptide

SEQ ID NO: 22750 - protein, 33 aa, Artificial Sequence
  Synthetic polypeptide
SQHFGRPRQVRILLEWRGCLPQASPRWGVPQHE

SEQ ID NO: 22751 - protein, 33 aa, Artificial Sequence; identical to SEQ ID NO: 22750
  Synthetic polypeptide

SEQ ID NO: 22752 - protein, 33 aa, Artificial Sequence; identical to SEQ ID NO: 22750
  Synthetic polypeptide

SEQ ID NO: 22753 - protein, 800 aa, Artificial Sequence
  Synthetic polypeptide
PGAVAHTCNPSTLGGRGRSGFYWNGVAVFPKPPQDGVYPNMSEPVTPANINLYAEALVANVKQRAAWFRTPHVLWPWGCDKQFFNASVQFANMDPLLDHINSHAAELGVSVQYATLGDYFRALHALNVTWRVRDHHDFLPYSTEPFQAWTGFYTSRSSLKGLARRASALLYAGESMFTRYLWPAPRGHLDPTWALQQLQQLRWAVSEVQHHDAITGTESPKVRDMYATHLASGMLGMRKLMASIVLDELQPQAPMAASSDAGPAGHFASVYNPLAWTVTTIVTLTVGFPGVRVTDEAGHPVPSQIQNSTETPSAYDLLILTTIPGLSYRHYNIRPTAGAQEGTQEPAATVASTLQFGRRLRRRTSHAGRYLVPVANDCYIVLLDQDTNLMHSIWERQSNRTVRVTQEFLEYHVNGDVKQGPISDNYLFTPGKAAVPAWEAVEMEIVAGQLVTEIRQYFYRNMTAQNYTYAIRSRLTHVPQGHDGELLCHRIEQEYQAGPLELNREAVLRTSTNLNSQQVIYSDNNGYQMQRRPYVSYVNNSIARNYYPMVQSAFMEDGKSRLVLLSERAHGISSQGNGQVEVMLHRRLWNNFDWDLGYNLTLNDTSVVHPVLWLLLGSWSLTTALRQRSALALQHRPVVLFGDLAGTAPKLPGPQQQEAVTLPPNLHLQILSIPGWRYSSNHTEHSQNLRKGHRGEAQADLRRVLLRLYHLYEVGEDPVLSQPVTVNLEAVLQALGSVVAVEERSLTGTWDLSMLHRWSWRTGPGRHRGDTTSPSRPPGGPIITVHPKEIRTFFIHFQQQ

SEQ ID NO: 22754 - protein, 749 aa, Artificial Sequence
  Synthetic polypeptide
PGAVAHTCNPSTLGGRGRSGFYWNGVAVFPKPPQDGVYPNMSEPVTPANINLYAELGVSVQYATLGDYFRALHALNVTWRVRDHHDFLPYSTEPFQAWTGFYTSRSSLKGLARRASALLYAGESMFTRYLWPAPRGHLDPTWALQQLQQLRWAVSEVQHHDAITGTESPKVRDMYATHLASGMLGMRKLMASIVLDELQPQAPMAASSDAGPAGHFASVYNPLAWTVTTIVTLTVGFPGVRVTDEAGHPVPSQIQNSTETPSAYDLLILTTIPGLSYRHYNIRPTAGAQEGTQEPAATVASTLQFGRRLRRRTSHAGRYLVPVANDCYIVLLDQDTNLMHSIWERQSNRTVRVTQEFLEYHVNGDVKQGPISDNYLFTPGKAAVPAWEAVEMEIVAGQLVTEIRQYFYRNMTAQNYTYAIRSRLTHVPQGHDGELLCHRIEQEYQAGPLELNREAVLRTSTNLNSQQVIYSDNNGYQMQRRPYVSYVNNSIARNYYPMVQSAFMEDGKSRLVLLSERAHGISSQGNGQVEVMLHRRLWNNFDWDLGYNLTLNDTSVVHPVLWLLLGSWSLTTALRQRSALALQHRPVVLFGDLAGTAPKLPGPQQQEAVTLPPNLHLQILSIPGWRYSSNHTEHSQNLRKGHRGEAQADLRRVLLRLYHLYEVGEDPVLSQPVTVNLEAVLQALGSVVAVEERSLTGTWDLSMLHRWSWRTGPGRHRGDTTSPSRPPGGPIITVHPKEIRTFFIHFQQQ

SEQ ID NO: 22755 - protein, 745 aa, Artificial Sequence
  Synthetic polypeptide
PGAVAHTCNPSTLGGRGRSGFYWNGVAVFPKPPQDGVYPNMSEPVTPANINLYAEALVANVKQRAAWFRTPHVLWPWGCDKQFFNASVQFANMDPLLDHINSHAAELGVSVQYATLGDYFRALHALNVTWRVRDHHDFLPYSTEPFQAWTGFYTSRSSLKGLARRASALLYAGESMFTRYLWPAPRGHLDPTWALQQLQQLRWAVSEVQHHDAITGTESPKVRDMYATHLASGMLGMRKLMASIVLDELQPQAPMAASSDAGPAGHFASVYNPLAWTVTTIVTLTVGFPGVRVTDEAGHPVPSQIQNSTETPSAYDLLILTTIPGLSYRHYNIRPTAGAQEGTQEPAATVASTLQFGRRLRRRTSHAGRYLVPVANDCYIVLLDQDTNLMHSIWERQSNRTVRVTQEFLEYHVNGDVKQGPISDNYLFTPGKAAVPAWEAVEMEIVAGQLVTEIRQYFYRNMTAQNYTYAIRSRLTHVPQGHDGELLCHRIEQEYQAGPLELNREAVLRTSTNLNSQQVIYSDNNGYQMQRRPYVSYVNNSIARNYYPMVQSAFMEDGKSRLVLLSERAHGISSQGNGQVEVMLHRRLWNNFDWDLGYNLTLNDTSVVHPVLWLLLGSWSLTTALRQRSALALQHRPVVLFGDLAGTAPKLPGPQQQEAVTLPPNLHLQILSIPGWRYSSNHTEHSQNLRKGHRGEAQADLRRVLLRLYHLYEVGEDPVLSQPVTVNLEVNFPTPIQTISQGSKP

SEQ ID NO: 22756 - protein, 27 aa, Artificial Sequence
  Synthetic polypeptide
AQEFKAAVSHDCTTTLQPGSMSITGQS

SEQ ID NO: 22757 - protein, 27 aa, Artificial Sequence
  Synthetic polypeptide
AQEFKAAVSHDCTTTLQPGSMSITGQS

SEQ ID NO: 22758 - protein, 12 aa, Artificial Sequence
  Synthetic polypeptide
AMIVPLRSSLGV

SEQ ID NO: 22759 - protein, 12 aa, Artificial Sequence
  Synthetic polypeptide
AMIVPLRSSLGV

SEQ ID NO: 22760 - protein, 263 aa, Artificial Sequence
  Synthetic polypeptide
LYHYAPAWEYEHYWTELRGTTLFFYTDKKSIIYVDKLDIVDLTCLTEQNSTEKNCAKFTLVLPKEEVQLKTENTESGEEWRGFILTVTELSVPQNVSLLPGQVIKLHEVLEREKKRRIETEQSTSVEKEKEPTEDYVDVLNPMPACFYTVSRKEATEMLQKNPSLGNMILRPGSDSRNYSITIRQEIDIPRIKHYKVMSVGQNYTIELEKPVTLPNLFSVIDYFVKETRGNLRPFICSTDENTGQEPSMEGRSEKLKKNPHIA

SEQ ID NO: 22761 - protein, 263 aa, Artificial Sequence; identical to SEQ ID NO: 22760
  Synthetic polypeptide

SEQ ID NO: 22762 - protein, 304 aa, Artificial Sequence
  Synthetic polypeptide
TPGRNWHLESGHLELGRPTTLFETMGKAEMWLIRTYWDFEFPRPFLPNVDFVGGLHCKPAKPLPKEMEEFVQSSGENGIVVFSLGSMISNMSEESANMIASALAQIPQKVLWRFDGKKPNTLGSNTRLYKWLPQNDLLGHPKTKAFITHGGTNGIYEAIYHGIPMVGIPLFADQHDNIAHMKAKGAALSVDIRTMSSRDLLNALKSVINDPIYKENIMKLSRIHHDQPVKPLDRAVFWIEFVMRHKGAKHLRVAAHNLTWIQYHSLDVIAFLLACVATMIFMITKCCLFCFRKLAKTGKKKKRD

SEQ ID NO: 22763 - protein, 111 aa, Artificial Sequence
  Synthetic polypeptide
EIAPVEHLTRSTRSRPPWRINTVAEHREGTGTWSLDIWNLEDPLHYLRQWGKLKCGSFEPIGILNFLAHSYQMLILLEDFTVNQPNPCLRKWKSLCRALEKMVLWCFLWGR

SEQ ID NO: 22764 - protein, 79 aa, Artificial Sequence
  Synthetic polypeptide
GSPLGGLSLPCGASLWGTPGSLSDEIQRALLGRKLPQWNTSPDQHVAGPRGGLTQWLNTGKELALGVWTSGTWKTHYII

SEQ ID NO: 22765 - protein, 15 aa, Artificial Sequence
  Synthetic polypeptide
AQEFETGLGHMELAC

SEQ ID NO: 22766 - protein, 15 aa, Artificial Sequence
  Synthetic polypeptide
AQEFETGLGHMELAC

SEQ ID NO: 22767 - protein, 15 aa, Artificial Sequence
  Synthetic polypeptide
AQEFETGLGHMELAC

SEQ ID NO: 22768 - protein, 472 aa, Artificial Sequence
  Synthetic polypeptide
KAKAGAWLEPRSSRPAWATWNLLARKQSARLDKHNDLGWKLFGKAPLRENAQKDSKRIQKEYEDKAGRPSKPPSPKQNVRKNLDFEPLSTTALILEDRPANLPAKPAEEAQKHRQQYEEMVVQAKKRELKEAQRRKKQLEERCRVEESIGNAVLTWNNEILPNWETMWCSRKVRDLWWQGIPPSVRGKVWSLAIGNELNITHELFDICLARAKERWRSLSTGGSEVENEDAGFSAADREASLELIKLDISRTFPNLCIFQQGGPYHDMLHSILGAYTCYRPDVGYVQGMSFIAAVLILNLDTADAFIAFSNLLNKPCQMAFFRVDHGLMLTYFAAFEVFFEENLPKLFAHFKKNNLTPDIYLIDWIFTLYSKSLPLDLACRIWDVFCRDGEEFLFRTALGILKLFEDILTKMDFIHMAQFLTRLPEDLPAEELFASIATIQMQSRNKKWAQVLTALQKDSREMEKGSPSLRH

SEQ ID NO: 22769 - protein, 472 aa, Artificial Sequence; identical to SEQ ID NO: 22768
  Synthetic polypeptide

SEQ ID NO: 22770 - protein, 472 aa, Artificial Sequence; identical to SEQ ID NO: 22768
  Synthetic polypeptide

SEQ ID NO: 22771 - protein, 78 aa, Artificial Sequence
  Synthetic polypeptide
RPRREHGLSPGVRDRPGPHGTCLLENKVQGLTNTMTWDGSYLGKRHSERMPRRIQREYRRNMKTRLEDLASHPLQSRM

SEQ ID NO: 22772 - protein, 78 aa, Artificial Sequence; identical to SEQ ID NO: 22771
  Synthetic polypeptide

SEQ ID NO: 22773 - protein, 78 aa, Artificial Sequence; identical to SEQ ID NO: 22771
  Synthetic polypeptide

SEQ ID NO: 22774 - protein, 33 aa, Artificial Sequence
  Synthetic polypeptide
SYKKQAESLVVANAADDKGPLHYVRLWEKLRYG

SEQ ID NO: 22775 - protein, 33 aa, Artificial Sequence; identical to SEQ ID NO: 22774
  Synthetic polypeptide

SEQ ID NO: 22776 - protein, 13 aa, Artificial Sequence
  Synthetic polypeptide
WLMQLMTKAHYIM

SEQ ID NO: 22777 - protein, 13 aa, Artificial Sequence
  Synthetic polypeptide
WLMQLMTKAHYIM

SEQ ID NO: 22778 - protein, 289 aa, Artificial Sequence
  Synthetic polypeptide
QRPTTLCETVGKAEIWLIRTYWDFEFPQPYQPNFEFVGGLHCKPAKALPKEMENFVQSSGEDGIVVFSLGSLFQNVTEEKANIIASALAQIPQKVLWRYKGKKPSTLGANTRLYDWIPQNDLLGHPKTKAFITHGGMNGIYEAIYHGVPMVGVPIFGDQLDNIAHMKAKGAAVEINFKTMTSEDLLRALRTVITDSSYKENAMRLSRIHHDQPVKPLDRAVFWIEFVMRHKGAKHLRSAAHDLTWFQHYSIDVIGFLLACVATAIFLFTKCFLFSCQKFNKTRKIEKRE

SEQ ID NO: 22779 - protein, 68 aa, Artificial Sequence
  Synthetic polypeptide
QRPTTLCETVGKAEIWLIRTYWDFEFPQPYQPNFEFVGGLHCKPAKALPKESYTRKPSSLKPWHLYLK

SEQ ID NO: 22780 - protein, 63 aa, Artificial Sequence
  Synthetic polypeptide
KLMFAQKSVHVYSSSFHNLQEMETTQMPFNEWMNGGTFHTTKYDSVINTPNTLGEPRALSEGI

SEQ ID NO: 22781 - protein, 63 aa, Artificial Sequence; identical to SEQ ID NO: 22780
  Synthetic polypeptide

SEQ ID NO: 22782 - protein, 63 aa, Artificial Sequence; identical to SEQ ID NO: 22780
  Synthetic polypeptide

SEQ ID NO: 22783 - protein, 63 aa, Artificial Sequence; identical to SEQ ID NO: 22780
  Synthetic polypeptide

SEQ ID NO: 22784 - protein, 426 aa, Artificial Sequence
  Synthetic polypeptide
THLIPWVNLGHYLKEYEDKAGRPSKPPSPKQNVRKNLDFEPLSTTALILEDRPANLPAKPAEEAQKHRQQYEEMVVQAKKRELKEAQRRKKQLEERCRVEESIGNAVLTWNNEILPNWETMWCSRKVRDLWWQGIPPSVRGKVWSLAIGNELNITHELFDICLARAKERWRSLSTGGSEVENEDAGFSAADREASLELIKLDISRTFPNLCIFQQGGPYHDMLHSILGAYTCYRPDVGYVQGMSFIAAVLILNLDTADAFIAFSNLLNKPCQMAFFRVDHGLMLTYFAAFEVFFEENLPKLFAHFKKNNLTPDIYLIDWIFTLYSKSLPLDLACRIWDVFCRDGEEFLFRTALGILKLFEDILTKMDFIHMAQFLTRLPEDLPAEELFASIATIQMQSRNKKWAQVLTALQKDSREMEKGSPSLRH

SEQ ID NO: 22785 - protein, 426 aa, Artificial Sequence; identical to SEQ ID NO: 22784
  Synthetic polypeptide

SEQ ID NO: 22786 - protein, 426 aa, Artificial Sequence; identical to SEQ ID NO: 22784
  Synthetic polypeptide

SEQ ID NO: 22787 - protein, 426 aa, Artificial Sequence; identical to SEQ ID NO: 22784
  Synthetic polypeptide

SEQ ID NO: 22788 - protein, 115 aa, Artificial Sequence
  Synthetic polypeptide
SMRKLIAGLIFLKIWTCTLRTSAELPQTEGCSQYIHQVTEEDPLHYLRQWGKLTYGLFETPGIFSFHIHSYQMLILLEDSTANLPNPCLRKWKTLYRALEKMVLWCFLWGQWSVT

SEQ ID NO: 22789 - protein, 115 aa, Artificial Sequence; identical to SEQ ID NO: 22788
  Synthetic polypeptide

SEQ ID NO: 22790 - protein, 27 aa, Artificial Sequence
  Synthetic polypeptide
GLQLNFLRLRAVPSIYIKSLRKTHYII

SEQ ID NO: 22791 - protein, 27 aa, Artificial Sequence
  Synthetic polypeptide
GLQLNFLRLRAVPSIYIKSLRKTHYII

SEQ ID NO: 22792 - protein, 38 aa, Artificial Sequence
  Synthetic polypeptide
ICSPGRCESIFVKEFNLIDRRELAPLQELIEKLTSKDR

SEQ ID NO: 22793 - protein, 38 aa, Artificial Sequence; identical to SEQ ID NO: 22792
  Synthetic polypeptide

SEQ ID NO: 22794 - protein, 54 aa, Artificial Sequence
  Synthetic polypeptide
APGAGFPHVTTFQCRILRSLENSKFESVLLVAVKVYLLRNSTLLIEENLHHSKN

SEQ ID NO: 22795 - protein, 54 aa, Artificial Sequence; identical to SEQ ID NO: 22794
  Synthetic polypeptide

SEQ ID NO: 22796 - protein, 17 aa, Artificial Sequence
  Synthetic polypeptide
SLNYLTKPDQSWSHPGE

SEQ ID NO: 22797 - protein, 19 aa, Artificial Sequence
  Synthetic polypeptide
LLIISQSQTRVGATQGNDL

SEQ ID NO: 22798 - protein, 17 aa, Artificial Sequence
  Synthetic polypeptide
LSHKARPELEPPRGMIS

SEQ ID NO: 22799 - protein, 6 aa, Artificial Sequence
  Synthetic polypeptide
RQCAIS

SEQ ID NO: 22800 - protein, 6 aa, Artificial Sequence
  Synthetic polypeptide
RQCAIS

SEQ ID NO: 22801 - protein, 6 aa, Artificial Sequence
  Synthetic polypeptide
RQCAIS

SEQ ID NO: 22802 - protein, 6 aa, Artificial Sequence
  Synthetic polypeptide
RQCAIS

SEQ ID NO: 22803 - protein, 18 aa, Artificial Sequence
  Synthetic polypeptide
MDEDNVQSHKVSPKSAYC

SEQ ID NO: 22804 - protein, 18 aa, Artificial Sequence
  Synthetic polypeptide
MDEDNVQSHKVSPKSAYC

SEQ ID NO: 22805 - protein, 18 aa, Artificial Sequence
  Synthetic polypeptide
MDEDNVQSHKVSPKSAYC

SEQ ID NO: 22806 - protein, 18 aa, Artificial Sequence
  Synthetic polypeptide
MDEDNVQSHKVSPKSAYC

SEQ ID NO: 22807 - protein, 318 aa, Artificial Sequence
  Synthetic polypeptide
ECKVVQSLWKTVWKSLKTLKIELTCNPSIPLLGIYLKNSKWDLKEICTSMFTAELFTITKRWKQPICPSTDEWMKTMCNLIKLAQKVPTADLEDVLPLAEDITNILSKCCESASEDCMAKELPEHTVKLCDNLSTKNSKFEDCCQEKTAMDVFVCTYFMPAAQLPELPDVELPTNKDVCDPGNTKVMDKYTFELSRRTHLPEVFLSKVLEPTLKSLGECCDVEDSTTCFNAKGPLLKKELSSFIDKGQELCADYSENTFTEYKKKLAERLKAKLPDATPTELAKLVNKHSDFASNCCSINSPPLYCDSEIDAELKNIL

SEQ ID NO: 22808 - protein, 318 aa, Artificial Sequence; identical to SEQ ID NO: 22807
  Synthetic polypeptide

SEQ ID NO: 22809 - protein, 320 aa, Artificial Sequence
  Synthetic polypeptide
ECKVVQSLWKTVWKSLKTLKIELTCNPSIPLLGIYLKNSKWDLKEICTSMFTAELFTITKRWKQPICPSTDEWMKTMCNLIKLAQKVPTADLEDVLPLAEDITNILSKCCESASEDCMAKELPEHTVKLCDNLSTKNSKFEDCCQEKTAMDVFVCTYFMPAAQLPELPDVELPTNKDVCDPGNTKVMDKYTFELSRRTHLPEVFLSKVLEPTLKSLGECCDVEDSTTCFNAKGPLLKKELSSFIDKGQELCADYSENTFTEYKKKLAERLKAKLPDATPTELAKLVNKHSDFASNCCSINSPPLYCDSETRVGATQGNDL

SEQ ID NO: 22810 - protein, 192 aa, Artificial Sequence
  Synthetic polypeptide
ECKVVQSLWKTVWKSLKTLKIELTCNPSIPLLGIYLKNSKWDLKEICTSMFTAELFTITKRWKQPICPSTDEWMKTMCNLIKLAQKVPTADLEDVLPLAEDITNILSKCCESASEDCMAKELPEHTVKLCDNLSTKNSKFEDCCQEKTAMDVFVCTYFMPAAQLPELPDVELPTNKDVCDPGNTKVMDKALY

SEQ ID NO: 22811 - protein, 1138 aa, Artificial Sequence
  Synthetic polypeptide
PKLREESRRLALAAKREKRKEKRRKKKEEQRRKLEEIEAKNKENFELQAAQEKEKLKVEDEPEVLTEPPSATTTTTIGISATWTTLAGSHGKRNNTITTTSSKRKNRKNKITPENVQIIFDDPLPISYSQPEKVNGESKSSSTSESGDSDNMRISSCSDESSNSNSSRKSDNHSPAVVTTTVSSKKQPSVLVTFPKEERKSVSGKASIKLSETISEGTSNSLSTCTKSGPSPLSSPNGKLTVASPKRGQKREEGWKEVVRRSKKVSVPSTVISRVIGRGGCNINAIREFTGAHIDIDKQKDKTGDRIITIRGGTESTRQATQLINALIKDPDKEIDELIPKNRLKSSSANSKIGSSAPTTTAANTSLMGIKMTTVALSSTSQTATALTVPAISSASTHKTIKNPVNNVRPGFPVSLPLAYPPPQFAHALLAAQTFQQIRPPRLPMTHFGGTFPPAQSTWGPFPVRPLSPARATNSPKPHMVPRHSNQNSSGSQVNSAGSLTSSPTTTTSSSASTVPGTSTNGSPSSPSVRRQLFVTVVKTSNATTTTVTTTASNNNTAPTNATYPMPTAKEHYPVSSPSSPSPPAQPGGVSRNSPLDCGSASPNKVASSSEQEAGSPPVVETTNTRPPNSSSSSGSSSAHSNQQQPPGSVSQEPRPPLQQSQVPPPEVRMTVPPLATSSAPVAVPSTAPVTYPMPQTPMGCPQPTPKMETPAIRPPPHGTTAPHKNSASVQNSSVAVLSVNHIKRPHSVPSSVQLPSTLSTQSACQNSVHPANKPIAPNFSAPLPFGPFSTLFENSPTSAHAFWGGSVVSSQSTPESMLSGKSSYLPNSDPLHQSDTSKAPGFRPPLQRPAPSPSGIVNMDSPYGSVTPSSTHLGNFASNISGGQMYGPGAPLGGAPAAANFNRQHFSPLSLLTPCSSASNDSSAQSVSSGVRAPSPAPSSVPLGSEKPSNVSQDRKVPVPIGTERSARIRQTGTSAPSVIGSNLSTSVGHSGIWSFEGIGGNQDKVDWCNPGMGNPMIHRPMSDPGVFSQHQAMERDSTGIVTPSGTFHQHVPAGYMDFPKVGGMPFSVYGNAMIPPVAPIPDGAGGPIFNGPHAADPSWNSLIKMVSSSTENNGPQTVWTGPWAPHMNSVHMNQLG

SEQ ID NO: 22812 - protein, 1138 aa, Artificial Sequence; identical to SEQ ID NO: 22811
  Synthetic polypeptide

SEQ ID NO: 22813 - protein, 1138 aa, Artificial Sequence; identical to SEQ ID NO: 22811
  Synthetic polypeptide

SEQ ID NO: 22814 - protein, 1138 aa, Artificial Sequence; identical to SEQ ID NO: 22811
  Synthetic polypeptide

SEQ ID NO: 22815 - protein, 38 aa, Artificial Sequence
  Synthetic polypeptide
MHSFLKSICWRKYGYSTYRFSFTVALFRNKTYLSPSLS

SEQ ID NO: 22816 - protein, 38 aa, Artificial Sequence; identical to SEQ ID NO: 22815
  Synthetic polypeptide

SEQ ID NO: 22817 - protein, 38 aa, Artificial Sequence; identical to SEQ ID NO: 22815
  Synthetic polypeptide

SEQ ID NO: 22818 - protein, 38 aa, Artificial Sequence; identical to SEQ ID NO: 22815
  Synthetic polypeptide

SEQ ID NO: 22819 - protein, 38 aa, Artificial Sequence; identical to SEQ ID NO: 22815
  Synthetic polypeptide

SEQ ID NO: 22820 - protein, 30 aa, Artificial Sequence
  Synthetic polypeptide
PKLREESRRLALAAKREKRKEKRRKKKEEQ

SEQ ID NO: 22821 - protein, 262 aa, Artificial Sequence
  Synthetic polypeptide
WPLHLGFVHEYSRRHPQLAVSVILRVAKGYQELLEKCFQTENPLECQDKGEEELQKYIQESQALAKRSCGLFQKLGEYYLQNAFLVAYTKKAPQLTSSELMAITRKMAATAATCCQLSEDKLLACGEGAADIIIGHLCIRHEMTPVNPGVGQCCTSSYANRRPCFSSLVVDETYVPPAFSDDKFIFHKDLCQAQGVALQTMKQEFLINLVKQKPQITEEQLEAVIADFSGLLEKCCQGQEQEVCFAEEGQKLISKTRAALGV

SEQ ID NO: 22822 - protein, 54 aa, Artificial Sequence
  Synthetic polypeptide
SSPRYLHGFFHLADLCSDISCLERIFLTTFKVSGLSTLVLFMNIQEDILSLLSQ

SEQ ID NO: 22823 - protein, 54 aa, Artificial Sequence; identical to SEQ ID NO: 22822
  Synthetic polypeptide

SEQ ID NO: 22824 - protein, 14 aa, Artificial Sequence
  Synthetic polypeptide
PHSKLVASPPWFCS

SEQ ID NO: 22825 - protein, 14 aa, Artificial Sequence
  Synthetic polypeptide
PHSKLVASPPWFCS

SEQ ID NO: 22826 - protein, 275 aa, Artificial Sequence
  Synthetic polypeptide
WPLHLGFVHEYSRRHPQLAVSVILRVAKGYQELLEKCFQTENPLECQDKGEEELQKYIQESQALAKRSCGLFQKLGEYYLQNAFLVAYTKKAPQLTSSELMAITRKMAATAATCCQLSEDKLLACGEGAADIIIGHLCIRHEMTPVNPGVGQCCTSSYANRRPCFSSLVVDETYVPPAFSDDKFIFHKDLCQAQGVALQTMKQEFLINLVKQKPQITEEQLEAVIADFSGLLEKCCQGQEQEVCFAEEGKRRQNESFIRCELFSLILTDLTLFVN

SEQ ID NO: 22827 - protein, 473 aa, Artificial Sequence
  Synthetic polypeptide
GWVQWLTPVIPALWEAKAGRSLEDDGPTARDLLVQYATGKKSSKNKKKLEKAMKVLKKQKKKKKPEVFNFSAIHLIHDPQDFAEKLLKQLECCKERFEVKMMLMNLISRLVGIHELFLFNFYPFLQRFLQPHQREVTKILLFAAQASHHLVPPEIIQSLLMTVANNFVTDKNSGEVMTVGINAIKEITARCPLAMTEELLQDLAQYKTHKDKNVMMSARTLIHLFRTLNPQMLQKKFRGKPTEASIEARVQEYGELDAKDYIPGAEVLEVEKEENAENDEDGWESTSLSEEEDADGEWIDVQHSSDEEQQEISKKLNSMPMEERKAKAAAISTSRVLTQEDFQKIRMAQMRKELDAAPGKSQKRKYIEIDSDEEPRGELLSLRDIERLHKKPKSDKETRLATAMAGKTDRKEFVRKKTKTNPFSSSTNKEKKKQKNFMMMRYSQNVRSKNKRSFREKQLALRDALLKKRKRMK

SEQ ID NO: 22828 - protein, 473 aa, Artificial Sequence; identical to SEQ ID NO: 22827
  Synthetic polypeptide

SEQ ID NO: 22829 - protein, 23 aa, Artificial Sequence
  Synthetic polypeptide
SQHFGRPRRADHLRMMDQQQETC

SEQ ID NO: 22830 - protein, 23 aa, Artificial Sequence
  Synthetic polypeptide
SQHFGRPRRADHLRMMDQQQETC

SEQ ID NO: 22831 - protein, 98 aa, Artificial Sequence
  Synthetic polypeptide
DSGIRLPEIKFQFHVKAEVLDMADNAFDDEYLKCTDRMEIKYVPQLLKEEKASHQQLDTVWENAKAKWAARKTQIFLPMNFKDNHGIALMAYISEAQE

SEQ ID NO: 22832 - protein, 14 aa, Artificial Sequence
  Synthetic polypeptide
TLELDCLRSNSNSM

SEQ ID NO: 22833 - protein, 14 aa, Artificial Sequence
  Synthetic polypeptide
TLELDCLRSNSNSM

SEQ ID NO: 22834 - protein, 14 aa, Artificial Sequence
  Synthetic polypeptide
TLELDCLRSNSNSM

SEQ ID NO: 22835 - protein, 14 aa, Artificial Sequence
  Synthetic polypeptide
TLELDCLRSNSNSM

SEQ ID NO: 22836 - protein, 14 aa, Artificial Sequence
  Synthetic polypeptide
TLELDCLRSNSNSM

SEQ ID NO: 22837 - protein, 14 aa, Artificial Sequence
  Synthetic polypeptide
TLELDCLRSNSNSM

SEQ ID NO: 22838 - protein, 14 aa, Artificial Sequence
  Synthetic polypeptide
TLELDCLRSNSNSM

SEQ ID NO: 22839 - protein, 9 aa, Artificial Sequence
  Synthetic polypeptide
DQIPIPCEG

SEQ ID NO: 22840 - protein, 9 aa, Artificial Sequence
  Synthetic polypeptide
DQIPIPCEG

SEQ ID NO: 22841 - protein, 9 aa, Artificial Sequence
  Synthetic polypeptide
DQIPIPCEG

SEQ ID NO: 22842 - protein, 9 aa, Artificial Sequence
  Synthetic polypeptide
DQIPIPCEG

SEQ ID NO: 22843 - protein, 9 aa, Artificial Sequence
  Synthetic polypeptide
DQIPIPCEG

SEQ ID NO: 22844 - protein, 9 aa, Artificial Sequence
  Synthetic polypeptide
DQIPIPCEG

SEQ ID NO: 22845 - protein, 9 aa, Artificial Sequence
  Synthetic polypeptide
DQIPIPCEG

SEQ ID NO: 22846 - protein, 358 aa, Artificial Sequence
  Synthetic polypeptide
DSGIRLPEIKFQFHVKAEVLDMADNAFDDEYLKCTDRMEIKYVPQLLKEEKASHQQLDTVWENAKAKWAARKTQIFLPMNFKDNHGIALMAYISEAQEQTPFYHLFSEAVKMAGQSREDYIYGFQFKAFHFYLTRALQLLRKPCEASSKTVVYRTSQGTSFTFGGLNQARFGHFTLAYSAKPQAANDQLTVLSIYTCLGVDIENFLDKESERITLIPLNEVFQVSQEGAGNNLILQSINKTCSHYECAFLGGLKTENCIENLEYFQPIYVYNPGEKNQKLEDHSEKNWKLEDHGEKNQKLEDHGVKILEPTQIPAPGPVPVPGPKSHPSASSGKLLLPQFGMVIILISVSAINLFVAL

SEQ ID NO: 22847 - protein, 192 aa, Artificial Sequence
  Synthetic polypeptide
DSGIRLPEIKFQFHVKAEVLDMADNAFDDEYLKCTDRMEIKYVPQLLKEEKASHQQLDTVWENAKAKWAARKTQIFLPMNFKDNHGIALMAYISEAQEQTPFYHLFSEAVKMAGQSREDYIYGFQFKAFHFYLTRALQLLRKPCEASSKTVVYRTSQGTSFTFGGLNQARFGHFTLAYSAKPQAANDQLTVL

SEQ ID NO: 22848 - protein, 120 aa, Artificial Sequence
  Synthetic polypeptide
DSGIRLPEIKFQFHVKAEVLDMADNAFDDEYLKCTDRMEIKYVPQLLKEEKASHQQLDTVWENAKAKWAARKTQIFLPMNFKDNHGIALMAYISEAQEQTPFYHLFSEAVKMAGQSREDY

SEQ ID NO: 22849 - protein, 369 aa, Artificial Sequence
  Synthetic polypeptide
DSGIRLPEIKFQFHVKAEVLDMADNAFDDEYLKCTDRMEIKYVPQLLKEEKASHQQLDTVWENAKAKWAARKTQIFLPMNFKDNHGIALMAYISEAQEQTPFYHLFSEAVKMAGQSREDYIYGFQFKAFHFYLTRALQLLRKPCEASSKTVVYRTSQGTSFTFGGLNQARFGHFTLAYSAKPQAANDQLTVLSIYTCLGVDIENFLDKESERITLIPLNEVFQVSQEGAGNNLILQSINKTCSHYECAFLGGLKTENCIENLEYFQPIYVYNPGEKNQKLEDHSEKNWKLEDHGEKNQKLEDHGVKILEPTQIPEDKSQGNINNPTPGPVPVPGPKSHPSASSGKLLLPQFGMVIILISVSAINLFVAL

SEQ ID NO: 22850 - protein, 380 aa, Artificial Sequence
  Synthetic polypeptide
DSGIRLPEIKFQFHVKAEVLDMADNAFDDEYLKCTDRMEIKYVPQLLKEEKASHQQLDTVWENAKAKWAARKTQIFLPMNFKDNHGIALMAYISEAQEQTPFYHLFSEAVKMAGQSREDYIYGFQFKAFHFYLTRALQLLRKPCEASSKTVVYRTSQGTSFTFGGLNQARFGHFTLAYSAKPQAANDQLTVLSIYTCLGVDIENFLDKESERITLIPLNEVFQVSQEGAGNNLILQSINKTCSHYECAFLGGLKTENCIENLEYFQPIYVYNPGEKNQKLEDHSEKNWKLEDHGEKNQKLEDHGVKILEPTQIPGMKIPEPFPLPEDKSQGNINNPTPGPVPVPGPKSHPSASSGKLLLPQFGMVIILISVSAINLFVAL

SEQ ID NO: 22851 - protein, 165 aa, Artificial Sequence
  Synthetic polypeptide
DSGIRLPEIKFQFHVKAEVLDMADNAFDDEYLKCTDRMEIKYVPQLLKEEKASHQQLDTVWENAKAKWAARKTQIFLPMNFKDNHGIALMAYISEAQEQTPFYHLFSEAVKMAGQSREDYIYGFQFKAFHFYLTRALQLLRKPCEASSKTVVYRTSQGTSFTFGG

SEQ ID NO: 22852 - protein, 48 aa, Artificial Sequence
  Synthetic polypeptide
GWAWWLTPVIPALWKAEVRKTRSLKTIVRKTGSLKTMVRKTRSLKTMV

SEQ ID NO: 22853 - protein, 48 aa, Artificial Sequence; identical to SEQ ID NO: 22852
  Synthetic polypeptide

SEQ ID NO: 22854 - protein, 48 aa, Artificial Sequence; identical to SEQ ID NO: 22852
  Synthetic polypeptide

SEQ ID NO: 22855 - protein, 48 aa, Artificial Sequence; identical to SEQ ID NO: 22852
  Synthetic polypeptide

SEQ ID NO: 22856 - protein, 8 aa, Artificial Sequence
  Synthetic polypeptide
SQRFGRPR

SEQ ID NO: 22857 - protein, 8 aa, Artificial Sequence
  Synthetic polypeptide
SQRFGRPR

SEQ ID NO: 22858 - protein, 8 aa, Artificial Sequence
  Synthetic polypeptide
SQRFGRPR

SEQ ID NO: 22859 - protein, 8 aa, Artificial Sequence
  Synthetic polypeptide
SQRFGRPR

SEQ ID NO: 22860 - protein, 101 aa, Artificial Sequence
  Synthetic polypeptide
MGMVAHACNPSALEGRGEKNQKLEDHSEKNWKLEDHGEKNQKLEDHGVKILEPTQIPAPGPVPVPGPKSHPSASSGKLLLPQFGMVIILISVSAINLFVAL

SEQ ID NO: 22861 - protein, 112 aa, Artificial Sequence
  Synthetic polypeptide
MGMVAHACNPSALEGRGEKNQKLEDHSEKNWKLEDHGEKNQKLEDHGVKILEPTQIPEDKSQGNINNPTPGPVPVPGPKSHPSASSGKLLLPQFGMVIILISVSAINLFVAL

SEQ ID NO: 22862 - protein, 123 aa, Artificial Sequence
  Synthetic polypeptide
MGMVAHACNPSALEGRGEKNQKLEDHSEKNWKLEDHGEKNQKLEDHGVKILEPTQIPGMKIPEPFPLPEDKSQGNINNPTPGPVPVPGPKSHPSASSGKLLLPQFGMVIILISVSAINLFVAL

SEQ ID NO: 22863 - protein, 99 aa, Artificial Sequence
  Synthetic polypeptide
MGMVAHACNPSALEGRGEKNQKLEDHSEKNWKLEDHGEKNQKLEDHGVKILEPTQIPGMKIPEPFPLPGIKMIQLNEKPEDKSQGNINNPTPGPVPVPG

SEQ ID NO: 22864 - protein, 356 aa, Artificial Sequence
  Synthetic polypeptide
ASRGQLRAVQRLCHFYSAVMPSEAQCVIYHELQLSLACKVADKVLEGQLLETISQLYLSLGTERAYKSALDYTKRSLGIFIDLQKKEKEAHAWLQAGKIYYILRQSELVDLYIQVAQNVALYTGDPNLGLELFEAAGDIFFDGAWEREKAVSFYRDRALPLAVTTGNRKAELRLCNKLVALLATLEEPQEGLEFAHMALALSITLGDRLNERVAYHRLAALQHRLGHGELAEHFYLKALSLCNSPLEFDEETLYYVKVYLVLGDIIFYDLKDPFDAAGYYQLALAAAVDLGNKKAQLKIYTRLATIYHNFLLDREKSLFFYQKARTFATELNVRRVNLPPLPLCGWAPWLAPSHPR

SEQ ID NO: 22865 - protein, 356 aa, Artificial Sequence; identical to SEQ ID NO: 22864
  Synthetic polypeptide

SEQ ID NO: 22866 - protein, 163 aa, Artificial Sequence
  Synthetic polypeptide
ERVGASCGPSSGCATSTAPSCPARPSVSSTMSSSSPWPARWPTRCWRGSSWRPSASSTCPWAPSGPTNPHWTTPNEVWGFSLTSRRKRRRRMPGCKQGRSITSCGRASWWTSTSRWHRTWPCTQATPTWGWSCLRRLETSSSTGPGSGRKLCPSTGTGPCPWQ

SEQ ID NO: 22867 - protein, 163 aa, Artificial Sequence; identical to SEQ ID NO: 22866
  Synthetic polypeptide

SEQ ID NO: 22868 - protein, 66 aa, Artificial Sequence
  Synthetic polypeptide
ASRGQLRAVQRLCHFYSAVMPSEAQCVIYHELQLSLACKVADKVLEGQLLETISQLYLSLGTERAQ

SEQ ID NO: 22869 - protein, 67 aa, Artificial Sequence
  Synthetic polypeptide
ERVGASCGPSSGCATSTAPSCPARPSVSSTMSSSSPWPARWPTRCWRGSSWRPSASSTCPWAPSGPS

SEQ ID NO: 22870 - protein, 24 aa, Artificial Sequence
  Synthetic polypeptide
SQHFGRPRQADYEPTSASSWPLWV

SEQ ID NO: 22871 - protein, 24 aa, Artificial Sequence
  Synthetic polypeptide
SQHFGRPRQADYEPTSASSWPLWV

SEQ ID NO: 22872 - protein, 24 aa, Artificial Sequence
  Synthetic polypeptide
SQHFGRPRQADYEPTSASSWPLWV

SEQ ID NO: 22873 - protein, 66 aa, Artificial Sequence
  Synthetic polypeptide
MGAVAHACNPSTLGGRGKRITSLLLLPPGRSGCDSWCPSLVEPQVLPGQAASEDISGCRQLHGFPE

SEQ ID NO: 22874 - protein, 66 aa, Artificial Sequence; identical to SEQ ID NO: 22873
  Synthetic polypeptide

SEQ ID NO: 22875 - protein, 274 aa, Artificial Sequence
  Synthetic polypeptide
WALWLTPVIPALWEAEASGLRAYFCFLLAALGVTAGAHRLWSHRSYRAKLPLRIFLAVANSMAFQNDIFEWSRDHRAHHKYSETDADPHNARRGFFFSHIGWLFVRKHRDVIEKGRKLDVTDLLADPVVRIQRKYYKISVVLMCFVVPTLVPWYIWGESLWNSYFLASILRYTISLNISWLVNSAAHMYGNRPYDKHISPRQNPLVALGAIGEGFHNYHHTFPFDYSASEFGLNFNPTTWFIDFMCWLGLATDRKRATKPMIEARKARTGDSSA

SEQ ID NO: 22876 - protein, 200 aa, Artificial Sequence
  Synthetic polypeptide
WALWLTPVIPALWEAEASGLRAYFCFLLAALGVTAGAHRLWSHRSYRAKLPLRIFLAVANSMAFQNDIFEWSRDHRAHHKYSETDADPHNARRGFFFSHIGWLFVRKHRDVIEKGRKLDVTDLLADPVVRIQRNTQHIQKEGRALNQEAACEMLREWHQGHILKVTLPGLHILALLHTHCNHSEKCCLMLRALSVSLEVF

SEQ ID NO: 22877 - protein, 77 aa, Artificial Sequence
  Synthetic polypeptide
MGAVAHACNPSTLGGRGKRITSLLLLPPGRSGCDSWCPSLVEPQVLPGQAASEDISGCRQLHGFPGSSRSGPDPDAL

SEQ ID NO: 22878 - protein, 76 aa, Artificial Sequence
  Synthetic polypeptide
WALWLTPVIPALWEAEASGLRAYFCFLLAALGVTAGAHRLWSHRSYRAKLPLRIFLAVANSMAFQAAAEVVLTQMP

SEQ ID NO: 22879 - protein, 49 aa, Artificial Sequence
  Synthetic polypeptide
PATSRGCWTSSIRIIWEMAAKTVSKKTSLSKTRHLCWKVLRMVGMTLQL

SEQ ID NO: 22880 - protein, 49 aa, Artificial Sequence; identical to SEQ ID NO: 22879
  Synthetic polypeptide

SEQ ID NO: 22881 - protein, 44 aa, Artificial Sequence
  Synthetic polypeptide
MLLQEGVGPAAFVSSGRWLQRQYLRKPVYPRPGTYVGRSSEWLE

SEQ ID NO: 22882 - protein, 44 aa, Artificial Sequence; identical to SEQ ID NO: 22881
  Synthetic polypeptide

SEQ ID NO: 22883 - protein, 235 aa, Artificial Sequence
  Synthetic polypeptide
VPYTGPQNGWNDPPALNRVPKKKKMPENFMPPVPITSPIMNPLGDPQSQMLQQQPSAPVPLSSQSSFPQPHLPGGQPFHGVQQPLGQTGMPPSFSKPNIEGAPGAPIGNTFQHVQSLPTKKITKKPIPDEHLILKTTFEDLIQRCLSSATDPQTKRKLDDASKRLEFLYDKLREQTLSPTITSGLHNIARSIETRNYSEGLTMHTHIVSTSNFSETSAFMPVLKVVLTQANKLGV

SEQ ID NO: 22884 - protein, 235 aa, Artificial Sequence; identical to SEQ ID NO: 22883
  Synthetic polypeptide

SEQ ID NO: 22885 - protein, 235 aa, Artificial Sequence; identical to SEQ ID NO: 22883
  Synthetic polypeptide

SEQ ID NO: 22886 - protein, 235 aa, Artificial Sequence; identical to SEQ ID NO: 22883
  Synthetic polypeptide

SEQ ID NO: 22887 - protein, 235 aa, Artificial Sequence; identical to SEQ ID NO: 22883
  Synthetic polypeptide

SEQ ID NO: 22888 - protein, 235 aa, Artificial Sequence; identical to SEQ ID NO: 22883
  Synthetic polypeptide

SEQ ID NO: 22889 - protein, 235 aa, Artificial Sequence; identical to SEQ ID NO: 22883
  Synthetic polypeptide

SEQ ID NO: 22890 - protein, 235 aa, Artificial Sequence; identical to SEQ ID NO: 22883
  Synthetic polypeptide

SEQ ID NO: 22891 - protein, 235 aa, Artificial Sequence; identical to SEQ ID NO: 22883
  Synthetic polypeptide

SEQ ID NO: 22892 - protein, 235 aa, Artificial Sequence; identical to SEQ ID NO: 22883
  Synthetic polypeptide

SEQ ID NO: 22893 - protein, 235 aa, Artificial Sequence; identical to SEQ ID NO: 22883
  Synthetic polypeptide

SEQ ID NO: 22894 - protein, 235 aa, Artificial Sequence; identical to SEQ ID NO: 22883
  Synthetic polypeptide

SEQ ID NO: 22895 - protein, 235 aa, Artificial Sequence; identical to SEQ ID NO: 22883
  Synthetic polypeptide

SEQ ID NO: 22896 - protein, 235 aa, Artificial Sequence; identical to SEQ ID NO: 22883
  Synthetic polypeptide

SEQ ID NO: 22897 - protein, 235 aa, Artificial Sequence; identical to SEQ ID NO: 22883
  Synthetic polypeptide

SEQ ID NO: 22898 - protein, 235 aa, Artificial Sequence; identical to SEQ ID NO: 22883
  Synthetic polypeptide

SEQ ID NO: 22899 - protein, 37 aa, Artificial Sequence
  Synthetic polypeptide
AFTFTHNSPRASSSPLRFICGECPIQVLRMVGMTLQL

SEQ ID NO: 22900 - protein, 37 aa, Artificial Sequence; identical to SEQ ID NO: 22899
  Synthetic polypeptide

SEQ ID NO: 22901 - protein, 37 aa, Artificial Sequence; identical to SEQ ID NO: 22899
  Synthetic polypeptide

SEQ ID NO: 22902 - protein, 37 aa, Artificial Sequence; identical to SEQ ID NO: 22899
  Synthetic polypeptide

SEQ ID NO: 22903 - protein, 37 aa, Artificial Sequence; identical to SEQ ID NO: 22899
  Synthetic polypeptide

SEQ ID NO: 22904 - protein, 37 aa, Artificial Sequence; identical to SEQ ID NO: 22899
  Synthetic polypeptide

SEQ ID NO: 22905 - protein, 37 aa, Artificial Sequence; identical to SEQ ID NO: 22899
  Synthetic polypeptide

SEQ ID NO: 22906 - protein, 37 aa, Artificial Sequence; identical to SEQ ID NO: 22899
  Synthetic polypeptide

SEQ ID NO: 22907 - protein, 37 aa, Artificial Sequence; identical to SEQ ID NO: 22899
  Synthetic polypeptide

SEQ ID NO: 22908 - protein, 37 aa, Artificial Sequence; identical to SEQ ID NO: 22899
  Synthetic polypeptide

SEQ ID NO: 22909 - protein, 37 aa, Artificial Sequence; identical to SEQ ID NO: 22899
  Synthetic polypeptide

SEQ ID NO: 22910 - protein, 37 aa, Artificial Sequence; identical to SEQ ID NO: 22899
  Synthetic polypeptide

SEQ ID NO: 22911 - protein, 37 aa, Artificial Sequence; identical to SEQ ID NO: 22899
  Synthetic polypeptide

SEQ ID NO: 22912 - protein, 37 aa, Artificial Sequence; identical to SEQ ID NO: 22899
  Synthetic polypeptide

SEQ ID NO: 22913 - protein, 37 aa, Artificial Sequence; identical to SEQ ID NO: 22899
  Synthetic polypeptide

SEQ ID NO: 22914 - protein, 37 aa, Artificial Sequence; identical to SEQ ID NO: 22899
  Synthetic polypeptide

SEQ ID NO: 22915 - protein, 37 aa, Artificial Sequence; identical to SEQ ID NO: 22899
  Synthetic polypeptide

SEQ ID NO: 22916 - protein, 16 aa, Artificial Sequence
  Synthetic polypeptide
GSFVVSALYRSSEWLE

SEQ ID NO: 22917 - protein, 16 aa, Artificial Sequence
  Synthetic polypeptide
GSFVVSALYRSSEWLE

SEQ ID NO: 22918 - protein, 16 aa, Artificial Sequence
  Synthetic polypeptide
GSFVVSALYRSSEWLE

SEQ ID NO: 22919 - protein, 16 aa, Artificial Sequence
  Synthetic polypeptide
GSFVVSALYRSSEWLE

SEQ ID NO: 22920 - protein, 16 aa, Artificial Sequence
  Synthetic polypeptide
GSFVVSALYRSSEWLE

SEQ ID NO: 22921 - protein, 16 aa, Artificial Sequence
  Synthetic polypeptide
GSFVVSALYRSSEWLE

SEQ ID NO: 22922 - protein, 16 aa, Artificial Sequence
  Synthetic polypeptide
GSFVVSALYRSSEWLE

SEQ ID NO: 22923 - protein, 16 aa, Artificial Sequence
  Synthetic polypeptide
GSFVVSALYRSSEWLE

SEQ ID NO: 22924 - protein, 16 aa, Artificial Sequence
  Synthetic polypeptide
GSFVVSALYRSSEWLE

SEQ ID NO: 22925 - protein, 16 aa, Artificial Sequence
  Synthetic polypeptide
GSFVVSALYRSSEWLE

SEQ ID NO: 22926 - protein, 16 aa, Artificial Sequence
  Synthetic polypeptide
GSFVVSALYRSSEWLE

SEQ ID NO: 22927 - protein, 16 aa, Artificial Sequence
  Synthetic polypeptide
GSFVVSALYRSSEWLE

SEQ ID NO: 22928 - protein, 16 aa, Artificial Sequence
  Synthetic polypeptide
GSFVVSALYRSSEWLE

SEQ ID NO: 22929 - protein, 16 aa, Artificial Sequence
  Synthetic polypeptide
GSFVVSALYRSSEWLE

SEQ ID NO: 22930 - protein, 16 aa, Artificial Sequence
  Synthetic polypeptide
GSFVVSALYRSSEWLE

SEQ ID NO: 22931 - protein, 16 aa, Artificial Sequence
  Synthetic polypeptide
GSFVVSALYRSSEWLE

SEQ ID NO: 22932 - protein, 16 aa, Artificial Sequence
  Synthetic polypeptide
GSFVVSALYRSSEWLE

SEQ ID NO: 22933 - protein, 137 aa, Artificial Sequence
  Synthetic polypeptide
VPYTGPQNGWNDPPALNRVPKKKKMPENFMPPVPITSPIMNPLGDPQSQMLQQQPSAPVPLSSQSSFPQPHLPGGQPFHGVQQPLGQTGMPPSFSKPNIEGAPGAPIGNTFQHVQSLPTKKITKKPIPDEHLILKTT

SEQ ID NO: 22934 - protein, 52 aa, Artificial Sequence
  Synthetic polypeptide
PQPGEQRKTPSLQKKNVKISLSTSPAVSLRNRGVSNVSTSAACCSSYFKRLP

SEQ ID NO: 22935 - protein, 52 aa, Artificial Sequence; identical to SEQ ID NO: 22934
  Synthetic polypeptide

SEQ ID NO: 22936 - protein, 52 aa, Artificial Sequence; identical to SEQ ID NO: 22934
  Synthetic polypeptide

SEQ ID NO: 22937 - protein, 52 aa, Artificial Sequence; identical to SEQ ID NO: 22934
  Synthetic polypeptide

SEQ ID NO: 22938 - protein, 52 aa, Artificial Sequence; identical to SEQ ID NO: 22934
  Synthetic polypeptide

SEQ ID NO: 22939 - protein, 52 aa, Artificial Sequence; identical to SEQ ID NO: 22934
  Synthetic polypeptide

SEQ ID NO: 22940 - protein, 52 aa, Artificial Sequence; identical to SEQ ID NO: 22934
  Synthetic polypeptide

SEQ ID NO: 22941 - protein, 52 aa, Artificial Sequence; identical to SEQ ID NO: 22934
  Synthetic polypeptide

SEQ ID NO: 22942 - protein, 52 aa, Artificial Sequence; identical to SEQ ID NO: 22934
  Synthetic polypeptide

SEQ ID NO: 22943 - protein, 52 aa, Artificial Sequence; identical to SEQ ID NO: 22934
  Synthetic polypeptide

SEQ ID NO: 22944 - protein, 52 aa, Artificial Sequence; identical to SEQ ID NO: 22934
  Synthetic polypeptide

SEQ ID NO: 22945 - protein, 52 aa, Artificial Sequence; identical to SEQ ID NO: 22934
  Synthetic polypeptide

SEQ ID NO: 22946 - protein, 360 aa, Artificial Sequence
  Synthetic polypeptide
KLAYQPAQPYPFGTGGSAMYRPQQPVAPPTSNAYPNTPYISSASSYTGQSQLYAAQHQASSPTSSPATSFPPPPSSGASFQHGGPGAPPSSSAYALPPGTTGTLPAASELPASQRTENQSIQDQAPMLEGPQNGWNDPPALNRVPKKKKMPENFMPPVPITSPIMNPLGDPQSQMLQQQPSAPVPLSSQSSFPQPHLPGGQPFHGVQQPLGQTGMPPSFSKPNIEGAPGAPIGNTFQHVQSLPTKKITKKPIPDEHLILKTTFEDLIQRCLSSATDPQTKRKLDDASKRLEFLYDKLREQTLSPTITSGLHNIARSIETRNYSEGLTMHTHIVSTSNFSETSAFMPVLKVVLTQANKLGV

SEQ ID NO: 22947 - protein, 360 aa, Artificial Sequence; identical to SEQ ID NO: 22946
  Synthetic polypeptide

SEQ ID NO: 22948 - protein, 347 aa, Artificial Sequence
  Synthetic polypeptide
KLAYQPAQPYPFGTGGSAMYRPQQPVAPPTSNAYPNTPYISSASSYTGQSQLYAAQHQASSPTSSPATSFPPPPSSGASFQHGGPGAPPSSSAYALPPGTTGTLPAASELPASQRTGPQNGWNDPPALNRVPKKKKMPENFMPPVPITSPIMNPLGDPQSQMLQQQPSAPVPLSSQSSFPQPHLPGGQPFHGVQQPLGQTGMPPSFSKPNIEGAPGAPIGNTFQHVQSLPTKKITKKPIPDEHLILKTTFEDLIQRCLSSATDPQTKRKLDDASKRLEFLYDKLREQTLSPTITSGLHNIARSIETRNYSEGLTMHTHIVSTSNFSETSAFMPVLKVVLTQANKLGV

SEQ ID NO: 22949 - protein, 347 aa, Artificial Sequence; identical to SEQ ID NO: 22948
  Synthetic polypeptide

SEQ ID NO: 22950 - protein, 347 aa, Artificial Sequence; identical to SEQ ID NO: 22948
  Synthetic polypeptide

SEQ ID NO: 22951 - protein, 347 aa, Artificial Sequence; identical to SEQ ID NO: 22948
  Synthetic polypeptide

SEQ ID NO: 22952 - protein, 347 aa, Artificial Sequence; identical to SEQ ID NO: 22948
  Synthetic polypeptide

SEQ ID NO: 22953 - protein, 347 aa, Artificial Sequence; identical to SEQ ID NO: 22948
  Synthetic polypeptide

SEQ ID NO: 22954 - protein, 332 aa, Artificial Sequence
  Synthetic polypeptide
KLAYQPAQPYPFGTGGSAMYRPQQPVAPPTSNAYPNTPYISSASSYTGQSQLYAAQHQASSPTSSPATSFPPPPSSGASFQHGGPGAPPSSSAYALPPGTTGPQNGWNDPPALNRVPKKKKMPENFMPPVPITSPIMNPLGDPQSQMLQQQPSAPVPLSSQSSFPQPHLPGGQPFHGVQQPLGQTGMPPSFSKPNIEGAPGAPIGNTFQHVQSLPTKKITKKPIPDEHLILKTTFEDLIQRCLSSATDPQTKRKLDDASKRLEFLYDKLREQTLSPTITSGLHNIARSIETRNYSEGLTMHTHIVSTSNFSETSAFMPVLKVVLTQANKLGV

SEQ ID NO: 22955 - protein, 332 aa, Artificial Sequence; identical to SEQ ID NO: 22954
  Synthetic polypeptide

SEQ ID NO: 22956 - protein, 332 aa, Artificial Sequence; identical to SEQ ID NO: 22954
  Synthetic polypeptide

SEQ ID NO: 22957 - protein, 332 aa, Artificial Sequence; identical to SEQ ID NO: 22954
  Synthetic polypeptide

SEQ ID NO: 22958 - protein, 518 aa, Artificial Sequence
  Synthetic polypeptide
TSTLLWPLRNLDSQQEDLIEKVVILRKAVQLTQAMDTSTVGVLLAAKMSQYANLLAAQGSIAAALAFLPDNTNQPNIMQLRDRLCRAQGEPVAGHESPKIPYEKQQLPKGRPGPVAGHHQMPRVQTQQYYPHGENPPPPGFIMHGNVNPNAAGQLPTSPGHMHTQVPPYPQPQPYQPAQPYPFGTGGSAMYRPQQPVAPPTSNAYPNTPYISSASSYTGQSQLYAAQHQASSPTSSPATSFPPPPSSGASFQHGGPGAPPSSSAYALPPGTTGTLPAASELPASQRTGPQNGWNDPPALNRVPKKKKMPENFMPPVPITSPIMNPLGDPQSQMLQQQPSAPVPLSSQSSFPQPHLPGGQPFHGVQQPLGQTGMPPSFSKPNIEGAPGAPIGNTFQHVQSLPTKKITKKPIPDEHLILKTTFEDLIQRCLSSATDPQTKRKLDDASKRLEFLYDKLREQTLSPTITSGLHNIARSIETRNYSEGLTMHTHIVSTSNFSETSAFMPVLKVVLTQANKLGV

SEQ ID NO: 22959 - protein, 518 aa, Artificial Sequence; identical to SEQ ID NO: 22958
  Synthetic polypeptide

SEQ ID NO: 22960 - protein, 518 aa, Artificial Sequence; identical to SEQ ID NO: 22958
  Synthetic polypeptide

SEQ ID NO: 22961 - protein, 518 aa, Artificial Sequence; identical to SEQ ID NO: 22958
  Synthetic polypeptide

SEQ ID NO: 22962 - protein, 518 aa, Artificial Sequence; identical to SEQ ID NO: 22958
  Synthetic polypeptide

SEQ ID NO: 22963 - protein, 26 aa, Artificial Sequence
  Synthetic polypeptide
RGPQPPGHKPVPFCGLLGTWTHSKRI

SEQ ID NO: 22964 - protein, 26 aa, Artificial Sequence
  Synthetic polypeptide
RGPQPPGHKPVPFCGLLGTWTHSKRI

SEQ ID NO: 22965 - protein, 26 aa, Artificial Sequence
  Synthetic polypeptide
RGPQPPGHKPVPFCGLLGTWTHSKRI

SEQ ID NO: 22966 - protein, 26 aa, Artificial Sequence
  Synthetic polypeptide
RGPQPPGHKPVPFCGLLGTWTHSKRI

SEQ ID NO: 22967 - protein, 26 aa, Artificial Sequence
  Synthetic polypeptide
RGPQPPGHKPVPFCGLLGTWTHSKRI

SEQ ID NO: 22968 - protein, 26 aa, Artificial Sequence
  Synthetic polypeptide
RGPQPPGHKPVPFCGLLGTWTHSKRI

SEQ ID NO: 22969 - protein, 26 aa, Artificial Sequence
  Synthetic polypeptide
RGPQPPGHKPVPFCGLLGTWTHSKRI

SEQ ID NO: 22970 - protein, 26 aa, Artificial Sequence
  Synthetic polypeptide
RGPQPPGHKPVPFCGLLGTWTHSKRI

SEQ ID NO: 22971 - protein, 26 aa, Artificial Sequence
  Synthetic polypeptide
RGPQPPGHKPVPFCGLLGTWTHSKRI

SEQ ID NO: 22972 - protein, 26 aa, Artificial Sequence
  Synthetic polypeptide
RGPQPPGHKPVPFCGLLGTWTHSKRI

SEQ ID NO: 22973 - protein, 26 aa, Artificial Sequence
  Synthetic polypeptide
RGPQPPGHKPVPFCGLLGTWTHSKRI

SEQ ID NO: 22974 - protein, 26 aa, Artificial Sequence
  Synthetic polypeptide
RGPQPPGHKPVPFCGLLGTWTHSKRI

SEQ ID NO: 22975 - protein, 26 aa, Artificial Sequence
  Synthetic polypeptide
RGPQPPGHKPVPFCGLLGTWTHSKRI

SEQ ID NO: 22976 - protein, 26 aa, Artificial Sequence
  Synthetic polypeptide
RGPQPPGHKPVPFCGLLGTWTHSKRI

SEQ ID NO: 22977 - protein, 26 aa, Artificial Sequence
  Synthetic polypeptide
RGPQPPGHKPVPFCGLLGTWTHSKRI

SEQ ID NO: 22978 - protein, 26 aa, Artificial Sequence
  Synthetic polypeptide
RGPQPPGHKPVPFCGLLGTWTHSKRI

SEQ ID NO: 22979 - protein, 26 aa, Artificial Sequence
  Synthetic polypeptide
RGPQPPGHKPVPFCGLLGTWTHSKRI

SEQ ID NO: 22980 - protein, 26 aa, Artificial Sequence
  Synthetic polypeptide
RGPQPPGHKPVPFCGLLGTWTHSKRI

SEQ ID NO: 22981 - protein, 10 aa, Artificial Sequence
  Synthetic polypeptide
EPGLTARGSD

SEQ ID NO: 22982 - protein, 10 aa, Artificial Sequence
  Synthetic polypeptide
EPGLTARGSD

SEQ ID NO: 22983 - protein, 10 aa, Artificial Sequence
  Synthetic polypeptide
EPGLTARGSD

SEQ ID NO: 22984 - protein, 10 aa, Artificial Sequence
  Synthetic polypeptide
EPGLTARGSD

SEQ ID NO: 22985 - protein, 10 aa, Artificial Sequence
  Synthetic polypeptide
EPGLTARGSD

SEQ ID NO: 22986 - protein, 10 aa, Artificial Sequence
  Synthetic polypeptide
EPGLTARGSD

SEQ ID NO: 22987 - protein, 10 aa, Artificial Sequence
  Synthetic polypeptide
EPGLTARGSD

SEQ ID NO: 22988 - protein, 10 aa, Artificial Sequence
  Synthetic polypeptide
EPGLTARGSD

SEQ ID NO: 22989 - protein, 10 aa, Artificial Sequence
  Synthetic polypeptide
EPGLTARGSD

SEQ ID NO: 22990 - protein, 10 aa, Artificial Sequence
  Synthetic polypeptide
EPGLTARGSD

SEQ ID NO: 22991 - protein, 10 aa, Artificial Sequence
  Synthetic polypeptide
EPGLTARGSD

SEQ ID NO: 22992 - protein, 10 aa, Artificial Sequence
  Synthetic polypeptide
EPGLTARGSD

SEQ ID NO: 22993 - protein, 10 aa, Artificial Sequence
  Synthetic polypeptide
EPGLTARGSD

SEQ ID NO: 22994 - protein, 10 aa, Artificial Sequence
  Synthetic polypeptide
EPGLTARGSD

SEQ ID NO: 22995 - protein, 10 aa, Artificial Sequence
  Synthetic polypeptide
EPGLTARGSD

SEQ ID NO: 22996 - protein, 10 aa, Artificial Sequence
  Synthetic polypeptide
EPGLTARGSD

SEQ ID NO: 22997 - protein, 10 aa, Artificial Sequence
  Synthetic polypeptide
EPGLTARGSD

SEQ ID NO: 22998 - protein, 10 aa, Artificial Sequence
  Synthetic polypeptide
EPGLTARGSD

SEQ ID NO: 22999 - protein, 404 aa, Artificial Sequence
  Synthetic polypeptide
TSTLLWPLRNLDSQQEDLIEKVVILRKAVQLTQAMDTSTVGVLLAAKMSQYANLLAAQGSIAAALAFLPDNTNQPNIMQLRDRLCRAQGEPVAGHESPKIPYEKQQLPKGRPGPVAGHHQMPRVQTQQYYPHGENPPPPGFIMHGNVNPNAAGQLPTSPGHMHTQVPPYPQPQRPQNGWNDPPALNRVPKKKKMPENFMPPVPITSPIMNPLGDPQSQMLQQQPSAPVPLSSQSSFPQPHLPGGQPFHGVQQPLGQTGMPPSFSKPNIEGAPGAPIGNTFQHVQSLPTKKITKKPIPDEHLILKTTFEDLIQRCLSSATDPQTKRKLDDASKRLEFLYDKLREQTLSPTITSGLHNIARSIETRNYSEGLTMHTHIVSTSNFSETSAFMPVLKVVLTQANKLGV

SEQ ID NO: 23000 - protein, 404 aa, Artificial Sequence; identical to SEQ ID NO: 22999
  Synthetic polypeptide

SEQ ID NO: 23001 - protein, 404 aa, Artificial Sequence; identical to SEQ ID NO: 22999
  Synthetic polypeptide

SEQ ID NO: 23002 - protein, 404 aa, Artificial Sequence; identical to SEQ ID NO: 22999
  Synthetic polypeptide

SEQ ID NO: 23003 - protein, 503 aa, Artificial Sequence
  Synthetic polypeptide
TSTLLWPLRNLDSQQEDLIEKVVILRKAVQLTQAMDTSTVGVLLAAKMSQYANLLAAQGSIAAALAFLPDNTNQPNIMQLRDRLCRAQGEPVAGHESPKIPYEKQQLPKGRPGPVAGHHQMPRVQTQQYYPHGENPPPPGFIMHGNVNPNAAGQLPTSPGHMHTQVPPYPQPQPYQPAQPYPFGTGGSAMYRPQQPVAPPTSNAYPNTPYISSASSYTGQSQLYAAQHQASSPTSSPATSFPPPPSSGASFQHGGPGAPPSSSAYALPPGTTGPQNGWNDPPALNRVPKKKKMPENFMPPVPITSPIMNPLGDPQSQMLQQQPSAPVPLSSQSSFPQPHLPGGQPFHGVQQPLGQTGMPPSFSKPNIEGAPGAPIGNTFQHVQSLPTKKITKKPIPDEHLILKTTFEDLIQRCLSSATDPQTKRKLDDASKRLEFLYDKLREQTLSPTITSGLHNIARSIETRNYSEGLTMHTHIVSTSNFSETSAFMPVLKVVLTQANKLGV

SEQ ID NO: 23004 - protein, 503 aa, Artificial Sequence; identical to SEQ ID NO: 23003
  Synthetic polypeptide

SEQ ID NO: 23005 - protein, 503 aa, Artificial Sequence; identical to SEQ ID NO: 23003
  Synthetic polypeptide

SEQ ID NO: 23006 - protein, 531 aa, Artificial Sequence
  Synthetic polypeptide
TSTLLWPLRNLDSQQEDLIEKVVILRKAVQLTQAMDTSTVGVLLAAKMSQYANLLAAQGSIAAALAFLPDNTNQPNIMQLRDRLCRAQGEPVAGHESPKIPYEKQQLPKGRPGPVAGHHQMPRVQTQQYYPHGENPPPPGFIMHGNVNPNAAGQLPTSPGHMHTQVPPYPQPQPYQPAQPYPFGTGGSAMYRPQQPVAPPTSNAYPNTPYISSASSYTGQSQLYAAQHQASSPTSSPATSFPPPPSSGASFQHGGPGAPPSSSAYALPPGTTGTLPAASELPASQRTENQSIQDQAPMLEGPQNGWNDPPALNRVPKKKKMPENFMPPVPITSPIMNPLGDPQSQMLQQQPSAPVPLSSQSSFPQPHLPGGQPFHGVQQPLGQTGMPPSFSKPNIEGAPGAPIGNTFQHVQSLPTKKITKKPIPDEHLILKTTFEDLIQRCLSSATDPQTKRKLDDASKRLEFLYDKLREQTLSPTITSGLHNIARSIETRNYSEGLTMHTHIVSTSNFSETSAFMPVLKVVLTQANKLGV

SEQ ID NO: 23007 - protein, 549 aa, Artificial Sequence
  Synthetic polypeptide
TSTLLWPLRNLDSQQEDLIEKVVILRKAVQLTQAMDTSTVGVLLAAKMSQYANLLAAQGSIAAALAFLPDNTNQPNIMQLRDRLCRAQGEPVAGHESPKIPYEKQQLPKGRPGPVAGHHQMPRVQTQQYYPHVRIAPTVTTWSNKTPTALPSHPPAASPSDTQGENPPPPGFIMHGNVNPNAAGQLPTSPGHMHTQVPPYPQPQPYQPAQPYPFGTGGSAMYRPQQPVAPPTSNAYPNTPYISSASSYTGQSQLYAAQHQASSPTSSPATSFPPPPSSGASFQHGGPGAPPSSSAYALPPGTTGTLPAASELPASQRTGPQNGWNDPPALNRVPKKKKMPENFMPPVPITSPIMNPLGDPQSQMLQQQPSAPVPLSSQSSFPQPHLPGGQPFHGVQQPLGQTGMPPSFSKPNIEGAPGAPIGNTFQHVQSLPTKKITKKPIPDEHLILKTTFEDLIQRCLSSATDPQTKRKLDDASKRLEFLYDKLREQTLSPTITSGLHNIARSIETRNYSEGLTMHTHIVSTSNFSETSAFMPVLKVVLTQANKLGV

SEQ ID NO: 23008 - protein, 534 aa, Artificial Sequence
  Synthetic polypeptide
TSTLLWPLRNLDSQQEDLIEKVVILRKAVQLTQAMDTSTVGVLLAAKMSQYANLLAAQGSIAAALAFLPDNTNQPNIMQLRDRLCRAQGEPVAGHESPKIPYEKQQLPKGRPGPVAGHHQMPRVQTQQYYPHVRIAPTVTTWSNKTPTALPSHPPAASPSDTQGENPPPPGFIMHGNVNPNAAGQLPTSPGHMHTQVPPYPQPQPYQPAQPYPFGTGGSAMYRPQQPVAPPTSNAYPNTPYISSASSYTGQSQLYAAQHQASSPTSSPATSFPPPPSSGASFQHGGPGAPPSSSAYALPPGTTGPQNGWNDPPALNRVPKKKKMPENFMPPVPITSPIMNPLGDPQSQMLQQQPSAPVPLSSQSSFPQPHLPGGQPFHGVQQPLGQTGMPPSFSKPNIEGAPGAPIGNTFQHVQSLPTKKITKKPIPDEHLILKTTFEDLIQRCLSSATDPQTKRKLDDASKRLEFLYDKLREQTLSPTITSGLHNIARSIETRNYSEGLTMHTHIVSTSNFSETSAFMPVLKVVLTQANKLGV

SEQ ID NO: 23009 - protein, 175 aa, Artificial Sequence
  Synthetic polypeptide
TSTLLWPLRNLDSQQEDLIEKVVILRKAVQLTQAMDTSTVGVLLAAKMSQYANLLAAQGSIAAALAFLPDNTNQPNIMQLRDRLCRAQGEPVAGHESPKIPYEKQQLPKGRPGPVAGHHQMPRVQTQQYYPHGENPPPPGFIMHGNVNPNAAGQLPTSPGHMHTQVPPYPQPQRK

SEQ ID NO: 23010 - protein, 124 aa, Artificial Sequence
  Synthetic polypeptide
TSTLLWPLRNLDSQQEDLIEKVVILRKAVQLTQAMDTSTVGVLLAAKMSQYANLLAAQGSIAAALAFLPDNTNQPNIMQLRDRLCRAQGEPVAGHESPKIPYEKQQLPKGRPGPVAGHHQMPRV

SEQ ID NO: 23011 - protein, 46 aa, Artificial Sequence
  Synthetic polypeptide
TSTLLWPLRNLDSQQEDLIEKVVILRKAVQLTQAMDTSTVGVLLAA

SEQ ID NO: 23012 - protein, 50 aa, Artificial Sequence
  Synthetic polypeptide
KTGIAIWDRNAQLGHTLQEVLFQHGGRGTSSTCVTWWRRSPSHPTASPSW

SEQ ID NO: 23013 - protein, 50 aa, Artificial Sequence; identical to SEQ ID NO: 23012
  Synthetic polypeptide

SEQ ID NO: 23014 - protein, 38 aa, Artificial Sequence
  Synthetic polypeptide
VVLFKRQALPYGTETHSSAIHCRKSSFSTEAEVHRVHV

SEQ ID NO: 23015 - protein, 38 aa, Artificial Sequence; identical to SEQ ID NO: 23014
  Synthetic polypeptide

SEQ ID NO: 23016 - protein, 800 aa, Artificial Sequence
  Synthetic polypeptide
SSHISVQAEHEWFCLKDRHCHMGQKRTARPYTAGSPLSARRQRYIEYMCDMVAEEPITPHSKPILVRAVVMTPVPLFSKQRSGCRPFCEVYVGDERVASTSQEYDKMRDFKIEDGKAVIPLGVTVQGDVLIVIYHARSTLGGRLQAKMASMKMFQIQFHTGFVPRNATTVKFAKYDLDACDIQEKYPDLFQVNLEVEVEPRDRPSREAPPWENSSMRGLNPKILFSSREEQQDILSKFGKPELPRQPGSTAQYDAGAGSPEAEPTDSDSPPSSSADASRFLHTLDWQEEKEAETGAENASSKESESALMEDRDESEVSDEGGSPISSEGQEPRADPEPPGLAAGLVQQDLVFEVETPAVLPEPVPQEDGVDLLGLHSEVGAGPAVPPQACKAPSSNTDLLSCLLGPPEAASQGPPEDLLSEDPLLLASPAPPLSVQSTPRGGPPAAADPFGPLLPSSGNNSQPCSNPDLFGEFLNSDSVTVPPSFPSAHSAPPPSCSADFLHLGDLPGEPSKMTASSSNPDLLGGWAAWTETAASAVAPTPATEGPLFSPGGQPAPCGSQASWTKSQNPDPFADLGDLSSGLQGSPAGFPPGGFIPKTATTPKGSSSWQTSRPPAQGASWPPQAKPPPKACTQPRPNYASNFSVIGAREERGVRAPSFAQKPKVSENDFEDLLSNQGFSSRSDKKGPKTIAEMRKQDLAKDTDPLKLKLLDWIEGKERNIRALLSTLHTVLWDGESRWTPVGMADLVAPEQVKKHYRRAVLAVHPDKAAGQPYEQHAKMIFMELNDAWSEFENQGSRPLF

SEQ ID NO: 23017 - protein, 800 aa, Artificial Sequence; identical to SEQ ID NO: 23016
  Synthetic polypeptide

SEQ ID NO: 23018 - protein, 239 aa, Artificial Sequence
  Synthetic polypeptide
KLITVPDTLWILNRDLLPKEKNLETLLTLAFLEIDKAFSSHARLSADATLLTSGTTATVALLRDGIELVVASVGDSRAILCRKGKPMKLTIDHTPERKDEKERIKKCGGFVAWNSLGQPHVNGRLAMTRSIGDLDLKTSGVIAEPETKRIKLHHADDSFLVLTTDGINFMVNSQEICDFVNQCHDPNEAAHAVTEQAIQYGTEDNSTAVVVPFGAWGKYKNSEINFSFSRSFASSGRWA

SEQ ID NO: 23019 - protein, 38 aa, Artificial Sequence
  Synthetic polypeptide
DKDLDFHCCALKSLSQCLILCGFSIGICFLRRRTWKLC

SEQ ID NO: 23020 - protein, 38 aa, Artificial Sequence; identical to SEQ ID NO: 23019
  Synthetic polypeptide

SEQ ID NO: 23021 - protein, 38 aa, Artificial Sequence; identical to SEQ ID NO: 23019
  Synthetic polypeptide

SEQ ID NO: 23022 - protein, 38 aa, Artificial Sequence; identical to SEQ ID NO: 23019
  Synthetic polypeptide

SEQ ID NO: 23023 - protein, 194 aa, Artificial Sequence
  Synthetic polypeptide
KLITVPDTLWILNRDLLPKEKNLETLLTLAFLEIDKAFSSHARLSADATLLTSGTTATVALLRDGIELVVASVGDSRAILCRKGKPMKLTIDHTPERKDEKERIKKCGGFVAWNSLGQPHVNGRLAMTRSIGDLDLKTSGVIAEPETKRIKAIQYGTEDNSTAVVVPFGAWGKYKNSEINFSFSRSFASSGRWA

SEQ ID NO: 23024 - protein, 100 aa, Artificial Sequence
  Synthetic polypeptide
KLITVPDTLWILNRDLLPKEKNLETLLTLAFLEIDKAFSSHARLSADENCAWSAALDLEPVDTICGASVEREICLILSQVKESSGSYPGLREGSHISLSH

SEQ ID NO: 23025 - protein, 49 aa, Artificial Sequence
  Synthetic polypeptide
KLITVPDTLWILNRDLLPKEKNLETLLTLAFLEIDKAFSSHARLSADGM

SEQ ID NO: 23026 - protein, 132 aa, Artificial Sequence
  Synthetic polypeptide
ADLLSFLAFIFLPCWMLPALKHQAPNSSAFGLLDIHQWIARDSPAFGHRLKAALSASLLLRFWDSDWLPCSSACRWPAVGLHLVTVYEASTNELINEELGIAYPIIDGIPNMIPQAARMTRQSKKQEEVEQR

SEQ ID NO: 23027 - protein, 9 aa, Artificial Sequence
  Synthetic polypeptide
PYMKHQQTN

SEQ ID NO: 23028 - protein, 153 aa, Artificial Sequence
  Synthetic polypeptide
WLIMCQLDWIEGYRVLFLGVSVRVLPKEINISVSGLGDADSSSMWVGTIQSPASVGRIKQAEEGGMSRPAEFSGLHLSPMLDASCPQTSGPKFFSFWTLGHTSVDRQGFSGLRPQAEGCAVGFPTFEVLGLRLASLLFSLQMACCGTSPGDRI

SEQ ID NO: 23029 - protein, 183 aa, Artificial Sequence
  Synthetic polypeptide
LVAPAWMNRAGCGDSHHELLLQELPQEHTRKAKRIHRPLKELDHRHRLPEMAKNFCREDSYHSVVSCAAVVLTPMEPMIEMKKREEPEFPEPSKQNLSLKLTKDVDQEARCSHISRMPNSPSADWPLQGVEENGGIDSLPFRLMLQDCTAVKTLLLKMKRVLQEVHLSRMSVSNSTNKNCIIF

SEQ ID NO: 23030 - protein, 30 aa, Artificial Sequence
  Synthetic polypeptide
RNWITATGSLRWQKTFAGRTHITLSSHVPQ

SEQ ID NO: 23031 - protein, 30 aa, Artificial Sequence; identical to SEQ ID NO: 23030
  Synthetic polypeptide

SEQ ID NO: 23032 - protein, 30 aa, Artificial Sequence; identical to SEQ ID NO: 23030
  Synthetic polypeptide

SEQ ID NO: 23033 - protein, 30 aa, Artificial Sequence; identical to SEQ ID NO: 23030
  Synthetic polypeptide

SEQ ID NO: 23034 - protein, 40 aa, Artificial Sequence
  Synthetic polypeptide
DGKKLLPGGLISLCRLMCRSSSYSYGTNDRNEEKRRTRIS

SEQ ID NO: 23035 - protein, 40 aa, Artificial Sequence; identical to SEQ ID NO: 23034
  Synthetic polypeptide

SEQ ID NO: 23036 - protein, 40 aa, Artificial Sequence; identical to SEQ ID NO: 23034
  Synthetic polypeptide

SEQ ID NO: 23037 - protein, 40 aa, Artificial Sequence; identical to SEQ ID NO: 23034
  Synthetic polypeptide

SEQ ID NO: 23038 - protein, 420 aa, Artificial Sequence
  Synthetic polypeptide
LVAPAWMNRAGCGDSHHELLLQELPQEHTRKAKRIHRPLKELDHRHRLPEMAKNFCREDSYHSVVSCAAVVLTPMEPMIEMKKREEPEFPEPSKQNLSLKLTKDVDQEARCSHISRMPNSPSADWPLQGVEENGGIDSLPFRLMLQDCTAVKTLLLKMKRVLQESADMSPASSTTSLPVSPLTEEPVPFKDIMKDECSMLKLQLKEKDELISQLQEELGKVRHLQKAFASRVDKSTQTELLCYDGLNLKRLETVQGGREATYRNRIVSQNLSTRDRKAIHTPTEDRFRYSAADQTSPYKNKTCQLPSLCLSNFLKDKELAEVIKHSRGTYETLTSDVTQNLRATVGQSSLKPTAKTEGLSTFLEKPKDQVATARQHSTFTGRFGQPPRGPISLHMYSRKNVFLHHNLHSTELQTLGQQDG

SEQ ID NO: 23039 - protein, 420 aa, Artificial Sequence; identical to SEQ ID NO: 23038
  Synthetic polypeptide

SEQ ID NO: 23040 - protein, 197 aa, Artificial Sequence
  Synthetic polypeptide
LVAPAWMNRAGCGDSHHELLLQELPQEHTRKAKRIHRPLKELDHRHRLPEMAKNFCREDSYHSVVSCAAVVLTPMEPMIEMKKREEPEFPEPSKQNLSLKLTKDVDQEARCSHISRMPNSPSADWPLQGVEENGGIDSLPFRLMLQDCTAVKTLLLKMKRVLQESADMSPASSTTSLPVSPLTEEPVPFKTTYPREF

SEQ ID NO: 23041 - protein, 260 aa, Artificial Sequence
  Synthetic polypeptide
FHIMSADMSPASSTTSLPVSPLTEEPVPFKDIMKDECSMLKLQLKEKDELISQLQEELGKVRHLQKAFASRVDKSTQTELLCYDGLNLKRLETVQGGREATYRNRIVSQNLSTRDRKAIHTPTEDRFRYSAADQTSPYKNKTCQLPSLCLSNFLKDKELAEVIKHSRGTYETLTSDVTQNLRATVGQSSLKPTAKTEGLSTFLEKPKDQVATARQHSTFTGRFGQPPRGPISLHMYSRKNVFLHHNLHSTELQTLGQQDG

SEQ ID NO: 23042 - protein, 260 aa, Artificial Sequence; identical to SEQ ID NO: 23041
  Synthetic polypeptide

SEQ ID NO: 23043 - protein, 44 aa, Artificial Sequence
  Synthetic polypeptide
CCVTFSHPSQDGTSSCRKTGSGLLLIPHYECRHESSKQYHVTSC

SEQ ID NO: 23044 - protein, 44 aa, Artificial Sequence; identical to SEQ ID NO: 23043
  Synthetic polypeptide

SEQ ID NO: 23045 - protein, 44 aa, Artificial Sequence; identical to SEQ ID NO: 23043
  Synthetic polypeptide

SEQ ID NO: 23046 - protein, 44 aa, Artificial Sequence; identical to SEQ ID NO: 23043
  Synthetic polypeptide

SEQ ID NO: 23047 - protein, 37 aa, Artificial Sequence
  Synthetic polypeptide
FHIMSADMSPASSTTSLPVSPLTEEPVPFKTTYPREF

SEQ ID NO: 23048 - protein, 103 aa, Artificial Sequence
  Synthetic polypeptide
FHIMSADMSPASSTTSLPVSPLTEEPVPFKDIMKDECSMLKLQLKEKDELISQLQEELGKVRHLQKAFASRVDKSTQTELLCYDALWNPTCTEGLFKPVLIST

SEQ ID NO: 23049 - protein, 185 aa, Artificial Sequence
  Synthetic polypeptide
LERHTRNQEIQLLALAGGPFLVALGKSWHPEEFNCAHCKNTMAYIGFVEEKGALYCELCYEKFFAPECGRCQRKILGEVISALKQTWHVSCFVCVACGKPIRNNVFHLEDGEPYCETDYYALFGTICHGCEFPIEAGDMFLEALGYTWHDTCFVCSVCCESLEGQTFFSKKDKPLCKKHAHSVNF

SEQ ID NO: 23050 - protein, 185 aa, Artificial Sequence; identical to SEQ ID NO: 23049
  Synthetic polypeptide

SEQ ID NO: 23051 - protein, 185 aa, Artificial Sequence; identical to SEQ ID NO: 23049
  Synthetic polypeptide

SEQ ID NO: 23052 - protein, 185 aa, Artificial Sequence; identical to SEQ ID NO: 23049
  Synthetic polypeptide

SEQ ID NO: 23053 - protein, 19 aa, Artificial Sequence
  Synthetic polypeptide
SGILEIRKFNFWPWLEDHS

SEQ ID NO: 23054 - protein, 19 aa, Artificial Sequence
  Synthetic polypeptide
SGILEIRKFNFWPWLEDHS

SEQ ID NO: 23055 - protein, 19 aa, Artificial Sequence
  Synthetic polypeptide
SGILEIRKFNFWPWLEDHS

SEQ ID NO: 23056 - protein, 19 aa, Artificial Sequence
  Synthetic polypeptide
SGILEIRKFNFWPWLEDHS

SEQ ID NO: 23057 - protein, 19 aa, Artificial Sequence
  Synthetic polypeptide
SGILEIRKFNFWPWLEDHS

SEQ ID NO: 23058 - protein, 19 aa, Artificial Sequence
  Synthetic polypeptide
SGILEIRKFNFWPWLEDHS

SEQ ID NO: 23059 - protein, 50 aa, Artificial Sequence
  Synthetic polypeptide
KSGNSTSGLGWRTILSGTGEILAPRRIQLRSLQKYNGLHWICRGERSPVL

SEQ ID NO: 23060 - protein, 50 aa, Artificial Sequence; identical to SEQ ID NO: 23059
  Synthetic polypeptide

SEQ ID NO: 23061 - protein, 50 aa, Artificial Sequence; identical to SEQ ID NO: 23059
  Synthetic polypeptide

SEQ ID NO: 23062 - protein, 50 aa, Artificial Sequence; identical to SEQ ID NO: 23059
  Synthetic polypeptide

SEQ ID NO: 23063 - protein, 50 aa, Artificial Sequence; identical to SEQ ID NO: 23059
  Synthetic polypeptide

SEQ ID NO: 23064 - protein, 50 aa, Artificial Sequence; identical to SEQ ID NO: 23059
  Synthetic polypeptide

SEQ ID NO: 23065 - protein, 175 aa, Artificial Sequence
  Synthetic polypeptide
LERHTRNQEIQLLALAGGPFLVALGKSWHPEEFNCAHCKNTMAYIGFVEEKGALYCELCYEKFFAPECGRCQRKILGEVISALKQTWHVSCFVCVACGKPIRNNVFHLEDGEPYCETDYYALFGTICHGCEFPIEAGDMFLEALGYTWHDTCFVCSVCCESLEGQTFFSKKDKPL

SEQ ID NO: 23066 - protein, 77 aa, Artificial Sequence
  Synthetic polypeptide
LERHTRNQEIQLLALAGGPFLVALGKSWHPEEFNCAHCKNTMAYIGFVEEKGALYCELCYEKFFAPECGRCQRKILG

SEQ ID NO: 23067 - protein, 8 aa, Artificial Sequence
  Synthetic polypeptide
KCLGEDHS

SEQ ID NO: 23068 - protein, 8 aa, Artificial Sequence
  Synthetic polypeptide
KCLGEDHS

SEQ ID NO: 23069 - protein, 8 aa, Artificial Sequence
  Synthetic polypeptide
KCLGEDHS

SEQ ID NO: 23070 - protein, 8 aa, Artificial Sequence
  Synthetic polypeptide
KCLGEDHS

SEQ ID NO: 23071 - protein, 8 aa, Artificial Sequence
  Synthetic polypeptide
KCLGEDHS

SEQ ID NO: 23072 - protein, 8 aa, Artificial Sequence
  Synthetic polypeptide
KCLGEDHS

SEQ ID NO: 23073 - protein, 61 aa, Artificial Sequence
  Synthetic polypeptide
LSWSVSQECCMDKLDKCKSALERTILSGTGEILAPRRIQLRSLQKYNGLHWICRGERSPVL

SEQ ID NO: 23074 - protein, 61 aa, Artificial Sequence; identical to SEQ ID NO: 23073
  Synthetic polypeptide

SEQ ID NO: 23075 - protein, 61 aa, Artificial Sequence; identical to SEQ ID NO: 23073
  Synthetic polypeptide

SEQ ID NO: 23076 - protein, 61 aa, Artificial Sequence; identical to SEQ ID NO: 23073
  Synthetic polypeptide

SEQ ID NO: 23077 - protein, 61 aa, Artificial Sequence; identical to SEQ ID NO: 23073
  Synthetic polypeptide

SEQ ID NO: 23078 - protein, 61 aa, Artificial Sequence; identical to SEQ ID NO: 23073
  Synthetic polypeptide

SEQ ID NO: 23079 - protein, 176 aa, Artificial Sequence
  Synthetic polypeptide
ISVKVPWRGPFLVALGKSWHPEEFNCAHCKNTMAYIGFVEEKGALYCELCYEKFFAPECGRCQRKILGEVISALKQTWHVSCFVCVACGKPIRNNVFHLEDGEPYCETDYYALFGTICHGCEFPIEAGDMFLEALGYTWHDTCFVCSVCCESLEGQTFFSKKDKPLCKKHAHSVNF

SEQ ID NO: 23080 - protein, 176 aa, Artificial Sequence; identical to SEQ ID NO: 23079
  Synthetic polypeptide

SEQ ID NO: 23081 - protein, 176 aa, Artificial Sequence; identical to SEQ ID NO: 23079
  Synthetic polypeptide

SEQ ID NO: 23082 - protein, 176 aa, Artificial Sequence; identical to SEQ ID NO: 23079
  Synthetic polypeptide

SEQ ID NO: 23083 - protein, 166 aa, Artificial Sequence
  Synthetic polypeptide
ISVKVPWRGPFLVALGKSWHPEEFNCAHCKNTMAYIGFVEEKGALYCELCYEKFFAPECGRCQRKILGEVISALKQTWHVSCFVCVACGKPIRNNVFHLEDGEPYCETDYYALFGTICHGCEFPIEAGDMFLEALGYTWHDTCFVCSVCCESLEGQTFFSKKDKPL

SEQ ID NO: 23084 - protein, 68 aa, Artificial Sequence
  Synthetic polypeptide
ISVKVPWRGPFLVALGKSWHPEEFNCAHCKNTMAYIGFVEEKGALYCELCYEKFFAPECGRCQRKILG

SEQ ID NO: 23085 - protein, 53 aa, Artificial Sequence
  Synthetic polypeptide
WFKSVWHFPIHSLSLLPSREDVLASPLPFHRNCEFPEASPAMPPVQPVELKLP

SEQ ID NO: 23086 - protein, 563 aa, Artificial Sequence
  Synthetic polypeptide
VLMRSDGLKVCGTSPFTHCLSCRHVKMCLLPLCPSTVIVSFLRPHQPCLLYSLWNSNFLDNMLLRSAGKLNVGTKKEDGESTAPTPRPKVLRCKCHHHCPEDSVNNICSTDGYCFTMIEEDDSGLPVVTSGCLGLEGSDFQCRDTPIPHQRRSIECCTERNECNKDLHPTLPPLKNRDFVDGPIHHRALLISVTVCSLLLVLIILFCYFRYKRQETRPRYSIGLEQDETYIPPGESLRDLIEQSQSSGSGSGLPLLVQRTIAKQIQMVKQIGKGRYGEVWMGKWRGEKVAVKVFFTTEEASWFRETEIYQTVLMRHENILGFIAADIKGTGSWTQLYLITDYHENGSLYDYLKSTTLDAKSMLKLAYSSVSGLCHLHTEIFSTQGKPAIAHRDLKSKNILVKKNGTCCIADLGLAVKFISDTNEVDIPPNTRVGTKRYMPPEVLDESLNRNHFQSYIMADMYSFGLILWEVARRCVSGGIVEEYQLPYHDLVPSDPSYEDMREIVCIKKLRPSFPNRWSSDECLRQMGKLMTECWAHNPASRLTALRVKKTLAKMSESQDIKL

SEQ ID NO: 23087 - protein, 27 aa, Artificial Sequence
  Synthetic polypeptide
GLTSHASCTACGTQTSLITCFCEVQEN

SEQ ID NO: 23088 - protein, 17 aa, Artificial Sequence
  Synthetic polypeptide
VNSTSFLHKSCILSKLP

SEQ ID NO: 23089 - protein, 578 aa, Artificial Sequence
  Synthetic polypeptide
VLMRSDGLKVCGTSPFTHCLSCRHVKMCLLPLCPSTVIVSFLRPHQPCLLYSLWNCESIQPLFFINHAFSANFLDNMLLRSAGKLNVGTKKEDGESTAPTPRPKVLRCKCHHHCPEDSVNNICSTDGYCFTMIEEDDSGLPVVTSGCLGLEGSDFQCRDTPIPHQRRSIECCTERNECNKDLHPTLPPLKNRDFVDGPIHHRALLISVTVCSLLLVLIILFCYFRYKRQETRPRYSIGLEQDETYIPPGESLRDLIEQSQSSGSGSGLPLLVQRTIAKQIQMVKQIGKGRYGEVWMGKWRGEKVAVKVFFTTEEASWFRETEIYQTVLMRHENILGFIAADIKGTGSWTQLYLITDYHENGSLYDYLKSTTLDAKSMLKLAYSSVSGLCHLHTEIFSTQGKPAIAHRDLKSKNILVKKNGTCCIADLGLAVKFISDTNEVDIPPNTRVGTKRYMPPEVLDESLNRNHFQSYIMADMYSFGLILWEVARRCVSGGIVEEYQLPYHDLVPSDPSYEDMREIVCIKKLRPSFPNRWSSDECLRQMGKLMTECWAHNPASRLTALRVKKTLAKMSESQDIKL

SEQ ID NO: 23090 - protein, 19 aa, Artificial Sequence
  Synthetic polypeptide
IMHSQQTSLITCFCEVQEN

SEQ ID NO: 23091 - protein, 7 aa, Artificial Sequence
  Synthetic polypeptide
QRYSKLP

SEQ ID NO: 23092 - protein, 525 aa, Artificial Sequence
  Synthetic polypeptide
ENVSTKNLHPDVHSSVIANFLDNMLLRSAGKLNVGTKKEDGESTAPTPRPKVLRCKCHHHCPEDSVNNICSTDGYCFTMIEEDDSGLPVVTSGCLGLEGSDFQCRDTPIPHQRRSIECCTERNECNKDLHPTLPPLKNRDFVDGPIHHRALLISVTVCSLLLVLIILFCYFRYKRQETRPRYSIGLEQDETYIPPGESLRDLIEQSQSSGSGSGLPLLVQRTIAKQIQMVKQIGKGRYGEVWMGKWRGEKVAVKVFFTTEEASWFRETEIYQTVLMRHENILGFIAADIKGTGSWTQLYLITDYHENGSLYDYLKSTTLDAKSMLKLAYSSVSGLCHLHTEIFSTQGKPAIAHRDLKSKNILVKKNGTCCIADLGLAVKFISDTNEVDIPPNTRVGTKRYMPPEVLDESLNRNHFQSYIMADMYSFGLILWEVARRCVSGGIVEEYQLPYHDLVPSDPSYEDMREIVCIKKLRPSFPNRWSSDECLRQMGKLMTECWAHNPASRLTALRVKKTLAKMSESQDIKL

SEQ ID NO: 23093 - protein, 362 aa, Artificial Sequence
  Synthetic polypeptide
LWNGKPSTRSSRLQECFKGSWATHKLLHKKAKDEKAKREVSSWTVEGDINTDPWAGYRYTGKLRPHYPLMPTRPVPSYIQRPDYADHPLGMSESEQALKGTSQIKLLSSEDIEGMRLVCRLAREVLDVAAGMIKPGVTTEEIDHAVHLACIARNCYPSPLNYYNFPKSCCTSVNEVICHGIPDRRPLQEGDIVNVDITLYRNGYHGDLNETFFVGEVDDGARKLVQTTYECLMQAIDAVKPGVRYRELGNIIQKHAQANGFSVVRSYCGHGIHKLFHTAPNVPHYAKNKAVGVMKSGHVFTIEPMICEGGWQDETWPDGWTAVTRDGKRSAQFEHTLLVTDTGCEILTRRLDSARPHFMSQF

SEQ ID NO: 23094 - protein, 70 aa, Artificial Sequence
  Synthetic polypeptide
SNSGMENQVPGRLAYKNVLKEVGLLTSYYIRKQKMKRRSEKCLPGLWKVILILTHGQVIDILVNSDHIIH

SEQ ID NO: 23095 - protein, 40 aa, Artificial Sequence
  Synthetic polypeptide
KKNEIISFAATWKEPEAVILSEVTLEWKTKYQVVSLTRMF

SEQ ID NO: 23096 - protein, 40 aa, Artificial Sequence; identical to SEQ ID NO: 23095
  Synthetic polypeptide

SEQ ID NO: 23097 - protein, 39 aa, Artificial Sequence
  Synthetic polypeptide
LWNGKPSTRSSRLQECFKGSWATHKLLHKKAKRRCYVMS

SEQ ID NO: 23098 - protein, 38 aa, Artificial Sequence
  Synthetic polypeptide
SNSGMENQVPGRLAYKNVLKEVGLLTSYYIRKQREGVM

SEQ ID NO: 23099 - protein, 66 aa, Artificial Sequence
  Synthetic polypeptide
KYSGKKWMIASVLNSPPKPTVFISGVIARGDKDFPPAAAQVAHQKPHASMDKHPSPRTQHIQQPRK

SEQ ID NO: 23100 - protein, 53 aa, Artificial Sequence
  Synthetic polypeptide
TVHLNPLCSSLGSSPGVTKISPRRLRRWLTRSRMPPWTSILPQEPSTSSSHAS

SEQ ID NO: 23101 - protein, 41 aa, Artificial Sequence
  Synthetic polypeptide
VSLLYLWVLHPRVQPTAESPNCELKIFRKKMDDCICTEQST

SEQ ID NO: 23102 - protein, 67 aa, Artificial Sequence
  Synthetic polypeptide
NSPNAHQPMSGETKHVHLNPLCSSLGSSPGVTKISPRRLRRWLTRSRMPPWTSILPQEPSTSSSHAS

SEQ ID NO: 23103 - protein, 8 aa, Artificial Sequence
  Synthetic polypeptide
VEKQNMST

SEQ ID NO: 23104 - protein, 80 aa, Artificial Sequence
  Synthetic polypeptide
MFIPSLFTIAKKLKQPKCSSANEWRNKTCPPKPTVFISGVIARGDKDFPPAAAQVAHQKPHASMDKHPSPRTQHIQQPRK

SEQ ID NO: 23105 - protein, 37 aa, Artificial Sequence
  Synthetic polypeptide
GLPSYVELTRNGFSVMKMSYWENYWAREILVKYIRAH

SEQ ID NO: 23106 - protein, 37 aa, Artificial Sequence; identical to SEQ ID NO: 23105
  Synthetic polypeptide

SEQ ID NO: 23107 - protein, 348 aa, Artificial Sequence
  Synthetic polypeptide
IVAAIIPTCCGRYLAEVMNHGGESFLCCSCESKSHESWSFYKREFLCKCSLAYRHVRQAFASSLPSTMIVRPPQLCGTDKKWILSHEDVILGELLGKGNFGEVYKGTLKDKTSVAVKTCKEDLPQELKIKFLQEAKILKQYDHPNIVKLIGVCTQRQPVYIIMELVSGGDFLTFLRRKKDELKLKQLVKFSLDAAAGMLYLESKNCIHRDLAARNCLVGENNVLKISDFGMSRQEDGGVYSSSGLKQIPIKWTAPEALNYGRYSSESDVWSFGILLWETFSLGVCPYPGMTNQQAREQVERGYRMSAPQHCPEDISKIMMKCWDYKPENRPKFSELQKELTIIKRKLT

SEQ ID NO: 23108 - protein, 348 aa, Artificial Sequence; identical to SEQ ID NO: 23107
  Synthetic polypeptide

SEQ ID NO: 23109 - protein, 257 aa, Artificial Sequence
  Synthetic polypeptide
HSPPGSGASFLKYHDQQDVTSNFLGAMWLISITFLSIGYGDMVPNTYCGKGVCLLTGIMGAGCTALVVAVVARKLELTKAEKHVHNFMMDTQLTKRVKNAAANVLRETWLIYKNTKLVKKIDHAKVRKHQRKFLQAIHQLRSVKMEQRKLNDQANTLVDLAKTQNIMYDMISDLNERSEDFEKRIVTLETKLETLIGSIHALPGLISQTIRQQQRDFIEAQMESYDKHVTYNAERSRSSSRRRRSSSTAPPTSSESS

SEQ ID NO: 23110 - protein, 257 aa, Artificial Sequence; identical to SEQ ID NO: 23109
  Synthetic polypeptide

SEQ ID NO: 23111 - protein, 92 aa, Artificial Sequence
  Synthetic polypeptide
HSPRKVCSFTPEASEPTSPQGGMNNSRCTALRAVTLTAKVCSFTPEPARPGTHQKEETPNTSEHQKEQTPDGATLRAVTLTARVRGFVLEVP

SEQ ID NO: 23112 - protein, 92 aa, Artificial Sequence; identical to SEQ ID NO: 23111
  Synthetic polypeptide

SEQ ID NO: 23113 - protein, 269 aa, Artificial Sequence
  Synthetic polypeptide
HSPPGSGASFLKSVRPRTHQFRTQYHDQQDVTSNFLGAMWLISITFLSIGYGDMVPNTYCGKGVCLLTGIMGAGCTALVVAVVARKLELTKAEKHVHNFMMDTQLTKRVKNAAANVLRETWLIYKNTKLVKKIDHAKVRKHQRKFLQAIHQLRSVKMEQRKLNDQANTLVDLAKTQNIMYDMISDLNERSEDFEKRIVTLETKLETLIGSIHALPGLISQTIRQQQRDFIEAQMESYDKHVTYNAERSRSSSRRRRSSSTAPPTSSESS

SEQ ID NO: 23114 - protein, 269 aa, Artificial Sequence; identical to SEQ ID NO: 23113
  Synthetic polypeptide

SEQ ID NO: 23115 - protein, 26 aa, Artificial Sequence
  Synthetic polypeptide
DQEPTNSGRSTMINRMLLATSLERCG

SEQ ID NO: 23116 - protein, 26 aa, Artificial Sequence
  Synthetic polypeptide
DQEPTNSGRSTMINRMLLATSLERCG

SEQ ID NO: 23117 - protein, 104 aa, Artificial Sequence
  Synthetic polypeptide
HSPRKVCSFTPEASEPTSPQGGMNNSRCTALRAVTLTAKVCSFTPEPARPGTHQKEETPNTSEHQKEQTPDGATLRAVTLTARVRGFVLEVSETKNPPIPDAVP

SEQ ID NO: 23118 - protein, 104 aa, Artificial Sequence; identical to SEQ ID NO: 23117
  Synthetic polypeptide

SEQ ID NO: 23119 - protein, 50 aa, Artificial Sequence
  Synthetic polypeptide
RAPADYKARSKKLETLSFQMHMWILHQHLVLQLRHPLRAGSFRVPLYLRK

SEQ ID NO: 23120 - protein, 50 aa, Artificial Sequence; identical to SEQ ID NO: 23119
  Synthetic polypeptide

SEQ ID NO: 23121 - protein, 50 aa, Artificial Sequence; identical to SEQ ID NO: 23119
  Synthetic polypeptide

SEQ ID NO: 23122 - protein, 50 aa, Artificial Sequence; identical to SEQ ID NO: 23119
  Synthetic polypeptide

SEQ ID NO: 23123 - protein, 50 aa, Artificial Sequence; identical to SEQ ID NO: 23119
  Synthetic polypeptide

SEQ ID NO: 23124 - protein, 50 aa, Artificial Sequence; identical to SEQ ID NO: 23119
  Synthetic polypeptide

SEQ ID NO: 23125 - protein, 50 aa, Artificial Sequence; identical to SEQ ID NO: 23119
  Synthetic polypeptide

SEQ ID NO: 23126 - protein, 62 aa, Artificial Sequence
  Synthetic polypeptide
KYQGPVSISVFTLEFWGMGPHRVSLFVCFKGLQLIIKPGPRNWRHCHFKCICGSCTNIWYFS

SEQ ID NO: 23127 - protein, 62 aa, Artificial Sequence; identical to SEQ ID NO: 23126
  Synthetic polypeptide

SEQ ID NO: 23128 - protein, 62 aa, Artificial Sequence; identical to SEQ ID NO: 23126
  Synthetic polypeptide

SEQ ID NO: 23129 - protein, 62 aa, Artificial Sequence; identical to SEQ ID NO: 23126
  Synthetic polypeptide

SEQ ID NO: 23130 - protein, 62 aa, Artificial Sequence; identical to SEQ ID NO: 23126
  Synthetic polypeptide

SEQ ID NO: 23131 - protein, 62 aa, Artificial Sequence; identical to SEQ ID NO: 23126
  Synthetic polypeptide

SEQ ID NO: 23132 - protein, 62 aa, Artificial Sequence; identical to SEQ ID NO: 23126
  Synthetic polypeptide

SEQ ID NO: 23133 - protein, 149 aa, Artificial Sequence
  Synthetic polypeptide
SQVQETGDIVISNAYVDLAPTSGTSAKTPSEGGKLQSTFVFEEIGRRLKDIGPEVVKKVNAVFEWHITKGGNIGAKWTIDLKSGSGKVYQGPAKGAADTTIILSDEDFMEVVLGKLDPQKAFFSGRLKARGNIMLSQKLQMILKDYAKL

SEQ ID NO: 23134 - protein, 149 aa, Artificial Sequence; identical to SEQ ID NO: 23133
  Synthetic polypeptide

SEQ ID NO: 23135 - protein, 149 aa, Artificial Sequence; identical to SEQ ID NO: 23133
  Synthetic polypeptide

SEQ ID NO: 23136 - protein, 149 aa, Artificial Sequence; identical to SEQ ID NO: 23133
  Synthetic polypeptide

SEQ ID NO: 23137 - protein, 149 aa, Artificial Sequence; identical to SEQ ID NO: 23133
  Synthetic polypeptide

SEQ ID NO: 23138 - protein, 149 aa, Artificial Sequence; identical to SEQ ID NO: 23133
  Synthetic polypeptide

SEQ ID NO: 23139 - protein, 149 aa, Artificial Sequence; identical to SEQ ID NO: 23133
  Synthetic polypeptide

SEQ ID NO: 23140 - protein, 265 aa, Artificial Sequence
  Synthetic polypeptide
FRSQKRPESLLIFKVVDQIDTLTSDLQLEDEMTDSSKTDTLNSSSSGTTASSLEKIKVQANAPLIKPPAHPSAILTVLRKPNPPPPPPRLTPVKCEDPKRVVPTANPVKTNGTLLRNGGLPGGPNKIPNGDICCIPNSNLDKAPVQLLMHRPEKDRCPQAGPRERVRFNEKVQYHGYCPDCDTRYNIKNREVHLHSEPVHPPGKIPHQGPPLPPTPHLPPFPLENGGMGISHSNSFPPIRPATVPPPTAPKPQKTILRKSTTTTV

SEQ ID NO: 23141 - protein, 265 aa, Artificial Sequence; identical to SEQ ID NO: 23140
  Synthetic polypeptide

SEQ ID NO: 23142 - protein, 10 aa, Artificial Sequence
  Synthetic polypeptide
FLRWLTRLTP

SEQ ID NO: 23143 - protein, 10 aa, Artificial Sequence
  Synthetic polypeptide
FLRWLTRLTP

SEQ ID NO: 23144 - protein, 29 aa, Artificial Sequence
  Synthetic polypeptide
PLSFIFLTETKCTDQVTLRLLSVIRYYVL

SEQ ID NO: 23145 - protein, 4 aa, Artificial Sequence
  Synthetic polypeptide
DTMY

SEQ ID NO: 23146 - protein, 20 aa, Artificial Sequence
  Synthetic polypeptide
NKMYGPGDSEASFSYKILCI

SEQ ID NO: 23147 - protein, 46 aa, Artificial Sequence
  Synthetic polypeptide
KGSRESFPLQGFTHVCCSSHFISKFGRTPHFSCASSLTRPPSATPS

SEQ ID NO: 23148 - protein, 46 aa, Artificial Sequence; identical to SEQ ID NO: 23147
  Synthetic polypeptide

SEQ ID NO: 23149 - protein, 36 aa, Artificial Sequence
  Synthetic polypeptide
RAHGRVFHYKVSRMCAAAPISSASLEEPHIFPARHL

SEQ ID NO: 23150 - protein, 36 aa, Artificial Sequence; identical to SEQ ID NO: 23149
  Synthetic polypeptide

SEQ ID NO: 23151 - protein, 131 aa, Artificial Sequence
  Synthetic polypeptide
GLTGEFSITRFHACVLQLPFHQQVWKNPTFFLRVISDTASLCYSILKAKNAGMSLGAKGAAGPLPSEAVQWLCHQAFLLKLTRHRVTYVPLLGSLRTAQTQLSRKLPGTTLTALEAAANPALPSDFKTILD

SEQ ID NO: 23152 - protein, 131 aa, Artificial Sequence; identical to SEQ ID NO: 23151
  Synthetic polypeptide

SEQ ID NO: 23153 - protein, 101 aa, Artificial Sequence
  Synthetic polypeptide
QSQKEGKGFPATTSCWPPAGRSSAAEGAGACSAGRQGSPNASAWRHAGPATCLCAALMGGFMKTTVSSTVLLASWERGSPSSTARTVSSKVTRAPWPATPA

SEQ ID NO: 23154 - protein, 101 aa, Artificial Sequence; identical to SEQ ID NO: 23153
  Synthetic polypeptide

SEQ ID NO: 23155 - protein, 69 aa, Artificial Sequence
  Synthetic polypeptide
CLICIHVTTLQNDKVRKRERAFQPQRAAGLLREEVLQPREPVRAQQEDRGARMPVPGGMQAQLRACVRL

SEQ ID NO: 23156 - protein, 69 aa, Artificial Sequence; identical to SEQ ID NO: 23155
  Synthetic polypeptide

SEQ ID NO: 23157 - protein, 806 aa, Artificial Sequence
  Synthetic polypeptide
SAYMSPPYRMTKSERGKGLSSHNELLASCGKKFCSRGSRCVLSRKTGEPECQCLEACRPSYVPVCGSDGRFYENHCKLHRAACLLGKRITVIHSKDCFLKGDTCTMAGYARLKNVLLALQTRLQPLQEGDSRQDPASQKRLLVESLFRDLDADGNGHLSSSELAQHVLKKQDLDEDLLGCSPGDLLRFDDYNSDSSLTLREFYMAFQVVQLSLAPEDRVSVTTVTVGLSTVLTCAVHGDLRPPIIWKRNGLTLNFLDLEDINDFGEDDSLYITKVTTIHMGNYTCHASGHEQLFQTHVLQVNVPPVIRVYPESQAQEPGVAASLRCHAEGIPMPRITWLKNGVDVSTQMSKQLSLLANGSELHISSVRYEDTGAYTCIAKNEVGVDEDISSLFIEDSARKTLANILWREEGLSVGNMFYVFSDDGIIVIHPVDCEIQRHLKPTEKIFMSYEEICPQREKNATQPCQWVSAVNVRNRYIYVAQPALSRVLVVDIQAQKVLQSIGVDPLPAKLSYDKSHDQVWVLSWGDVHKSRPSLQVITEASTGQSQHLIRTPFAGVDDFFIPPTNLIINHIRFGFIFNKSDPAVHKVDLETMMPLKTIGLHHHGCVPQAMAHTHLGGYFFIQCRQDSPASAARQLLVDSVTDSVLGPNGDVTGTPHTSPDGRFIVSAAADSPWLHVQEITVRGEIQTLYDLQINSGISDLAFQRSFTESNQYNIYAALHTEPDLLFLELSTGKVGMLKNLKEPPAGPAQPWGGTHRIMRDSGLFGQYLLTPARESLFLINGRQNTLRCEVSGIKGGTTVVWVGEV

SEQ ID NO: 23158 - protein, 119 aa, Artificial Sequence
  Synthetic polypeptide
SAYMSPPYRMTKSERGKGLSSHNELLASCGKKFCSRGSRCVLSRKTGEPECQCLEACRPSYVPVCGSDGRFYENHCKLHRAACLLGKRITVIHSKDCFLKGDTCTMAGYARLKNVLLAL

SEQ ID NO: 23159 - protein, 54 aa, Artificial Sequence
  Synthetic polypeptide
MYLPFFGWVALAQGQSAPPRCPPTLSLRTFQQPTSHPCTCGHQPEASSQASADP

SEQ ID NO: 23160 - protein, 54 aa, Artificial Sequence; identical to SEQ ID NO: 23159
  Synthetic polypeptide

SEQ ID NO: 23161 - protein, 54 aa, Artificial Sequence; identical to SEQ ID NO: 23159
  Synthetic polypeptide

SEQ ID NO: 23162 - protein, 54 aa, Artificial Sequence; identical to SEQ ID NO: 23159
  Synthetic polypeptide

SEQ ID NO: 23163 - protein, 54 aa, Artificial Sequence; identical to SEQ ID NO: 23159
  Synthetic polypeptide

SEQ ID NO: 23164 - protein, 54 aa, Artificial Sequence; identical to SEQ ID NO: 23159
  Synthetic polypeptide

SEQ ID NO: 23165 - protein, 54 aa, Artificial Sequence; identical to SEQ ID NO: 23159
  Synthetic polypeptide

SEQ ID NO: 23166 - protein, 54 aa, Artificial Sequence; identical to SEQ ID NO: 23159
  Synthetic polypeptide

SEQ ID NO: 23167 - protein, 54 aa, Artificial Sequence; identical to SEQ ID NO: 23159
  Synthetic polypeptide

SEQ ID NO: 23168 - protein, 54 aa, Artificial Sequence; identical to SEQ ID NO: 23159
  Synthetic polypeptide

SEQ ID NO: 23169 - protein, 54 aa, Artificial Sequence; identical to SEQ ID NO: 23159
  Synthetic polypeptide

SEQ ID NO: 23170 - protein, 54 aa, Artificial Sequence; identical to SEQ ID NO: 23159
  Synthetic polypeptide

SEQ ID NO: 23171 - protein, 54 aa, Artificial Sequence; identical to SEQ ID NO: 23159
  Synthetic polypeptide

SEQ ID NO: 23172 - protein, 54 aa, Artificial Sequence; identical to SEQ ID NO: 23159
  Synthetic polypeptide

SEQ ID NO: 23173 - protein, 54 aa, Artificial Sequence; identical to SEQ ID NO: 23159
  Synthetic polypeptide

SEQ ID NO: 23174 - protein, 54 aa, Artificial Sequence; identical to SEQ ID NO: 23159
  Synthetic polypeptide

SEQ ID NO: 23175 - protein, 54 aa, Artificial Sequence; identical to SEQ ID NO: 23159
  Synthetic polypeptide

SEQ ID NO: 23176 - protein, 233 aa, Artificial Sequence
  Synthetic polypeptide
CICHSLAGWPWHKANQPPHGVPQLSLYEHFNSPHPTPAPADISQKQVHRPLQTPDLSGFYSLTSGSMGQLPHTVSWFTHPSLMLGSGVPGHPAAIPHPAIVPPSGKQELQPFDRNLKTQAESKAEKEAKKPTIKKPLNAFMLYMKEMRAKVIAECTLKESAAINQILGRRWHALSREEQAKYYELARKERQLHMQLYPGWSARDNYGKKKRRSREKHQESTTDGIPACTILSP

SEQ ID NO: 23177 - protein, 61 aa, Artificial Sequence
  Synthetic polypeptide
VSAILWLGGPGTRPISPPTVSPNSLSTNISTAHIPPLHLRTSARSKFTGLCRPLTSLASTP

SEQ ID NO: 23178 - protein, 61 aa, Artificial Sequence; identical to SEQ ID NO: 23177
  Synthetic polypeptide

SEQ ID NO: 23179 - protein, 61 aa, Artificial Sequence; identical to SEQ ID NO: 23177
  Synthetic polypeptide

SEQ ID NO: 23180 - protein, 61 aa, Artificial Sequence; identical to SEQ ID NO: 23177
  Synthetic polypeptide

SEQ ID NO: 23181 - protein, 61 aa, Artificial Sequence; identical to SEQ ID NO: 23177
  Synthetic polypeptide

SEQ ID NO: 23182 - protein, 61 aa, Artificial Sequence; identical to SEQ ID NO: 23177
  Synthetic polypeptide

SEQ ID NO: 23183 - protein, 61 aa, Artificial Sequence; identical to SEQ ID NO: 23177
  Synthetic polypeptide

SEQ ID NO: 23184 - protein, 61 aa, Artificial Sequence; identical to SEQ ID NO: 23177
  Synthetic polypeptide

SEQ ID NO: 23185 - protein, 61 aa, Artificial Sequence; identical to SEQ ID NO: 23177
  Synthetic polypeptide

SEQ ID NO: 23186 - protein, 61 aa, Artificial Sequence; identical to SEQ ID NO: 23177
  Synthetic polypeptide

SEQ ID NO: 23187 - protein, 61 aa, Artificial Sequence; identical to SEQ ID NO: 23177
  Synthetic polypeptide

SEQ ID NO: 23188 - protein, 61 aa, Artificial Sequence; identical to SEQ ID NO: 23177
  Synthetic polypeptide

SEQ ID NO: 23189 - protein, 61 aa, Artificial Sequence; identical to SEQ ID NO: 23177
  Synthetic polypeptide

SEQ ID NO: 23190 - protein, 61 aa, Artificial Sequence; identical to SEQ ID NO: 23177
  Synthetic polypeptide

SEQ ID NO: 23191 - protein, 61 aa, Artificial Sequence; identical to SEQ ID NO: 23177
  Synthetic polypeptide

SEQ ID NO: 23192 - protein, 61 aa, Artificial Sequence; identical to SEQ ID NO: 23177
  Synthetic polypeptide

SEQ ID NO: 23193 - protein, 61 aa, Artificial Sequence; identical to SEQ ID NO: 23177
  Synthetic polypeptide

SEQ ID NO: 23194 - protein, 248 aa, Artificial Sequence
  Synthetic polypeptide
CICHSLAGWPWHKANQPPHGVPQLSLYEHFNSPHPTPAPADISQKQVHRPLQTPDLSGFYSLTSGSMGQLPHTVSWFTHPSLMLGSGVPGHPAAIPHPAIVPPSGKQELQPFDRNLKTQAESKAEKEAKKPTIKKPLNAFMLYMKEMRAKVIAECTLKESAAINQILGRRWHALSREEQAKYYELARKERQLHMQLYPGWSARDNYGKKKRRSREKHQESTTETNWPRELKDGNGQESLSMSSSSSPA

SEQ ID NO: 23195 - protein, 248 aa, Artificial Sequence; identical to SEQ ID NO: 23194
  Synthetic polypeptide

SEQ ID NO: 23196 - protein, 229 aa, Artificial Sequence
  Synthetic polypeptide
CICHSLAGWPWHKANQPPHGVPQLSLYEHFNSPHPTPAPADISQKQVHRPLQTPDLSGFYSLTSGSMGQLPHTVSWFTHPSLMLGSGVPGHPAAIPHPAIVPPSGKQELQPFDRNLKTQAESKAEKEAKKPTIKKPLNAFMLYMKEMRAKVIAECTLKESAAINQILGRRWHALSREEQAKYYELARKERQLHMQLYPGWSARDNYGKKKRRSREKHQESTTDNSLHYS

SEQ ID NO: 23197 - protein, 248 aa, Artificial Sequence
  Synthetic polypeptide
CICHSLAGWPWHKANQPPHGVPQLSLYEHFNSPHPTPAPADISQKQVHRPLQTPDLSGFYSLTSGSMGQLPHTVSWFTHPSLMLGSGVPGHPAAIPHPAIVPPSGKQELQPFDRNLKTQAESKAEKEAKKPTIKKPLNAFMLYMKEMRAKVIAECTLKESAAINQILGRRWHALSREEQAKYYELARKERQLHMQLYPGWSARDNYGKKKRRSREKHQESTTGGKRNAFGTYPEKAAAPAPFLPMTVL

SEQ ID NO: 23198 - protein, 248 aa, Artificial Sequence; identical to SEQ ID NO: 23197
  Synthetic polypeptide

SEQ ID NO: 23199 - protein, 248 aa, Artificial Sequence; identical to SEQ ID NO: 23197
  Synthetic polypeptide

SEQ ID NO: 23200 - protein, 345 aa, Artificial Sequence
  Synthetic polypeptide
CICHSLAGWPWHKANQPPHGVPQLSLYEHFNSPHPTPAPADISQKQVHRPLQTPDLSGFYSLTSGSMGQLPHTVSWFTHPSLMLGSGVPGHPAAIPHPAIVPPSGKQELQPFDRNLKTQAESKAEKEAKKPTIKKPLNAFMLYMKEMRAKVIAECTLKESAAINQILGRRWHALSREEQAKYYELARKERQLHMQLYPGWSARDNYGKKKRRSREKHQESTTDPGSPKKCRARFGLNQQTDWCGPCRRKKKCIRYLPGEGRCPSPVPSDDSALGCPGSPAPQDSPSYHLLPRFPTELLTSPAEPAPTSPGLSTALSLPTPGPPQAPRSTLQSTQVQQQESQRQVA

SEQ ID NO: 23201 - protein, 345 aa, Artificial Sequence; identical to SEQ ID NO: 23200
  Synthetic polypeptide

SEQ ID NO: 23202 - protein, 101 aa, Artificial Sequence
  Synthetic polypeptide
CICHSLAGWPWHKANQPPHGVPQLSLYEHFNSPHPTPAPADISQKQVHRPLQTPDLSGFYSLTSGSMGQLPHTVSWFTHPSLMLGSGVPGHPAAIPHPAIV

SEQ ID NO: 23203 - protein, 146 aa, Artificial Sequence
  Synthetic polypeptide
CICHSLAGWPWHKANQPPHGVPQLSLYEHFNSPHPTPAPADISQKQVHRPLQTPDLSGFYSLTSGSMGQLPHTVSWPSPPLYPLSPSCGYRQHFPAPTAAPGAPYPRFTHPSLMLGSGVPGHPAAIPHPAIVPPSGKQELQPFDRN

SEQ ID NO: 23204 - protein, 126 aa, Artificial Sequence
  Synthetic polypeptide
CICHSLAGWPWHKANQPPHGVPQLSLYEHFNSPHPTPAPADISQKQVHRPLQTPDLSGFYSLTSGSMGQLPHTVSWFTHPSLMLGSGVPGHPAAIPHPAIVPPSGKQELQPFDRNLKTQAESKAEK

SEQ ID NO: 23205 - protein, 132 aa, Artificial Sequence
  Synthetic polypeptide
CICHSLAGWPWHKANQPPHGVPQLSLYEHFNSPHPTPAPADISQKQVHRPLQTPDLSGFYSLTSGSMGQLPHTVSWPSPPLYPLSPSCGYRQHFPAPTAAPGAPYPRFTHPSLMLGSGVPGHPAAIPHPAIV

SEQ ID NO: 23206 - protein, 247 aa, Artificial Sequence
  Synthetic polypeptide
CICHSLAGWPWHKANQPPHGVPQLSLYEHFNSPHPTPAPADISQKQVHRPLQTPDLSGFYSLTSGSMGQLPHTVSWFTHPSLMLGSGVPGHPAAIPHPAIVPPSGKQELQPFDRNLKTQAESKAEKEAKKPTIKKPLNAFMLYMKEMRAKVIAECTLKESAAINQILGRRWHALSREEQAKYYELARKERQLHMQLYPGWSARDNYGKKKRRSREKHQESTTDPGSPKKCRARFGLNQQTDWCGPCR

SEQ ID NO: 23207 - protein, 62 aa, Artificial Sequence
  Synthetic polypeptide
CICHSLAGWPWHKANQPPHGVPQLSLYEHFNSPHPTPAPADISQKQVHRPLQTPDLSGFYSL

SEQ ID NO: 23208 - protein, 62 aa, Artificial Sequence; identical to SEQ ID NO: 23207
  Synthetic polypeptide

SEQ ID NO: 23209 - protein, 57 aa, Artificial Sequence
  Synthetic polypeptide
MYLPFFGWVALAQGQSAPPRCPPTLSLRTFQQPTSHPCTCGHQPEARYKPGMGRGPV

SEQ ID NO: 23210 - protein, 56 aa, Artificial Sequence
  Synthetic polypeptide
CICHSLAGWPWHKANQPPHGVPQLSLYEHFNSPHPTPAPADISQKQGTSLGWGGAQ

SEQ ID NO: 23211 - protein, 56 aa, Artificial Sequence
  Synthetic polypeptide
VSAILWLGGPGTRPISPPTVSPNSLSTNISTAHIPPLHLRTSARSKVQAWDGEGPS

SEQ ID NO: 23212 - protein, 147 aa, Artificial Sequence
  Synthetic polypeptide
CICHSLAGWPWHKANQPPHGVPQLSLYEHFNSPHPTPAPADISQKQVHRPLQTPDLSGFYSLTSGSMGQLPHTVSWFTHPSLMLGSGVPGHPAAIPHPAIVPPSGKQELQPFDRNLKTQAESKAEKEAKKPTIKKPLNAFMLYMKEM

SEQ ID NO: 23213 - protein, 72 aa, Artificial Sequence
  Synthetic polypeptide
SLHPASASLTPHHCSECPAVSLTPRSLLRLSPLPDILFSLLSYLSLASPALCHPGCRSLLLQDAGLLSQLGR

SEQ ID NO: 23214 - protein, 19 aa, Artificial Sequence
  Synthetic polypeptide
KSPPPGCRLAFSAREVNTG

SEQ ID NO: 23215 - protein, 26 aa, Artificial Sequence
  Synthetic polypeptide
DEDNKSNNLLGLSPCLSKVIREDEAL

SEQ ID NO: 23216 - protein, 26 aa, Artificial Sequence
  Synthetic polypeptide
DEDNKSNNLLGLSPCLSKVIREDEAL

SEQ ID NO: 23217 - protein, 26 aa, Artificial Sequence
  Synthetic polypeptide
DEDNKSNNLLGLSPCLSKVIREDEAL

SEQ ID NO: 23218 - protein, 26 aa, Artificial Sequence
  Synthetic polypeptide
DEDNKSNNLLGLSPCLSKVIREDEAL

SEQ ID NO: 23219 - protein, 13 aa, Artificial Sequence
  Synthetic polypeptide
QPFRVKPLSIKSY

SEQ ID NO: 23220 - protein, 13 aa, Artificial Sequence
  Synthetic polypeptide
QPFRVKPLSIKSY

SEQ ID NO: 23221 - protein, 13 aa, Artificial Sequence
  Synthetic polypeptide
QPFRVKPLSIKSY

SEQ ID NO: 23222 - protein, 13 aa, Artificial Sequence
  Synthetic polypeptide
QPFRVKPLSIKSY

SEQ ID NO: 23223 - protein, 13 aa, Artificial Sequence
  Synthetic polypeptide
QPFRVKPLSIKSY

SEQ ID NO: 23224 - protein, 20 aa, Artificial Sequence
  Synthetic polypeptide
DEDNKSNNLLGLSPCLSKVI

SEQ ID NO: 23225 - protein, 332 aa, Artificial Sequence
  Synthetic polypeptide
VTDQLHDFRQKKGNVAQKHWVGPSNLVKCKPCPVAQSAMVCGSDGHSYTSKCKLEFHACSTGKSLATLCDGPCPCLPEPEPPKHKAERSACTDKELRNLASRLKDWFGALHEDANRVIKPTSSNTAQGRFDTSILPICKDSLGWMFNKLDMNYDLLLDPSEINAIYLDKYEPCIKPLFNSCDSFKDGKLSNNEWCYCFQKPGGLPCQNEMNRIQKLSKGKSLLGAFIPRCNEEGYYKATQCHGSTGQCWCVDKYGNELAGSRKQGAVSCEEEQETSGDFGSGGSVVLLDDLEYERELGPKDKEGKLRVHTRAVTEDDEDEDDDKEDEVGYIW

SEQ ID NO: 23226 - protein, 332 aa, Artificial Sequence; identical to SEQ ID NO: 23225
  Synthetic polypeptide

SEQ ID NO: 23227 - protein, 102 aa, Artificial Sequence
  Synthetic polypeptide
LLISSTTLGKRRGTWPRNTGLDLRIWSSASPVPWHSQPWSAAQMATPTHPSANWSSMLVLLAKASPPSVMGPVPVSQSLSHQSTRQKGVPAQTRSCGTLPPG

SEQ ID NO: 23228 - protein, 102 aa, Artificial Sequence; identical to SEQ ID NO: 23227
  Synthetic polypeptide

SEQ ID NO: 23229 - protein, 32 aa, Artificial Sequence
  Synthetic polypeptide
VTDQLHDFRQKKGNVAQKHWVGPSNLVKCKPC

SEQ ID NO: 23230 - protein, 31 aa, Artificial Sequence
  Synthetic polypeptide
LLISSTTLGKRRGTWPRNTGLDLRIWSSASP

SEQ ID NO: 23231 - protein, 35 aa, Artificial Sequence
  Synthetic polypeptide
DRTTALQPGRRTACGKIWQRQRPNFIPQTLGGGGS

SEQ ID NO: 23232 - protein, 35 aa, Artificial Sequence; identical to SEQ ID NO: 23231
  Synthetic polypeptide

SEQ ID NO: 23233 - protein, 73 aa, Artificial Sequence
  Synthetic polypeptide
AEIVPLHSSLGDERHVAKSGKGRDQTSYLKLWGAAGAERVGLHGCPGPELLPELAGLRSSRSGPSETSHRPRT

SEQ ID NO: 23234 - protein, 73 aa, Artificial Sequence; identical to SEQ ID NO: 23233
  Synthetic polypeptide

SEQ ID NO: 23235 - protein, 95 aa, Artificial Sequence
  Synthetic polypeptide
SQLPGRLREKNHLNLGGGGCSELRSYHCTPAWATNGMWQNLAKAETKLHTSNSGGRRELSELVYTDVLDRSCSRNWQDYGVREVDQVKRLTGPGL

SEQ ID NO: 23236 - protein, 166 aa, Artificial Sequence
  Synthetic polypeptide
SQLPGRLREKNHLNLGGGGCSELRSYHCTPAWATNGMWQNLAKAETKLHTSNSGGRRELSELVYTDVLDRSCSRNWQDYGVREVDQVKRLTGPGLSEGPEPSISVMVTGGPWPTRLSRTCLHYLGEFGEDQIYEAHQQGRGALEALLCGGPQGACSEKVSATREEL

SEQ ID NO: 23237 - protein, 436 aa, Artificial Sequence
  Synthetic polypeptide
ASAVLCCLSVQQFLRQAQRGTEEKEREGALVSLRRGLQHPETQQTFIRLEGSMRTLVGLLTSNQALLQLEAARCLHELSHSEQSTVAEACLPATSYLLTYLSSHSSDFIELCLYTLGNLIVESEAVRRQLLPQGIVPALAACIQSPHVAVLEALGYALSQLLQAEEAPEKIIPSILASTLPQHMLQMLQPGPKLNPGVAVEFAWCLHYIICSQVSNPLLIGHGALSTLGLLLLDLAGAVQKTEDAGLELLACPVLRCLSNLLTEAAVETVGGQMQLRDERVVAALFILLQFFFQKQPSLLPEGLWLLNNLTANSPSFCTSLLSLDLIEPLLQLLPVSNVVSVMVLTVLCNVAEKGPAYCQRLWPGPLLPALLHTLAFSDTEVVGQSLELLHLLFLYQPEAVQVFLQQSGLQALERHQEEAQLQDRVYALQQTALQG

SEQ ID NO: 23238 - protein, 70 aa, Artificial Sequence
  Synthetic polypeptide
ALEDQLNMNPRLLLSFAVFLCSSSCGKPSGGQRKRRERGLWSAFVEACSTLKHSKPSSGWRAACGPWSGS

SEQ ID NO: 23239 - protein, 70 aa, Artificial Sequence; identical to SEQ ID NO: 23238
  Synthetic polypeptide

SEQ ID NO: 23240 - protein, 42 aa, Artificial Sequence
  Synthetic polypeptide
ILGFCCPLLSFCAAVPAASPAGDRGKGERGGSGQPSSRLAAP

SEQ ID NO: 23241 - protein, 42 aa, Artificial Sequence; identical to SEQ ID NO: 23240
  Synthetic polypeptide

SEQ ID NO: 23242 - protein, 42 aa, Artificial Sequence; identical to SEQ ID NO: 23240
  Synthetic polypeptide

SEQ ID NO: 23243 - protein, 42 aa, Artificial Sequence; identical to SEQ ID NO: 23240
  Synthetic polypeptide

SEQ ID NO: 23244 - protein, 61 aa, Artificial Sequence
  Synthetic polypeptide
ASAVLCCLSVQQFLRQAQRGTEEKEREGALVSLRRGLQHPETQQTFIRSVWMVWWREELGL

SEQ ID NO: 23245 - protein, 72 aa, Artificial Sequence
  Synthetic polypeptide
ALEDQLNMNPRLLLSFAVFLCSSSCGKPSGGQRKRRERGLWSAFVEACSTLKHSKPSSGQCGWCGGGRSWGS

SEQ ID NO: 23246 - protein, 40 aa, Artificial Sequence
  Synthetic polypeptide
ASAVLCCLSVQQFLRQAQRGTEEKEREGALVSLRRGLQHP

SEQ ID NO: 23247 - protein, 51 aa, Artificial Sequence
  Synthetic polypeptide
ALEDQLNMNPRLLLSFAVFLCSSSCGKPSGGQRKRRERGLWSAFVEACSTL

SEQ ID NO: 23248 - protein, 442 aa, Artificial Sequence
  Synthetic polypeptide
ASAVLCCLSVQQFLRQAQRGTEEKEREGALVSLRRGLQHPETQQTFIRLEGSMRTLVGLLTSNQALLQLEAARCLHELSHSEQSTVAEACLPATSYLLTYLSSHSSDFIELCLYTLGNLIVESEAVRRQLLPQGIVPALAACIQSPHVAVLEALGYALSQLLQAEEAPEKIIPPASASSSILASTLPQHMLQMLQPGPKLNPGVAVEFAWCLHYIICSQVSNPLLIGHGALSTLGLLLLDLAGAVQKTEDAGLELLACPVLRCLSNLLTEAAVETVGGQMQLRDERVVAALFILLQFFFQKQPSLLPEGLWLLNNLTANSPSFCTSLLSLDLIEPLLQLLPVSNVVSVMVLTVLCNVAEKGPAYCQRLWPGPLLPALLHTLAFSDTEVVGQSLELLHLLFLYQPEAVQVFLQQSGLQALERHQEEAQLQDRVYALQQTALQG

SEQ ID NO: 23249 - protein, 106 aa, Artificial Sequence
  Synthetic polypeptide
KWLKWCWAVQRRHPADDRAAAQPVLAAVLEAGQPLLSPVRGRGQHCDLQTPPLRSLHLPRLGQRAGLGHRHILHGHGAHLCGLQVLQPAWVLSRETGLRHCTREGP

SEQ ID NO: 23250 - protein, 106 aa, Artificial Sequence; identical to SEQ ID NO: 23249
  Synthetic polypeptide

SEQ ID NO: 23251 - protein, 122 aa, Artificial Sequence
  Synthetic polypeptide
NGVGQFSDDIQQMTGQRPSLYWRLCWKLVSPCFLLFVVVVSIVTFRPPHYGAYIFPDWANALGWVIATSSMAMVPIYAAYKFCSLPGSFREKLAYAIAPEKDRELVDRGEVRQFTLRHWLKV

SEQ ID NO: 23252 - protein, 122 aa, Artificial Sequence; identical to SEQ ID NO: 23251
  Synthetic polypeptide

SEQ ID NO: 23253 - protein, 20 aa, Artificial Sequence
  Synthetic polypeptide
TLHVKMAKMVLGSSATTSSR

SEQ ID NO: 23254 - protein, 20 aa, Artificial Sequence
  Synthetic polypeptide
TLHVKMAKMVLGSSATTSSR

SEQ ID NO: 23255 - protein, 153 aa, Artificial Sequence
  Synthetic polypeptide
PGAVTHACNPSTLGGRGGQITRSRDQDHPGQHGVGQFSDDIQQMTGQRPSLYWRLCWKLVSPCFLLFVVVVSIVTFRPPHYGAYIFPDWANALGWVIATSSMAMVPIYAAYKFCSLPGSFREKLAYAIAPEKDRELVDRGEVRQFTLRHWLKV

SEQ ID NO: 23256 - protein, 153 aa, Artificial Sequence; identical to SEQ ID NO: 23255
  Synthetic polypeptide

SEQ ID NO: 23257 - protein, 39 aa, Artificial Sequence
  Synthetic polypeptide
LTPVIPALWEAEVGRSRDQEIKTILANMVLGSSATTSSR

SEQ ID NO: 23258 - protein, 39 aa, Artificial Sequence; identical to SEQ ID NO: 23257
  Synthetic polypeptide

SEQ ID NO: 23259 - protein, 125 aa, Artificial Sequence
  Synthetic polypeptide
SQHFGRPRWADHEIKRSRPSWPTWCWAVQRRHPADDRAAAQPVLAAVLEAGQPLLSPVRGRGQHCDLQTPPLRSLHLPRLGQRAGLGHRHILHGHGAHLCGLQVLQPAWVLSRETGLRHCTREGP

SEQ ID NO: 23260 - protein, 125 aa, Artificial Sequence; identical to SEQ ID NO: 23259
  Synthetic polypeptide

SEQ ID NO: 23261 - protein, 76 aa, Artificial Sequence
  Synthetic polypeptide
LEAADGSSTLGGGAGTMGLSARYGPQFTLQHVPDYRQNVYIPGSNATLTNAAGKRDGKAPAGGNGNKKKSGKKEKK

SEQ ID NO: 23262 - protein, 76 aa, Artificial Sequence; identical to SEQ ID NO: 23261
  Synthetic polypeptide

SEQ ID NO: 23263 - protein, 76 aa, Artificial Sequence; identical to SEQ ID NO: 23261
  Synthetic polypeptide

SEQ ID NO: 23264 - protein, 76 aa, Artificial Sequence; identical to SEQ ID NO: 23261
  Synthetic polypeptide

SEQ ID NO: 23265 - protein, 76 aa, Artificial Sequence; identical to SEQ ID NO: 23261
  Synthetic polypeptide

SEQ ID NO: 23266 - protein, 76 aa, Artificial Sequence; identical to SEQ ID NO: 23261
  Synthetic polypeptide

SEQ ID NO: 23267 - protein, 76 aa, Artificial Sequence; identical to SEQ ID NO: 23261
  Synthetic polypeptide

SEQ ID NO: 23268 - protein, 76 aa, Artificial Sequence; identical to SEQ ID NO: 23261
  Synthetic polypeptide

SEQ ID NO: 23269 - protein, 76 aa, Artificial Sequence; identical to SEQ ID NO: 23261
  Synthetic polypeptide

SEQ ID NO: 23270 - protein, 76 aa, Artificial Sequence; identical to SEQ ID NO: 23261
  Synthetic polypeptide

SEQ ID NO: 23271 - protein, 76 aa, Artificial Sequence; identical to SEQ ID NO: 23261
  Synthetic polypeptide

SEQ ID NO: 23272 - protein, 76 aa, Artificial Sequence; identical to SEQ ID NO: 23261
  Synthetic polypeptide

SEQ ID NO: 23273 - protein, 76 aa, Artificial Sequence; identical to SEQ ID NO: 23261
  Synthetic polypeptide

SEQ ID NO: 23274 - protein, 76 aa, Artificial Sequence; identical to SEQ ID NO: 23261
  Synthetic polypeptide

SEQ ID NO: 23275 - protein, 76 aa, Artificial Sequence; identical to SEQ ID NO: 23261
  Synthetic polypeptide

SEQ ID NO: 23276 - protein, 76 aa, Artificial Sequence; identical to SEQ ID NO: 23261
  Synthetic polypeptide

SEQ ID NO: 23277 - protein, 76 aa, Artificial Sequence; identical to SEQ ID NO: 23261
  Synthetic polypeptide

SEQ ID NO: 23278 - protein, 76 aa, Artificial Sequence; identical to SEQ ID NO: 23261
  Synthetic polypeptide

SEQ ID NO: 23279 - protein, 76 aa, Artificial Sequence; identical to SEQ ID NO: 23261
  Synthetic polypeptide

SEQ ID NO: 23280 - protein, 76 aa, Artificial Sequence; identical to SEQ ID NO: 23261
  Synthetic polypeptide

SEQ ID NO: 23281 - protein, 76 aa, Artificial Sequence; identical to SEQ ID NO: 23261
  Synthetic polypeptide

SEQ ID NO: 23282 - protein, 76 aa, Artificial Sequence; identical to SEQ ID NO: 23261
  Synthetic polypeptide

SEQ ID NO: 23283 - protein, 19 aa, Artificial Sequence
  Synthetic polypeptide
HAPPQVNRKGYIYSTNFGI

SEQ ID NO: 23284 - protein, 19 aa, Artificial Sequence
  Synthetic polypeptide
MLLHRSTGRDTSTQQTSGF

SEQ ID NO: 23285 - protein, 784 aa, Artificial Sequence
  Synthetic polypeptide
ECGLWTPTAWLPILACPSRVVDLSSAKRKFADSLNEFKFQCIGDAETDDEMCIARSLQEFATVLRNLEDERIRMIENASEVLITPLEKFRKEQIGAAKEAKKKYDKETEKYCGILEKHLNLSSKKKESQLQEADSQVDLVRQHFYEVSLEYVFKVQEVQERKMFEFVEPLLAFLQGLFTFYHHGYELAKDFGDFKTQLTISIQNTRNRFEGTRSEVESLMKKMKENPLEHKTISPYTMEGYLYVQEKRHFGTSWVKHYCTYQRDSKQITMVPFDQKSGGKGGEDESVILKSCTRRKTDSIEKRFCFDVEAVDRPGVITMQALSEEDRRLWMEAMDGREPVYNSNKDSQSEGTAQLDSIGFSIIRKCIHAVETRGINEQGLYRIVGVNSRVQKLLSVLMDPKTASETETDICAEWEIKTITSALKTYLRMLPGPLMMYQFQRSFIKAAKLENQESRVSEIHSLVHRLPEKNRQMLQLLMNHLANVANNHKQNLMTVANLGVVFGPTLLRPQEETVAAIMDIKFQNIVIEILIENHEKIFNTVPDMPLTNAQLHLSRKKSSDSKPPSCSERPLTLFHTVQSTEKQEQRNSIINSSLESVSSNPNSILNSSSSLQPNMNSSDPDLAVVKPTRPNSLPPNPSPTSPLSPSWPMFSAPSSPMPTSSTSSDSSPVRSVAGFVWFSVAAVVLSLARSSLHAVFSLLVNFVPCHPNLHLLFDRPEEAVHEDSSTPFRKAKALYACKAEHDSELSFTAGTVFDNVHPSQEPGWLEGTLNGKTGLIPENYVEFL

SEQ ID NO: 23286 - protein, 13 aa, Artificial Sequence
  Synthetic polypeptide
LICLQRSGSLQIP

SEQ ID NO: 23287 - protein, 13 aa, Artificial Sequence
  Synthetic polypeptide
LICLQRSGSLQIP

SEQ ID NO: 23288 - protein, 13 aa, Artificial Sequence
  Synthetic polypeptide
LICLQRSGSLQIP

SEQ ID NO: 23289 - protein, 729 aa, Artificial Sequence
  Synthetic polypeptide
ECGLWTPTAWLPILACPSRVVDLSSAKRKFADSLNEFKFQCIGDAETDDEMCIARSLQEFATVLRNLEDERIRMIENASEVLITPLEKFRKEQIGAAKEAKKKYDKETEKYCGILEKHLNLSSKKKESQLQEADSQVDLVRQHFYEVSLEYVFKVQEVQERKMFEFVEPLLAFLQGLFTFYHHGYELAKDFGDFKTQLTISIQNTRNRFEGTRSEVESLMKKMKENPLEHKTISPYTMEGYLYVQEKRHFGTSWVKHYCTYQRDSKQITMVPFDQKSGGKGGEDESVILKSCTRRKTDSIEKRFCFDVEAVDRPGVITMQALSEEDRRLWMEAMDGREPVYNSNKDSQSEGTAQLDSIGFSIIRKCIHAVETRGINEQGLYRIVGVNSRVQKLLSVLMDPKTASETETDICAEWEIKTITSALKTYLRMLPGPLMMYQFQRSFIKAAKLENQESRVSEIHSLVHRLPEKNRQMLQLLMNHLANVANNHKQNLMTVANLGVVFGPTLLRPQEETVAAIMDIKFQNIVIEILIENHEKIFNTVPDMPLTNAQLHLSRKKSSDSKPPSCSERPLTLFHTVQSTEKQEQRNSIINSSLESVSSNPNSILNSSSSLQPNMNSSDPDLAVVKPTRPNSLPPNPSPTSPLSPSWPMFSAPSSPMPTSSTSSDSSPVSTPFRKAKALYACKAEHDSELSFTAGTVFDNVHPSQEPGWLEGTLNGKTGLIPENYVEFL

SEQ ID NO: 23290 - protein, 164 aa, Artificial Sequence
  Synthetic polypeptide
ECGLWTPTAWLPILACPSRVVDLSSAKRKFADSLNEFKFQCIGDAETDDEMCIARSLQEFATVLRNLEDERIRMIENASEVLITPLEKFRKEQIGAAKEAKKKYDKETEKYCGILEKHLNLSSKKKESQLQEADSQVDLVRQHFYEVSLEYVFKVQEVQERKMF

SEQ ID NO: 23291 - protein, 989 aa, Artificial Sequence
  Synthetic polypeptide
HFIAMMYFKIKVDWRRSFITTDVNPYYDSFVRWQFLTLRERNKIKFGKRYTIYSPKDGQPCMDHDRQTGEGVGPQEYTLLKLKVLEPYPSKLSGLKGKNIFLVAATLRPETMFGQTNCWVRPDMKYIGFETVNGDIFICTQKAARNMSYQGFTKDNGVVPVVKELMGEEILGASLSAPLTSYKVIYVLPMLTIKEDKGTGVVTSVPSDSPDDIAALRDLKKKQALRAKYGIRDDMVLPFEPVPVIEIPGFGNLSAVTICDELKIQSQNDREKLAEAKEKIYLKGFYEGIMLVDGFKGQKVQDVKKTIQKKMIDAGDALIYMEPEKQVMSRSSDECVVALCDQWYLDYGEENWKKQTSQCLKNLETFCEETRRNFEATLGWLQEHACSRTYGLGTHLPWDEQWLIESLSDSTIYMAFYTVAHLLQGGNLHGQAESPLGIRPQQMTKEVWDYVFFKEAPFPKTQIAKEKLDQLKQEFEFWYPVDLRVSGKDLVPNHLSYYLYNHVAMWPEQSDKWPTAVRANGHLLLNSEKMSKSTGNFLTLTQAIDKFSADGMRLALADAGDTVEDANFVEAMADAGILRLYTWVEWVKEMVANWDSLRSGPASTFNDRVFASELNAGIIKTDQNYEKMMFKEALKTGFFEFQAAKDKYRELAVEGMHRELVFRFIEVQTLLLAPFCPHLCEHIWTLLGKPDSIMNASWPVAGPVNEVLIHSSQYLMEVTHDLRLRLKNYMMPAKGKKTDKQPLQKPSHCTIYVAKNYPPWQHTTLSVLRKHFEANNGKLPDNKVIASELGSMPELKKYMKKVMPFVAMIKENLEKMGPRILDLQLEFDEKAVLMENIVYLTNSLELEHIEVKFASEAEDKIREDCCPGKPLNVFRIEPGVSVSLVNPQPSNGHFSTKIEIRQGDNCDSIIRRLMKMNRGIKDLSKVKLMRFDDPLLGPRRVPVLGKEYTEKTPISEHAVFNVDLMSKKIHLTENGIRVDIGDTIIYLVH

SEQ ID NO: 23292 - protein, 989 aa, Artificial Sequence; identical to SEQ ID NO: 23291
  Synthetic polypeptide

SEQ ID NO: 23293 - protein, 989 aa, Artificial Sequence; identical to SEQ ID NO: 23291
  Synthetic polypeptide

SEQ ID NO: 23294 - protein, 989 aa, Artificial Sequence; identical to SEQ ID NO: 23291
  Synthetic polypeptide

SEQ ID NO: 23295 - protein, 6 aa, Artificial Sequence
  Synthetic polypeptide
CILKLR

SEQ ID NO: 23296 - protein, 6 aa, Artificial Sequence
  Synthetic polypeptide
CILKLR

SEQ ID NO: 23297 - protein, 6 aa, Artificial Sequence
  Synthetic polypeptide
CILKLR

SEQ ID NO: 23298 - protein, 6 aa, Artificial Sequence
  Synthetic polypeptide
CILKLR

SEQ ID NO: 23299 - protein, 20 aa, Artificial Sequence
  Synthetic polypeptide
GLPSPAEHYCLPHQQSAPSC

SEQ ID NO: 23300 - protein, 116 aa, Artificial Sequence
  Synthetic polypeptide
GASPFTQLSFFSLLPPCEEGHACFLFCHDCKFPEASPALQNTTAFLINKVPLPVDKLAPLPLDNILPFMDPLKLLLKTLGISVEHLVEGLRKCVNELGPEASEAVKKLLEALSHLV

SEQ ID NO: 23301 - protein, 75 aa, Artificial Sequence
  Synthetic polypeptide
WFYKGLPPSLSSHSFPSCHHVKKDMLAFSSAMIVSFLRPPQPCRTLLPSSSTKCPFLLTSWHLYLWTTFFPLWIH

SEQ ID NO: 23302 - protein, 24 aa, Artificial Sequence
  Synthetic polypeptide
SQHFGRPMQETPDFYPHSKIWALL

SEQ ID NO: 23303 - protein, 32 aa, Artificial Sequence
  Synthetic polypeptide
PGAVAHSCNPSTLGGRCRKRQTSILIQKSGPC

SEQ ID NO: 23304 - protein, 32 aa, Artificial Sequence
  Synthetic polypeptide
RVQWLTPVIPALWEADAGNARLLSSFKNLGLA

SEQ ID NO: 23305 - protein, 66 aa, Artificial Sequence
  Synthetic polypeptide
EIKSTGNTGADSLGREAKCYNELNGCTKIYDPVCGTDGNTYPNECVLCFENRKRQTSILIQKSGPC

SEQ ID NO: 23306 - protein, 64 aa, Artificial Sequence
  Synthetic polypeptide
NQQVTLELTPWEERPNVTMNLMDAPRYMTLSVGLMEILIPMNACYVLKIGNARLLSSFKNLGLA

SEQ ID NO: 23307 - protein, 5 aa, Artificial Sequence
  Synthetic polypeptide
NKINR

SEQ ID NO: 23308 - protein, 5 aa, Artificial Sequence
  Synthetic polypeptide
NKINR

SEQ ID NO: 23309 - protein, 52 aa, Artificial Sequence
  Synthetic polypeptide
EIKSTGNTGADSLGREAKCYNELNGCTKIYDPVCGTDGNTYPNECVLCFENR

SEQ ID NO: 23310 - protein, 50 aa, Artificial Sequence
  Synthetic polypeptide
NQQVTLELTPWEERPNVTMNLMDAPRYMTLSVGLMEILIPMNACYVLKIG

SEQ ID NO: 23311 - protein, 89 aa, Artificial Sequence
  Synthetic polypeptide
TITDAELRVTLTVEATAFLINKVPLPVDKLAPLPLDNILPFMDPLKLLLKTLGISVEHLVEGLRKCVNELGPEASEAVKKLLEALSHLV

SEQ ID NO: 23312 - protein, 35 aa, Artificial Sequence
  Synthetic polypeptide
LSQWKLLPSSSTKCPFLLTSWHLYLWTTFFPLWIH

SEQ ID NO: 23313 - protein, 39 aa, Artificial Sequence
  Synthetic polypeptide
RLTLPDHLGSPLDHHGRRASGNSHSGSYCLPHQQSAPSC

SEQ ID NO: 23314 - protein, 249 aa, Artificial Sequence
  Synthetic polypeptide
FSHHELTSCLHVTCWALGVSVTDYTFEDCQLALAEGQLRLPADTCLLEFARLVRGLGLKPEKLEKDLDRYSERARMKGGEKIGIAEFAASLEVPVSDLLEDMFSLFDESGSGEVDLRECVVALSVVCRPARTLDTIQLAFKMYGAQEDGSVGEGDLSCILKTALGVAELTVTDLFRAIDQEEKGKITFADFHRFAEMYPAFAEEYLYPDQTHFESCAETSPAPIPNGFCADFSPENSDAGRKPVRKKLD

SEQ ID NO: 23315 - protein, 249 aa, Artificial Sequence; identical to SEQ ID NO: 23314
  Synthetic polypeptide

SEQ ID NO: 23316 - protein, 20 aa, Artificial Sequence
  Synthetic polypeptide
SRTMSSLRVSTSHVGPWVSP

SEQ ID NO: 23317 - protein, 20 aa, Artificial Sequence
  Synthetic polypeptide
SRTMSSLRVSTSHVGPWVSP

SEQ ID NO: 23318 - protein, 17 aa, Artificial Sequence
  Synthetic polypeptide
AHFVSPRHMLGLGCLRD

SEQ ID NO: 23319 - protein, 17 aa, Artificial Sequence
  Synthetic polypeptide
AHFVSPRHMLGLGCLRD

SEQ ID NO: 23320 - protein, 36 aa, Artificial Sequence
  Synthetic polypeptide
KLEKEFSINVTSLGGLSPDVKCISHWTLITMQTAPM

SEQ ID NO: 23321 - protein, 36 aa, Artificial Sequence; identical to SEQ ID NO: 23320
  Synthetic polypeptide

SEQ ID NO: 23322 - protein, 30 aa, Artificial Sequence
  Synthetic polypeptide
QWKQKLEWCSKRAMGRGTQTACRSWKRNFQ

SEQ ID NO: 23323 - protein, 30 aa, Artificial Sequence; identical to SEQ ID NO: 23322
  Synthetic polypeptide

SEQ ID NO: 23324 - protein, 91 aa, Artificial Sequence
  Synthetic polypeptide
NGAVKGPWAEELRQPVEAGKGIFNKRDFTRWPKPRCKMYIPLDPDYNADCPNVTAPVCASNGHTFQNECFFCVEQREFHYRIKFEKYGKCD

SEQ ID NO: 23325 - protein, 91 aa, Artificial Sequence; identical to SEQ ID NO: 23324
  Synthetic polypeptide

SEQ ID NO: 23326 - protein, 79 aa, Artificial Sequence
  Synthetic polypeptide
SQQFGRPRRADHLRSGVQDQSGQHAVSSYHFHLPGAGPAQEPQKQEEGARAAWAPGPWPSPGATGPGVTDETVCPHGGV

SEQ ID NO: 23327 - protein, 184 aa, Artificial Sequence
  Synthetic polypeptide
GQEFKTSLANMLFLLTISIFLGLGQPRSPKSKRKGQGRPGPLAPGPHQVPLDLVSRMKPYARMEEYERNIEEMVAQLRNSSELAQRKCEVNLQLWMSNKRSLSPWGYSINHDPSRIPVDLPEARCLCLGCVNPFTMQEDRSMVSVPVFSQVPVRRRLCPPPPRTGPCRQRAVMETIAVGCTCIF

SEQ ID NO: 23328 - protein, 78 aa, Artificial Sequence
  Synthetic polypeptide
WAQWLTSVIPAVWEAKTSRSPEVRSSRPVWPTCCFFLPFPSSWGWASPGAPKARGRGKGGLGPWPLALTRCHWTWCHG

SEQ ID NO: 23329 - protein, 70 aa, Artificial Sequence
  Synthetic polypeptide
VIPAAFLVLQLAGGKTWDLLAFIIICFFLPFPSSWGWASPGAPKARGRGKGGLGPWPLALTRCHWTWCHG

SEQ ID NO: 23330 - protein, 56 aa, Artificial Sequence
  Synthetic polypeptide
SSVSSYHFHLPGAGPAQEPQKQEEGARAAWAPGPWPSPGATGPGVTDETVCPHGGV

SEQ ID NO: 23331 - protein, 251 aa, Artificial Sequence
  Synthetic polypeptide
LEQKGGGGVNSLFLSWNMCLLLASDIRAPGSCSLGLWDLHQWHPWLQPFEPGLSHTSSFPGPPACRWQNVGLAGLYNHLFLLTISIFLGLGQPRSPKSKRKGQGRPGPLAPGPHQVPLDLVSRMKPYARMEEYERNIEEMVAQLRNSSELAQRKCEVNLQLWMSNKRSLSPWGYSINHDPSRIPVDLPEARCLCLGCVNPFTMQEDRSMVSVPVFSQVPVRRRLCPPPPRTGPCRQRAVMETIAVGCTCIF

SEQ ID NO: 23332 - protein, 15 aa, Artificial Sequence
  Synthetic polypeptide
MPLPGGMVRKKTTMY

SEQ ID NO: 23333 - protein, 15 aa, Artificial Sequence
  Synthetic polypeptide
MPLPGGMVRKKTTMY

SEQ ID NO: 23334 - protein, 15 aa, Artificial Sequence
  Synthetic polypeptide
MPLPGGMVRKKTTMY

SEQ ID NO: 23335 - protein, 22 aa, Artificial Sequence
  Synthetic polypeptide
CPCLVVWSGKRLQCTSHGSSGT

SEQ ID NO: 23336 - protein, 22 aa, Artificial Sequence
  Synthetic polypeptide
CPCLVVWSGKRLQCTSHGSSGT

SEQ ID NO: 23337 - protein, 22 aa, Artificial Sequence
  Synthetic polypeptide
CPCLVVWSGKRLQCTSHGSSGT

SEQ ID NO: 23338 - protein, 252 aa, Artificial Sequence
  Synthetic polypeptide
APAWWYGQEKDYNVLVMDLLGPSLEDLFNFCSRRFTMKTVLMLADQMISRIEYVHTKNFIHRDIKPDNFLMGIGRHCNKLFLIDFGLAKKYRDNRTRQHIPYREDKNLTGTARYASINAHLGIEQSRRDDMESLGYVLMYFNRTSLPWQGLKAATKKQKYEKISEKKMSTPVEVLCKGFPAEFAMYLNYCRGLRFEEAPDYMYLRQLFRILFRTLNHQYDYTFDWTMLKQKAAQQAASSSGQGQQAQTPTGF

SEQ ID NO: 23339 - protein, 264 aa, Artificial Sequence
  Synthetic polypeptide
APAWWYGQEKDYNVLVMDLLGPSLEDLFNFCSRRFTMKTVLMLADQMISRIEYVHTKNFIHRDIKPDNFLMGIGRHCNKLFLIDFGLAKKYRDNRTRQHIPYREDKNLTGTARYASINAHLGIEQSRRDDMESLGYVLMYFNRTSLPWQGLKAATKKQKYEKISEKKMSTPVEVLCKGFPAEFAMYLNYCRGLRFEEAPDYMYLRQLFRILFRTLNHQYDYTFDWTMLKQKAAQQAASSSGQGQQAQTPTGKQTDKTKSNMKGF

SEQ ID NO: 23340 - protein, 292 aa, Artificial Sequence
  Synthetic polypeptide
APAWWYGQEKDYNVLVMDLLGPSLEDLFNFCSRRFTMKTVLMLADQMISRIEYVHTKNFIHRDIKPDNFLMGIGRHCNKCLESPVGKRKRSMTVSTSQDPSFSGLNQLFLIDFGLAKKYRDNRTRQHIPYREDKNLTGTARYASINAHLGIEQSRRDDMESLGYVLMYFNRTSLPWQGLKAATKKQKYEKISEKKMSTPVEVLCKGFPAEFAMYLNYCRGLRFEEAPDYMYLRQLFRILFRTLNHQYDYTFDWTMLKQKAAQQAASSSGQGQQAQTPTGKQTDKTKSNMKGF

SEQ ID NO: 23341 - protein, 52 aa, Artificial Sequence
  Synthetic polypeptide
EHEVRLGPRTSTAWSTPTTNAWSWRRSFITAVTSQSGGNQSWLPIWGSLNGR

SEQ ID NO: 23342 - protein, 3 aa, Artificial Sequence
  Synthetic polypeptide
STR

SEQ ID NO: 23343 - protein, 119 aa, Artificial Sequence
  Synthetic polypeptide
ARGKTRTKDKYRVVYTDHQRLELEKEFHYSRYITIRRKSELAANLGLTERQVKIWFQNRRAKERKVNKKKQQQQQPPQPPMAHDITATPAGPSLGGLCPSNTSLLATSSPMPVKEEFLP

SEQ ID NO: 23344 - protein, 159 aa, Artificial Sequence
  Synthetic polypeptide
CQHFERPRREDHEPVMDDQRDLISNNEQLPMLGRRPGAPESKCSRGALYTGFSILVTLLLAGQATTAYFLYQQQGRLDKLTVTSQNLQLENLRMKLPKPPKPVSKMRMATPLLMQALPMGALPQGPMQNATKYGNMTEDHVMHLLQSHWNWRTRLLGWV

SEQ ID NO: 23345 - protein, 64 aa, Artificial Sequence
  Synthetic polypeptide
MGAVAHACNASTLRGRGGKITSQSWMTSATLSPTMSNCPCWAGALGPRRASAAAEPCTQAFPSW

SEQ ID NO: 23346 - protein, 64 aa, Artificial Sequence; identical to SEQ ID NO: 23345
  Synthetic polypeptide

SEQ ID NO: 23347 - protein, 64 aa, Artificial Sequence; identical to SEQ ID NO: 23345
  Synthetic polypeptide

SEQ ID NO: 23348 - protein, 64 aa, Artificial Sequence; identical to SEQ ID NO: 23345
  Synthetic polypeptide

SEQ ID NO: 23349 - protein, 64 aa, Artificial Sequence; identical to SEQ ID NO: 23345
  Synthetic polypeptide

SEQ ID NO: 23350 - protein, 64 aa, Artificial Sequence; identical to SEQ ID NO: 23345
  Synthetic polypeptide

SEQ ID NO: 23351 - protein, 64 aa, Artificial Sequence; identical to SEQ ID NO: 23345
  Synthetic polypeptide

SEQ ID NO: 23352 - protein, 12 aa, Artificial Sequence
  Synthetic polypeptide
EAEAGRSRASHG

SEQ ID NO: 23353 - protein, 12 aa, Artificial Sequence
  Synthetic polypeptide
EAEAGRSRASHG

SEQ ID NO: 23354 - protein, 12 aa, Artificial Sequence
  Synthetic polypeptide
EAEAGRSRASHG

SEQ ID NO: 23355 - protein, 12 aa, Artificial Sequence
  Synthetic polypeptide
EAEAGRSRASHG

SEQ ID NO: 23356 - protein, 12 aa, Artificial Sequence
  Synthetic polypeptide
EAEAGRSRASHG

SEQ ID NO: 23357 - protein, 12 aa, Artificial Sequence
  Synthetic polypeptide
EAEAGRSRASHG

SEQ ID NO: 23358 - protein, 12 aa, Artificial Sequence
  Synthetic polypeptide
EAEAGRSRASHG

SEQ ID NO: 23359 - protein, 12 aa, Artificial Sequence
  Synthetic polypeptide
EAEAGRSRASHG

SEQ ID NO: 23360 - protein, 231 aa, Artificial Sequence
  Synthetic polypeptide
CQHFERPRREDHEPVMDDQRDLISNNEQLPMLGRRPGAPESKCSRGALYTGFSILVTLLLAGQATTAYFLYQQQGRLDKLTVTSQNLQLENLRMKLPKPPKPVSKMRMATPLLMQALPMGALPQGPMQNATKYGNMTEDHVMHLLQNADPLKVYPPLKGSFPENLRHLKNTMETIDWKVFESWMHHWLLFEMSRHSLEQKPTDAPPKESLELEDPSSGLGVTKQDLGPVPM

SEQ ID NO: 23361 - protein, 320 aa, Artificial Sequence
  Synthetic polypeptide
CQHFERPRREDHEPVMDDQRDLISNNEQLPMLGRRPGAPESKCSRGALYTGFSILVTLLLAGQATTAYFLYQQQGRLDKLTVTSQNLQLENLRMKLPKPPKPVSKMRMATPLLMQALPMGALPQGPMQNATKYGNMTEDHVMHLLQNADPLKVYPPLKGSFPENLRHLKNTMETIDWKVFESWMHHWLLFEMSRHSLEQKPTDAPPKVLTKCQEEVSHIPAVHPGSFRPKCDENGNYLPLQCYGSIGYCWCVFPNGTEVPNTRSRGHHNCSESLELEDPSSGLGVTKQDLGPGKGLAEGHLVTSSSSPAGPAPLWAGEGV

SEQ ID NO: 23362 - protein, 151 aa, Artificial Sequence
  Synthetic polypeptide
CQHFERPRREDHEPVMDDQRDLISNNEQLPMLGRRPGAPESKCSRGALYTGFSILVTLLLAGQATTAYFLYQQQGRLDKLTVTSQNLQLENLRMKLPKPPKPVSKMRMATPLLMQALPMGALPQGPMQNATKYGNMTEDHVMHLLQEVAKS

SEQ ID NO: 23363 - protein, 295 aa, Artificial Sequence
  Synthetic polypeptide
CQHFERPRREDHEPVMDDQRDLISNNEQLPMLGRRPGAPESKCSRGALYTGFSILVTLLLAGQATTAYFLYQQQGRLDKLTVTSQNLQLENLRMKLPKPPKPVSKMRMATPLLMQALPMGALPQGPMQNATKYGNMTEDHVMHLLQNADPLKVYPPLKGSFPENLRHLKNTMETIDWKVFESWMHHWLLFEMSRHSLEQKPTDAPPKVLTKCQEEVSHIPAVHPGSFRPKCDENGNYLPLQCYGSIGYCWCVFPNGTEVPNTRSRGHHNCSESLELEDPSSGLGVTKQDLGPVPM

SEQ ID NO: 23364 - protein, 147 aa, Artificial Sequence
  Synthetic polypeptide
CQHFERPRREDHEPVMDDQRDLISNNEQLPMLGRRPGAPESKCSRGALYTGFSILVTLLLAGQATTAYFLYQQQGRLDKLTVTSQNLQLENLRMKLPKPPKPVSKMRMATPLLMQALPMGALPQGPMQNATKYGNMTEDHVMHLLQY

SEQ ID NO: 23365 - protein, 121 aa, Artificial Sequence
  Synthetic polypeptide
CQHFERPRREDHEPVMDDQRDLISNNEQLPMLGRRPGAPESKCSRGALYTGFSILVTLLLAGQATTAYFLYQQQGRLDKLTVTSQNLQLENLRMKLPKPHAECHQVWQHDRGPCDAPAPEC

SEQ ID NO: 23366 - protein, 51 aa, Artificial Sequence
  Synthetic polypeptide
CQHFERPRREDHEPVMDDQRDLISNNEQLPMLGRRPGAPESPCRMPPSMAT

SEQ ID NO: 23367 - protein, 60 aa, Artificial Sequence
  Synthetic polypeptide
MGAVAHACNASTLRGRGGKITSQSWMTSATLSPTMSNCPCWAGALGPRRAHAECHQVWQH

SEQ ID NO: 23368 - protein, 17 aa, Artificial Sequence
  Synthetic polypeptide
AGGLPLLSQLFRKYAIG

SEQ ID NO: 23369 - protein, 17 aa, Artificial Sequence
  Synthetic polypeptide
AGGLPLLSQLFRKYAIG

SEQ ID NO: 23370 - protein, 17 aa, Artificial Sequence
  Synthetic polypeptide
AGGLPLLSQLFRKYAIG

SEQ ID NO: 23371 - protein, 17 aa, Artificial Sequence
  Synthetic polypeptide
AGGLPLLSQLFRKYAIG

SEQ ID NO: 23372 - protein, 422 aa, Artificial Sequence
  Synthetic polypeptide
TLNWNKQVDSHYCPSCLENMPSAEAKLKKNRCANCFDCPGCMHTLSTRATSISTQLPDDPAKTTMKKAYYLACGFCRWTSRDVGMADKSVASGGWQEPENPHTQRMNKLIEYYQQLAQKEKVERDRKKLARRRNYMPLAFSDKYGLGTRLQRPRAGASISTLAGLSLKEGEDQKEIKIEPAQAVDEVEPLPEDYYTRPVNLTEVTTLQQRLLQPDFQPVCASQLYPRHKHLLIKRSLRCRKCEHNLSKPEFNPTSIKFKIQLVAVNYIPEVRIMSIPNLRYMKESQVLLTLTNPVENLTHVTLFECEEGDPDDINSTAKVVVPPKELVLAGKDAAAEYDELAEPQDFQDDPDIIAFRKANKVGIFIKVTPQREEGEVTVCFKMKHDFKNLAAPIRPIEESDQGTEVIWLTQHVELSLGPLLP

SEQ ID NO: 23373 - protein, 14 aa, Artificial Sequence
  Synthetic polypeptide
TGISRWTPIIVPVV

SEQ ID NO: 23374 - protein, 14 aa, Artificial Sequence
  Synthetic polypeptide
TGISRWTPIIVPVV

SEQ ID NO: 23375 - protein, 14 aa, Artificial Sequence
  Synthetic polypeptide
TGISRWTPIIVPVV

SEQ ID NO: 23376 - protein, 14 aa, Artificial Sequence
  Synthetic polypeptide
TGISRWTPIIVPVV

SEQ ID NO: 23377 - protein, 429 aa, Artificial Sequence
  Synthetic polypeptide
TLNWNKQVDSHYCPSCLENMPSAEAKLKKNRCANCFDCPGCMHTLSTRATSISTQLPDDPAKTTMKKAYYLACGFCRWTSRDVGMADKSVASGGWQEPENPHTQRMNKLIEYYQQLAQKEKVERDRKKLARRRNYMPLAFSQHTIHVVDKYGLGTRLQRPRAGASISTLAGLSLKEGEDQKEIKIEPAQAVDEVEPLPEDYYTRPVNLTEVTTLQQRLLQPDFQPVCASQLYPRHKHLLIKRSLRCRKCEHNLSKPEFNPTSIKFKIQLVAVNYIPEVRIMSIPNLRYMKESQVLLTLTNPVENLTHVTLFECEEGDPDDINSTAKVVVPPKELVLAGKDAAAEYDELAEPQDFQDDPDIIAFRKANKVGIFIKVTPQREEGEVTVCFKMKHDFKNLAAPIRPIEESDQGTEVIWLTQHVELSLGPLLP

SEQ ID NO: 23378 - protein, 48 aa, Artificial Sequence
  Synthetic polypeptide
TLNWNKQVDSHYCPSCLENMPSAEAKLKKNRLGECILRRRTTEMCQLF

SEQ ID NO: 23379 - protein, 48 aa, Artificial Sequence; identical to SEQ ID NO: 23378
  Synthetic polypeptide

SEQ ID NO: 23380 - protein, 7 aa, Artificial Sequence
  Synthetic polypeptide
SSSLLLS

SEQ ID NO: 23381 - protein, 6 aa, Artificial Sequence
  Synthetic polypeptide
KLPPAE

SEQ ID NO: 23382 - protein, 97 aa, Artificial Sequence
  Synthetic polypeptide
EAVDHPVELLARDFEKNYNMYIFPVHWQFGQLDQHPIDGYLSHTELAPLRAPLIPMEHCTTRFFETCDLDNDKYIALDEWAGCFGIKQKDIDKDLVI

SEQ ID NO: 23383 - protein, 95 aa, Artificial Sequence
  Synthetic polypeptide
RQWTTPWSCWPGTSRRTITCTSSLYTGSSASWTSTPLTGTSPTPSWLHCVLPSSPWSIAPPAFSRPVTWTMTSTSPWMSGPAASASSRRISTRIL

SEQ ID NO: 23384 - protein, 17 aa, Artificial Sequence
  Synthetic polypeptide
GSGPPRGAAGPGLREEL

SEQ ID NO: 23385 - protein, 17 aa, Artificial Sequence
  Synthetic polypeptide
GSGPPRGAAGPGLREEL

SEQ ID NO: 23386 - protein, 34 aa, Artificial Sequence
  Synthetic polypeptide
EAVDHPVELLARDFEKNYNMYIFPVHWQFGQLDQ

SEQ ID NO: 23387 - protein, 34 aa, Artificial Sequence
  Synthetic polypeptide
RQWTTPWSCWPGTSRRTITCTSSLYTGSSASWTS

SEQ ID NO: 23388 - protein, 30 aa, Artificial Sequence
  Synthetic polypeptide
RRSTWKVLSIRPGIDLFPVLQRSLCHLWVL

SEQ ID NO: 23389 - protein, 30 aa, Artificial Sequence; identical to SEQ ID NO: 23388
  Synthetic polypeptide

SEQ ID NO: 23390 - protein, 30 aa, Artificial Sequence; identical to SEQ ID NO: 23388
  Synthetic polypeptide

SEQ ID NO: 23391 - protein, 30 aa, Artificial Sequence; identical to SEQ ID NO: 23388
  Synthetic polypeptide

SEQ ID NO: 23392 - protein, 30 aa, Artificial Sequence; identical to SEQ ID NO: 23388
  Synthetic polypeptide

SEQ ID NO: 23393 - protein, 29 aa, Artificial Sequence
  Synthetic polypeptide
HKAWHRSVPSSPKESMPSLGFMNVGLSTC

SEQ ID NO: 23394 - protein, 29 aa, Artificial Sequence
  Synthetic polypeptide
HKAWHRSVPSSPKESMPSLGFMNVGLSTC

SEQ ID NO: 23395 - protein, 29 aa, Artificial Sequence
  Synthetic polypeptide
HKAWHRSVPSSPKESMPSLGFMNVGLSTC

SEQ ID NO: 23396 - protein, 29 aa, Artificial Sequence
  Synthetic polypeptide
HKAWHRSVPSSPKESMPSLGFMNVGLSTC

SEQ ID NO: 23397 - protein, 29 aa, Artificial Sequence
  Synthetic polypeptide
HKAWHRSVPSSPKESMPSLGFMNVGLSTC

SEQ ID NO: 23398 - protein, 52 aa, Artificial Sequence
  Synthetic polypeptide
CTRFVSHCLPNPATSEQPYSIHSPIAETANGMVAFCTVGSFFSRHQSLQRLL

SEQ ID NO: 23399 - protein, 52 aa, Artificial Sequence; identical to SEQ ID NO: 23398
  Synthetic polypeptide

SEQ ID NO: 23400 - protein, 62 aa, Artificial Sequence
  Synthetic polypeptide
HSARWDLSSPGTSHFRDCCDGGFGSPGDFALSVLILVSQQQQHVLGERPVPLLRLQGGAHPH

SEQ ID NO: 23401 - protein, 62 aa, Artificial Sequence; identical to SEQ ID NO: 23400
  Synthetic polypeptide

SEQ ID NO: 23402 - protein, 376 aa, Artificial Sequence
  Synthetic polypeptide
NCKWNGSILHGGIFLLQAPVTSETVVTEVLGHRVTLPCLYSSWSHNSNSMCWGKDQCPYSGCKEALIRTDGMRVTSRKSAKYRLQGTIPRGDVSLTILNPSESDSGVYCCRIEVPGWFNDVKINVRLNLQRASTTTHRTATTTTRRTTTTSPTTTRQMTTTPAALPTTVVTTPDLTTGTPLQMTTIAVFTTANTCLSLTPSTLPEEATGLLTPEPSKEGPILTAESETVLPSDSWSSVESTSADTVLLTSKESKVWDLPSTSHVSMWKTSDSVSSPQPGASDTAVPEQNKTTKTGQMDGIPMSMKNEMPISQLLMIIAPSLGFVLFALFVAFLLRGKLMETYCSQKHTRLDYIGDSKNVLNDVQHGREDEDGLFTL

SEQ ID NO: 23403 - protein, 348 aa, Artificial Sequence
  Synthetic polypeptide
NCKWNGSILHGGIFLLQAPVTSETVVTEVLGHRVTLPCLYSSWSHNSNSMCWGKDQCPYSGCKEALIRTDGMRVTSRKSAKYRLQGTIPRGDVSLTILNPSESDSGVYCCRIEVPGWFNDVKINVRLNLQRASTTTHRTATTTTRRTTTTSPTTTRQMTTTPAALPTTVVTTPDLTTGTPLQMTTIAVFTTANTCLSLTPSTLPEEATGLLTPEPSKEGPILTAESETVLPSDSWSSVESTSADTVLLTSKASDTAVPEQNKTTKTGQMDGIPMSMKNEMPISQLLMIIAPSLGFVLFALFVAFLLRGKLMETYCSQKHTRLDYIGDSKNVLNDVQHGREDEDGLFTL

SEQ ID NO: 23404 - protein, 19 aa, Artificial Sequence
  Synthetic polypeptide
GWAWWLMPVIPALWDAQIL

SEQ ID NO: 23405 - protein, 19 aa, Artificial Sequence
  Synthetic polypeptide
GWAWWLMPVIPALWDAQIL

SEQ ID NO: 23406 - protein, 19 aa, Artificial Sequence
  Synthetic polypeptide
GWAWWLMPVIPALWDAQIL

SEQ ID NO: 23407 - protein, 19 aa, Artificial Sequence
  Synthetic polypeptide
GWAWWLMPVIPALWDAQIL

SEQ ID NO: 23408 - protein, 19 aa, Artificial Sequence
  Synthetic polypeptide
GWAWWLMPVIPALWDAQIL

SEQ ID NO: 23409 - protein, 19 aa, Artificial Sequence
  Synthetic polypeptide
GWAWWLMPVIPALWDAQIL

SEQ ID NO: 23410 - protein, 40 aa, Artificial Sequence
  Synthetic polypeptide
SQHFGMLRFCSWFCKGWWRGRSICHTTLPLQWSCHIHVLE

SEQ ID NO: 23411 - protein, 40 aa, Artificial Sequence; identical to SEQ ID NO: 23410
  Synthetic polypeptide

SEQ ID NO: 23412 - protein, 40 aa, Artificial Sequence; identical to SEQ ID NO: 23410
  Synthetic polypeptide

SEQ ID NO: 23413 - protein, 40 aa, Artificial Sequence; identical to SEQ ID NO: 23410
  Synthetic polypeptide

SEQ ID NO: 23414 - protein, 40 aa, Artificial Sequence; identical to SEQ ID NO: 23410
  Synthetic polypeptide

SEQ ID NO: 23415 - protein, 40 aa, Artificial Sequence; identical to SEQ ID NO: 23410
  Synthetic polypeptide

SEQ ID NO: 23416 - protein, 402 aa, Artificial Sequence
  Synthetic polypeptide
MGMVAHACNPSTLGCSDSVAGSVKVGGEAGPSVTLPCHYSGAVTSMCWNRGSCSLFTCQNGIVWTNGTHVTYRKDTRYKLLGDLSRRDVSLTIENTAVSDSGVYCCRVEHRGWFNDMKITVSLEIVPPKVTTTPIVTTVPTVTTVRTSTTVPTTTTVPMTTVPTTTVPTTMSIPTTTTVLTTMTVSTTTSVPTTTSIPTTTSVPVTTTVSTFVPPMPLPRQNHEPVATSPSSPQPAETHPTTLQGAIRREPTSSPLYSYTTDGNDTVTESSDGLWNNNQTQLFLEHSLLTANTTKGIYAGVCISVLVLLALLGVIIAKMFHLAAFKLKLCKMQLKRKSKQKTISTLRIVFMPRTKTQWCSLRVYAHECRRLNRHQHIRRLLDPKTIFLFQFHLAFQHVSDTG

SEQ ID NO: 23417 - protein, 402 aa, Artificial Sequence; identical to SEQ ID NO: 23416
  Synthetic polypeptide

SEQ ID NO: 23418 - protein, 365 aa, Artificial Sequence
  Synthetic polypeptide
MGMVAHACNPSTLGCSDSVAGSVKVGGEAGPSVTLPCHYSGAVTSMCWNRGSCSLFTCQNGIVWTNGTHVTYRKDTRYKLLGDLSRRDVSLTIENTAVSDSGVYCCRVEHRGWFNDMKITVSLEIVPPKVTTTPIVTTVPTVTTVRTSTTVPTTTTVPMTTVPTTTVPTTMSIPTTTTVLTTMTVSTTTSVPTTTSIPTTTSVPVTTTVSTFVPPMPLPRQNHEPVATSPSSPQPAETHPTTLQGAIRREPTSSPLYSYTTDGNDTVTESSDGLWNNNQTQLFLEHSLLTANTTKGIYAGVCISVLVLLALLGVIIAKKYFFKKEVQQLSVSFSSLQIKALQNAVEKEVQAEDNIYIENSLYATD

SEQ ID NO: 23419 - protein, 365 aa, Artificial Sequence; identical to SEQ ID NO: 23418
  Synthetic polypeptide

SEQ ID NO: 23420 - protein, 365 aa, Artificial Sequence; identical to SEQ ID NO: 23418
  Synthetic polypeptide

SEQ ID NO: 23421 - protein, 224 aa, Artificial Sequence
  Synthetic polypeptide
MGMVAHACNPSTLGCSDSVAGSVKVGGEAGPSVTLPCHYSGAVTSMCWNRGSCSLFTCQNGIVWTNGTHVTYRKDTRYKLLGDLSRRDVSLTIENTAVSDSGVYCCRVEHRGWFNDMKITVSLEIVPPKVTTTPIVTTVPTVTTVRTSTTVPTTTTVPMTTVPTTTVPTTMSIPTTTTVLTTMTVSTTTSVPTTTSIPTTTSVPVTTTVSTFVPPMPLPRQNHE

SEQ ID NO: 23422 - protein, 247 aa, Artificial Sequence
  Synthetic polypeptide
QSGCSKVTCISLTREASIKLSPLHGKQISIRYLDMTDCFVLEDEGLHTIAAHCTQLTHLYLRRCVRLTDEGLRYLVIYCASIKELSVSDCRFVSDFGLREIAKLESRLRYLSIAHCGRVTDVGIRYVAKYCSKLRYLNARGCEGITDHGVEYLAKNCTKLKSLDIGKCPLVSDTGLECLALNCFNLKRLSLKSCESITGQGLQIVAANCFDLQTLNVQDCEVSVEALRFVKRHCKRCVIEHTNPAFF

SEQ ID NO: 23423 - protein, 247 aa, Artificial Sequence; identical to SEQ ID NO: 23422
  Synthetic polypeptide

SEQ ID NO: 23424 - protein, 247 aa, Artificial Sequence; identical to SEQ ID NO: 23422
  Synthetic polypeptide

SEQ ID NO: 23425 - protein, 9 aa, Artificial Sequence
  Synthetic polypeptide
CSNNQDAPK

SEQ ID NO: 23426 - protein, 9 aa, Artificial Sequence
  Synthetic polypeptide
CSNNQDAPK

SEQ ID NO: 23427 - protein, 9 aa, Artificial Sequence
  Synthetic polypeptide
CSNNQDAPK

SEQ ID NO: 23428 - protein, 20 aa, Artificial Sequence
  Synthetic polypeptide
VLTIRMLQSDLHQLDPGGLH

SEQ ID NO: 23429 - protein, 20 aa, Artificial Sequence
  Synthetic polypeptide
VLTIRMLQSDLHQLDPGGLH

SEQ ID NO: 23430 - protein, 20 aa, Artificial Sequence
  Synthetic polypeptide
VLTIRMLQSDLHQLDPGGLH

SEQ ID NO: 23431 - protein, 13 aa, Artificial Sequence
  Synthetic polypeptide
GQVSTNGSYYIRQ

SEQ ID NO: 23432 - protein, 46 aa, Artificial Sequence
  Synthetic polypeptide
ARSQQMAAITSDSDESCCSLTVSDRPLWIQTGSIEVNSETGSTKTL

SEQ ID NO: 23433 - protein, 45 aa, Artificial Sequence
  Synthetic polypeptide
PGLNKWQLLHQTVTSPAAPLQCLTDHCGFRLGALKLTVKRAAQRH

SEQ ID NO: 23434 - protein, 26 aa, Artificial Sequence
  Synthetic polypeptide
CRFCPSACDGWSHRSDRSSSEQLPAL

SEQ ID NO: 23435 - protein, 26 aa, Artificial Sequence
  Synthetic polypeptide
CRFCPSACDGWSHRSDRSSSEQLPAL

SEQ ID NO: 23436 - protein, 26 aa, Artificial Sequence
  Synthetic polypeptide
CRFCPSACDGWSHRSDRSSSEQLPAL

SEQ ID NO: 23437 - protein, 26 aa, Artificial Sequence
  Synthetic polypeptide
CRFCPSACDGWSHRSDRSSSEQLPAL

SEQ ID NO: 23438 - protein, 26 aa, Artificial Sequence
  Synthetic polypeptide
CRFCPSACDGWSHRSDRSSSEQLPAL

SEQ ID NO: 23439 - protein, 1056 aa, Artificial Sequence
  Synthetic polypeptide
MVTFLDYYPTAEPVSMTLFLLCQMINDVDSVLLRVTAGVTGATDQVRNSYQLCNNGTLRVMYANGMGISFHSEPHVLAGTITPTIGRCNISLPMENGLNSIEWRLRKEQIKGKVTIFGRKLRVHGRNLLSIDYDRNIRTEKIYDDHRKFTLRIIYDQVGRPFLWLPSSGLAAVNVSYFFNGRLAGLQRGAMSERTDIDKQGRIVSRMFADGKVWSYSYLDKSMVLLLQSQRQYIFEYDSSDRLLAVTMPSVARHSMSTHTSIGYIRNIYNPPESNASVIFDYSDDGRILKTSFLGTGRQVFYKYGKLSKLSEIVYDSTAVTFGYDETTGVLKMVNLQSGGFSCTIRYRKIGPLVDKQIYRFSEEGMVNARFDYTYHDNSFRIASIKPVISETPLPVDLYRYDEISGKVEHFGKFGVIYYDINQIITTAVMTLSKHFDTHGRIKEVQYEMFRSLMYWMTVQYDSMGRVIKRELKLGPYANTTKYTYDYDGDGQLQSVAVNDRPTWRYSYDLNGNLHLLNPGNSVRLMPLRYDLRDRITRLGDVQYKIDDDGYLCQRGSDIFEYNSKGLLTRAYNKASGWSVQYRYDGVGRRASYKTNLGHHLQYFYSDLHNPTRITHVYNHSNSEITSLYYDLQGHLFAMESSSGEEYYVASDNTGTPLAVFSINGLMIKQLQYTAYGEIYYDSNPDFQMVIGFHGGLYDPLTKLVHFTQRDYDVLAGRWTSPDYTMWKNVGKEPAPFNLYMFKSNNPLSSELDLKNYVTDVKSWLVMFGFQLSNIIPGFPRAKMYFVPPPYELSESQASENGQLITGVQQTTERHNQAFMALEGQVITKKLHASIREKAGHWFATTTPIIGKGIMFAIKEGRVTTGVSSIASEDSRKVASVLNNAYYLDKMHYSIEGKDTHYFVKIGSADGDLVTLGTTIGRKVLESGVNVTVSQPTLLVNGRTRRFTNIEFQYSTLLLSIRYGLTPDTLDEEKARVLDQARQRALGTAWAKEQQKARDGREGSRLWTEGEKQQLLSTGRVQGYEGYYVLPVEQYPELADSSSNIQFLRQNEMGKR

SEQ ID NO: 23440 - protein, 1056 aa, Artificial Sequence; identical to SEQ ID NO: 23439
  Synthetic polypeptide

SEQ ID NO: 23441 - protein, 1056 aa, Artificial Sequence; identical to SEQ ID NO: 23439
  Synthetic polypeptide

SEQ ID NO: 23442 - protein, 1056 aa, Artificial Sequence; identical to SEQ ID NO: 23439
  Synthetic polypeptide

SEQ ID NO: 23443 - protein, 1056 aa, Artificial Sequence; identical to SEQ ID NO: 23439
  Synthetic polypeptide

SEQ ID NO: 23444 - protein, 22 aa, Artificial Sequence
  Synthetic polypeptide
RLESQERQIKFGTATSSVIMVP

SEQ ID NO: 23445 - protein, 22 aa, Artificial Sequence
  Synthetic polypeptide
RLESQERQIKFGTATSSVIMVP

SEQ ID NO: 23446 - protein, 22 aa, Artificial Sequence
  Synthetic polypeptide
RLESQERQIKFGTATSSVIMVP

SEQ ID NO: 23447 - protein, 22 aa, Artificial Sequence
  Synthetic polypeptide
RLESQERQIKFGTATSSVIMVP

SEQ ID NO: 23448 - protein, 22 aa, Artificial Sequence
  Synthetic polypeptide
RLESQERQIKFGTATSSVIMVP

SEQ ID NO: 23449 - protein, 319 aa, Artificial Sequence
  Synthetic polypeptide
VKEARHKRPCIMGFHSCQMSKTDVKSWLVMFGFQLSNIIPGFPRAKMYFVPPPYELSESQASENGQLITGVQQTTERHNQAFMALEGQVITKKLHASIREKAGHWFATTTPIIGKGIMFAIKEGRVTTGVSSIASEDSRKVASVLNNAYYLDKMHYSIEGKDTHYFVKIGSADGDLVTLGTTIGRKVLESGVNVTVSQPTLLVNGRTRRFTNIEFQYSTLLLSIRYGLTPDTLDEEKARVLDQARQRALGTAWAKEQQKARDGREGSRLWTEGEKQQLLSTGRVQGYEGYYVLPVEQYPELADSSSNIQFLRQNEMGKR

SEQ ID NO: 23450 - protein, 319 aa, Artificial Sequence; identical to SEQ ID NO: 23449
  Synthetic polypeptide

SEQ ID NO: 23451 - protein, 319 aa, Artificial Sequence; identical to SEQ ID NO: 23449
  Synthetic polypeptide

SEQ ID NO: 23452 - protein, 319 aa, Artificial Sequence; identical to SEQ ID NO: 23449
  Synthetic polypeptide

SEQ ID NO: 23453 - protein, 319 aa, Artificial Sequence; identical to SEQ ID NO: 23449
  Synthetic polypeptide

SEQ ID NO: 23454 - protein, 22 aa, Artificial Sequence
  Synthetic polypeptide
KKPDTKGHVSWDSIHVKCPKQM

SEQ ID NO: 23455 - protein, 22 aa, Artificial Sequence
  Synthetic polypeptide
KKPDTKGHVSWDSIHVKCPKQM

SEQ ID NO: 23456 - protein, 22 aa, Artificial Sequence
  Synthetic polypeptide
KKPDTKGHVSWDSIHVKCPKQM

SEQ ID NO: 23457 - protein, 22 aa, Artificial Sequence
  Synthetic polypeptide
KKPDTKGHVSWDSIHVKCPKQM

SEQ ID NO: 23458 - protein, 22 aa, Artificial Sequence
  Synthetic polypeptide
KKPDTKGHVSWDSIHVKCPKQM

SEQ ID NO: 23459 - protein, 42 aa, Artificial Sequence
  Synthetic polypeptide
NLKNIMLSERSQTQKAMYHGIPFMSNVQNRCEKLACDVWISA

SEQ ID NO: 23460 - protein, 42 aa, Artificial Sequence; identical to SEQ ID NO: 23459
  Synthetic polypeptide

SEQ ID NO: 23461 - protein, 42 aa, Artificial Sequence; identical to SEQ ID NO: 23459
  Synthetic polypeptide

SEQ ID NO: 23462 - protein, 42 aa, Artificial Sequence; identical to SEQ ID NO: 23459
  Synthetic polypeptide

SEQ ID NO: 23463 - protein, 42 aa, Artificial Sequence; identical to SEQ ID NO: 23459
  Synthetic polypeptide

SEQ ID NO: 23464 - protein, 235 aa, Artificial Sequence
  Synthetic polypeptide
SKERDREAALWEMEEHQLQERHQLVKQQLKDQYFLQRHELLRKHEKEREQMQRYNQRMIEQLKVRQQQEKARLPKIQRSEGKTRMAMYKKSLHINGGGSAAEQREKIKQFSQQEEKRQKSERLQQQQKHENQMRDMLAQCESNMSELQQLQNEKCHLLVEHETQKLKALDESHNQNLKEWRDKLRPRKKALEEDLNQKKREQEMFFKLSEEAECPNPSTPSKAAKFFPYSSADAS

SEQ ID NO: 23465 - protein, 39 aa, Artificial Sequence
  Synthetic polypeptide
NIILHGETWGKAPLEVRNETGKQPCGRWKSTSCRRGTSW

SEQ ID NO: 23466 - protein, 39 aa, Artificial Sequence; identical to SEQ ID NO: 23465
  Synthetic polypeptide

SEQ ID NO: 23467 - protein, 42 aa, Artificial Sequence
  Synthetic polypeptide
GTRPGSSPVGDGRAPAAGEAPAGEAAAQRPVLPPAARAAAQA

SEQ ID NO: 23468 - protein, 42 aa, Artificial Sequence; identical to SEQ ID NO: 23467
  Synthetic polypeptide

SEQ ID NO: 23469 - protein, 275 aa, Artificial Sequence
  Synthetic polypeptide
SKERDREAALWEMEEHQLQERHQLVKQQLKDQYFLQRHELLRKHEKEREQMQRYNQRMIEQLKVRQQQEKARLPKIQRSEGKTRMAMYKKSLHINGGGSAAEQREKIKQFSQQEEKRQKSERLQQQQKHENQMRDMLAQCESNMSELQQLQNEKCHLLVEHETQKLKALDESHNQNLKEWRDKLRPRKKMESRTVAQVGVQWRNLNSGSGRGSEPEEAGAGDVLQAERGGGVPKPLHPKQGRQVLPLQFCGCFLTTARGCGWQLGGPQGLLLHSL

SEQ ID NO: 23470 - protein, 46 aa, Artificial Sequence
  Synthetic polypeptide
LGTGISLTSTGRCPRTLRSQRTPGPLSPSAAASSSSSSSSRSSPDL

SEQ ID NO: 23471 - protein, 46 aa, Artificial Sequence; identical to SEQ ID NO: 23470
  Synthetic polypeptide

SEQ ID NO: 23472 - protein, 46 aa, Artificial Sequence; identical to SEQ ID NO: 23470
  Synthetic polypeptide

SEQ ID NO: 23473 - protein, 46 aa, Artificial Sequence; identical to SEQ ID NO: 23470
  Synthetic polypeptide

SEQ ID NO: 23474 - protein, 324 aa, Artificial Sequence
  Synthetic polypeptide
VWVCGRVCPAMGGRAGQGRFPPCSLSSWDGLWPPVTWNWNKFDIYRKVPKDLTQPTYTGAIISICCCLFILFLFLSELTGFITTEVVNELYVDDPDKDSGGKIDVSLNISLPNLHCELVGLDIQDEMGRHEVGHIDNSMKIPLNNGAGCRFEGQFSINKVPGNFHVSTHSATAQPQNPDMTHVIHKLSFGDTLQVQNIHGAFNALGGADRLTSNPLASHDYILKIVPTVYEDKSGKQRYSYQYTVANKEYVAYSHTGRIIPAIWFRYDLSPITVKYTERRQPLYRFITTICAIIGGTFTVAGILDSCIFTASEAWKKIQLGKMH

SEQ ID NO: 23475 - protein, 217 aa, Artificial Sequence
  Synthetic polypeptide
VWVCGRVCPAMGGRAGQGRFPPCSLSSWDGLWPPVTWNWNKFDIYRKVPKDLTQPTYTGAIISICCCLFILFLFLSELTGFITTEVVNELYVDDPDKDSGGKIDVSLNISLPNLHCELVGLDIQDEMGRHEVGHIDNSMKIPLNNGAGCRFEGQFSINKNQELQILSQVGERSALGRAEAPGGSWQGFAQHVPAFLEARYCHSGASQQRCEAAPFDR

SEQ ID NO: 23476 - protein, 89 aa, Artificial Sequence
  Synthetic polypeptide
VWVCGRVCPAMGGRAGQGRFPPCSLSSWDGLWPPVTWNWNKFDIYRKVPKDLTQPTYTGAIISICCCLFILFLFLSELTGFITTEVGWA

SEQ ID NO: 23477 - protein, 172 aa, Artificial Sequence
  Synthetic polypeptide
VWVCGRVCPAMGGRAGQGRFPPCSLSSWDGLWPPVTWNWNKFDIYRKVPKDLTQPTYTGAIISICCCLFILFLFLSELTGFITTEVVNELYVDDPDKDSGGKIDVSLNISLPNLHCELVGLDIQDEMGRHEVGHIDNSMKIPLNNGAGCRFEGQFSINKEVDQQPDVRVCVF

SEQ ID NO: 23478 - protein, 122 aa, Artificial Sequence
  Synthetic polypeptide
AVSFTQLLRYGSTCVQPAYQNLRQKVDNFVSTHLDKQEWNPTMNKNQLRNGLRQSVVQSGMLEAGVDRIISQVVDPKLNHIFRPQIERAIHEFLAAQKKAAVPAPPPEPEGQDPPAPSQDTS

SEQ ID NO: 23479 - protein, 21 aa, Artificial Sequence
  Synthetic polypeptide
RFHLPNCCGMEVLVFSQLTKT

SEQ ID NO: 23480 - protein, 21 aa, Artificial Sequence
  Synthetic polypeptide
RFHLPNCCGMEVLVFSQLTKT

SEQ ID NO: 23481 - protein, 26 aa, Artificial Sequence
  Synthetic polypeptide
GFIYPIVAVWKYLCSASLPKPEAESG

SEQ ID NO: 23482 - protein, 26 aa, Artificial Sequence
  Synthetic polypeptide
GFIYPIVAVWKYLCSASLPKPEAESG

SEQ ID NO: 23483 - protein, 66 aa, Artificial Sequence
  Synthetic polypeptide
AVSFTQLLRYGSTCVQPAYQNLRQKVDNFVSTHLDKQEWNPTMNKNQLRNGLRQSVVQIRQTPFES

SEQ ID NO: 23484 - protein, 63 aa, Artificial Sequence
  Synthetic polypeptide
GWAQWLTPVIPTLLEAEAGGSLGQEIDTILDNTITMRTWCRKLHLKMSWAFIWWTKTQRETLR

SEQ ID NO: 23485 - protein, 26 aa, Artificial Sequence
  Synthetic polypeptide
YQHFWRPRQVDHLVKRSTPSWITRLR

SEQ ID NO: 23486 - protein, 330 aa, Artificial Sequence
  Synthetic polypeptide
HDYDEDLVQEASSEDVLGVHMVDKDTERDIEMKRQLRRLRELHLYSTWKKYQEAMKTSLGVPQCERDEGSLGKPLCPPEILSETLPGSVKKRVCFPSEDHLEEFIAEHLPEASNQSLLTVAHADTGIQTNGDLEDLEEHGPGQTVSEEATEVHMMEGDPDTLAELLIRDVLQELSSYNGEEEDPEEVKTSLGVPQRGDLEDLEEHVPGQTVSEEATGVHMMQVDPATPAKSDLEDLEEHVPGQTVSEEATGVHMMQVDPATLAKQLEDSTITGSHQQMSASPSSAPAEEATEKTKVEEEVKTRKPKKKTRKPSKKSRWNVLKCWDIFNIF

SEQ ID NO: 23487 - protein, 5 aa, Artificial Sequence
  Synthetic polypeptide
NSGLH

SEQ ID NO: 23488 - protein, 5 aa, Artificial Sequence
  Synthetic polypeptide
NSGLH

SEQ ID NO: 23489 - protein, 886 aa, Artificial Sequence
  Synthetic polypeptide
EGRARWLNRTLQHLSPKQEHQLEQLSTQESTFRRTKTQDFIDLTRETRPRTKDRSGLYVIDLTRAEGENRPIATLDLTLEPVTPSQKEPTSLQTCASLSGKAVMEGHVDRSSQPTARRIINSDPVDLDLVEENTFVGPPPATSISGGSVYPTEPNCSSATFTGNLSFLASLQLSSDVSSLSPTSNNSRSSSSSSNQKAPLPCPQQDVSRPPQALPCPLRPLPCPPRASPCPPRASSCPPRALSCPSQTMQCQLPALTHPPQEVPCPRQNIPGPPQDSLGLPQDVPGLPQSILHPQDVAYLQDMPRSPGDVPQSPSDVSPSPDAPQSPGGMPHLPGDVLHSPGDMPHSSGDVTHSPRDIPHLPGDRPDFTQNDVQNRDMPMDISALSSPSCSPSPQSETPLEKVPWLSVMETPARKEISLSEPAKPGSAHVQSRTPQGGLYNRPCLHRLKYFLRPPVHHLFFQTLIPDKDTRENKGQKLEPIPHRRLRMVTNTIEENFPLGTVQFLMDFVSPQHYPPREIVAHIIQKILLSGSETVDVLKEAYMLLMKIQQLHPANAKTVEWDWKLLTYVMEEEGQTLPGRVLFLRYVVQTLEDDFQQTLRRQRQHLQQSIANMVLSCDKQPHNVRDVIKWLVKAVTEDGLTQPPNGNQTSSGTGILKASSSHPSSQPNLTKNTNQLIVCQLQRMLSIAVEVDRTPTCSSNKIAEMMFGFVLDIPERSQREMFFTTMESHLLRCKVLEIIFLHSCETPTRLPLSLAQALYFLNNSTSLLKCQSDKSQWQTWDELVEHLQFLLSSYQHVLREHLRSSVIDRKDLIIKRIKPKPQQGDDITVVDVEKQIEAFRSRLIQMLGEPLVPQLQDKVHLLKLLLFYAADLNPDAEPFQKGWSGS

SEQ ID NO: 23490 - protein, 35 aa, Artificial Sequence
  Synthetic polypeptide
IEPSSICPPSKNTNLNNYPHKKALSEELKLRTSLT

SEQ ID NO: 23491 - protein, 35 aa, Artificial Sequence; identical to SEQ ID NO: 23490
  Synthetic polypeptide

SEQ ID NO: 23492 - protein, 606 aa, Artificial Sequence
  Synthetic polypeptide
EGRARWLNRTLQHLSPKQEHQLEQLSTQESTFRRTKTQDFIDLTRETRPRTKDRSGLYVIDLTRAEGENRPIATLDLTLEPVTPSQKEPTSLQTCASLSGKAVMEGHVDRSSQPTARRIINSDPVDLDLVEENTFVGPPPATSISGGSVYPTEPNCSSATFTGNLSFLASLQLSSDVSSLSPTSNNSRSSSSSSNQKAPLPCPQQDVSRPPQALPCPLRPLPCPPRASPCPPRASSCPPRALSCPSQTMQCQLPALTHPPQEVPCPRQNIPGPPQDSLGLPQDVPGLPQSILHPQDVAYLQDMPRSPGDVPQSPSDVSPSPDAPQSPGGMPHLPGDVLHSPGDMPHSSGDVTHSPRDIPHLPGDRPDFTQNDVQNRDMPMDISALSSPSCSPSPQSETPLEKVPWLSVMETPARKEISLSEPAKPGSAHVQSRTPQGGLYNRPCLHRLKYFLRPPVHHLFFQTLIPDKDTRENKGQKLEPIPHRRLRMVTNTIEENFPLGTVQFLMDFVSPQHYPPREIVAHIIQKILLSGSETVDVLKEAYMLLMKIQQLHPANAKTVEWDWKLLTYVMEEEPAECLRLQARATTPDWFWWRRGFAVLAGPVSSP

SEQ ID NO: 23493 - protein, 163 aa, Artificial Sequence
  Synthetic polypeptide
RVPVIPATQEAEEANGPADGYAAIAQADRLTQEPESIRKWREEQRKRLQELDAASKVTEQEWREKAKKDLEEWNQRQSEQVEKNKINNRIADKAFYQQPDADIIGYVASEEAFVKESKEETPGTEWEKVAQLCDFNPKSSKQCKDVSRLRSVLMSLKQTPLSR

SEQ ID NO: 23494 - protein, 25 aa, Artificial Sequence
  Synthetic polypeptide
SQLLRRLRRPTVLLMATQPLPRLTG

SEQ ID NO: 23495 - protein, 25 aa, Artificial Sequence
  Synthetic polypeptide
SQLLRRLRRPTVLLMATQPLPRLTG

SEQ ID NO: 23496 - protein, 25 aa, Artificial Sequence
  Synthetic polypeptide
SQLLRRLRRPTVLLMATQPLPRLTG

SEQ ID NO: 23497 - protein, 145 aa, Artificial Sequence
  Synthetic polypeptide
RVPVIPATQEAEEANGPADGYAAIAQADRLTQEPESIRKWREEQRKRLQELDAASKVTEQEWREKAKKDLEEWNQRQSEQVEKNKINNRASEEAFVKESKEETPGTEWEKVAQLCDFNPKSSKQCKDVSRLRSVLMSLKQTPLSR

SEQ ID NO: 23498 - protein, 49 aa, Artificial Sequence
  Synthetic polypeptide
RVPVIPATQEAEEANGPADGYAAIAQADRLTQEPESIRKWREEQRKRLS

SEQ ID NO: 23499 - protein, 50 aa, Artificial Sequence
  Synthetic polypeptide
WWLMPVISALWEAKAGGSLEVLEVLFGFCKADSSESCCELDQLQPQENHS

SEQ ID NO: 23500 - protein, 50 aa, Artificial Sequence; identical to SEQ ID NO: 23499
  Synthetic polypeptide

SEQ ID NO: 23501 - protein, 50 aa, Artificial Sequence; identical to SEQ ID NO: 23499
  Synthetic polypeptide

SEQ ID NO: 23502 - protein, 50 aa, Artificial Sequence; identical to SEQ ID NO: 23499
  Synthetic polypeptide

SEQ ID NO: 23503 - protein, 48 aa, Artificial Sequence
  Synthetic polypeptide
FQHFGRPRQADHLRYLRFCLDSAKQTRQKVAVNWTNFSLKKTTPSTAQ

SEQ ID NO: 23504 - protein, 48 aa, Artificial Sequence; identical to SEQ ID NO: 23503
  Synthetic polypeptide

SEQ ID NO: 23505 - protein, 48 aa, Artificial Sequence; identical to SEQ ID NO: 23503
  Synthetic polypeptide

SEQ ID NO: 23506 - protein, 48 aa, Artificial Sequence; identical to SEQ ID NO: 23503
  Synthetic polypeptide

SEQ ID NO: 23507 - protein, 47 aa, Artificial Sequence
  Synthetic polypeptide
WWLMPVISALWEAKAGGSLEVLFGFCKADSSESCCELDQLQPQENHS

SEQ ID NO: 23508 - protein, 47 aa, Artificial Sequence; identical to SEQ ID NO: 23507
  Synthetic polypeptide

SEQ ID NO: 23509 - protein, 47 aa, Artificial Sequence; identical to SEQ ID NO: 23507
  Synthetic polypeptide

SEQ ID NO: 23510 - protein, 47 aa, Artificial Sequence; identical to SEQ ID NO: 23507
  Synthetic polypeptide

SEQ ID NO: 23511 - protein, 45 aa, Artificial Sequence
  Synthetic polypeptide
FQHFGRPRQADHLRFCLDSAKQTRQKVAVNWTNFSLKKTTPSTAQ

SEQ ID NO: 23512 - protein, 45 aa, Artificial Sequence; identical to SEQ ID NO: 23511
  Synthetic polypeptide

SEQ ID NO: 23513 - protein, 45 aa, Artificial Sequence; identical to SEQ ID NO: 23511
  Synthetic polypeptide

SEQ ID NO: 23514 - protein, 45 aa, Artificial Sequence; identical to SEQ ID NO: 23511
  Synthetic polypeptide

SEQ ID NO: 23515 - protein, 39 aa, Artificial Sequence
  Synthetic polypeptide
NPVSTKNRKIRQVLFGFCKADSSESCCELDQLQPQENHS

SEQ ID NO: 23516 - protein, 39 aa, Artificial Sequence; identical to SEQ ID NO: 23515
  Synthetic polypeptide

SEQ ID NO: 23517 - protein, 39 aa, Artificial Sequence; identical to SEQ ID NO: 23515
  Synthetic polypeptide

SEQ ID NO: 23518 - protein, 39 aa, Artificial Sequence; identical to SEQ ID NO: 23515
  Synthetic polypeptide

SEQ ID NO: 23519 - protein, 33 aa, Artificial Sequence
  Synthetic polypeptide
GRFCLDSAKQTRQKVAVNWTNFSLKKTTPSTAQ

SEQ ID NO: 23520 - protein, 33 aa, Artificial Sequence; identical to SEQ ID NO: 23519
  Synthetic polypeptide

SEQ ID NO: 23521 - protein, 33 aa, Artificial Sequence; identical to SEQ ID NO: 23519
  Synthetic polypeptide

SEQ ID NO: 23522 - protein, 33 aa, Artificial Sequence; identical to SEQ ID NO: 23519
  Synthetic polypeptide

SEQ ID NO: 23523 - protein, 19 aa, Artificial Sequence
  Synthetic polypeptide
KNKAGSVWILQSRLVRKLL

SEQ ID NO: 23524 - protein, 19 aa, Artificial Sequence
  Synthetic polypeptide
KNKAGSVWILQSRLVRKLL

SEQ ID NO: 23525 - protein, 19 aa, Artificial Sequence
  Synthetic polypeptide
KNKAGSVWILQSRLVRKLL

SEQ ID NO: 23526 - protein, 19 aa, Artificial Sequence
  Synthetic polypeptide
KNKAGSVWILQSRLVRKLL

SEQ ID NO: 23527 - protein, 58 aa, Artificial Sequence
  Synthetic polypeptide
GWAQWLTPVIPTLWEAEAGGSLGQEIDTILDNTITMRTWCRKLHLKMSWAFICVLFFS

SEQ ID NO: 23528 - protein, 26 aa, Artificial Sequence
  Synthetic polypeptide
YQHFGRPRRVDHLVKRSTPSWITRLR

SEQ ID NO: 23529 - protein, 26 aa, Artificial Sequence
  Synthetic polypeptide
YQHFGRPRRVDHLVKRSTPSWITRLR

SEQ ID NO: 23530 - protein, 26 aa, Artificial Sequence
  Synthetic polypeptide
HDYDEDLVQEASSEDVLGVHMCFVFL

SEQ ID NO: 23531 - protein, 24 aa, Artificial Sequence
  Synthetic polypeptide
YQHFGRPRRVDHLVKRSTPSWITR

SEQ ID NO: 23532 - protein, 63 aa, Artificial Sequence
  Synthetic polypeptide
GWAQWLTPVIPTLWEAEAGGSLGQEIDTILDNTITMRTWCRKLHLKMSWAFIWWTKTQRETLR

SEQ ID NO: 23533 - protein, 110 aa, Artificial Sequence
  Synthetic polypeptide
HDYDEDLVQEASSEDVLGVHMVDKDTERDIEMKRQLRRLRELHLYSTWKKYQEAMKTSLGVPQCERDEGSLGKPLCPPEILSETLPGSVKKRVCFPSEDHLEEFIAEHLP

SEQ ID NO: 23534 - protein, 26 aa, Artificial Sequence
  Synthetic polypeptide
YQHFGRPRRVDHLVKRSTPSWITRLR

SEQ ID NO: 23535 - protein, 26 aa, Artificial Sequence
  Synthetic polypeptide
YQHFGRPRRVDHLVKRSTPSWITRLR

SEQ ID NO: 23536 - protein, 63 aa, Artificial Sequence; identical to SEQ ID NO: 23532
  Synthetic polypeptide

SEQ ID NO: 23537 - protein, 63 aa, Artificial Sequence; identical to SEQ ID NO: 23532
  Synthetic polypeptide

SEQ ID NO: 23538 - protein, 119 aa, Artificial Sequence
  Synthetic polypeptide
HDYDEDLVQEASSEDVLGVHMVDKDTERDIEMKRQLRRLRELHLYSTWKKYQEAMKTSLGVPQRGDLEDLEEHLPGQTVSEEATGVHMMQVDPATPAKKLEDSTITGSHQQMSASPSSA

SEQ ID NO: 23539 - protein, 164 aa, Artificial Sequence
  Synthetic polypeptide
HDYDEDLVQEASSEDVLGVHMVDKDTERDIEMKRQLRRLRELHLYSTWKKYQEAMKTSLGVPQRGDLEDLEEHLPGQTVSEEATGVHMMQVDPATPAKKLEDSTITGSHQQMSASPSSAPAEEATEKTKVEEEVKTRKPKKKTRKPSKKSRWNVLKCWDIFNIF

SEQ ID NO: 23540 - protein, 24 aa, Artificial Sequence
  Synthetic polypeptide
PLSGCGTQASPFSCLRRSSSSGSP

SEQ ID NO: 23541 - protein, 24 aa, Artificial Sequence
  Synthetic polypeptide
PLSGCGTQASPFSCLRRSSSSGSP

SEQ ID NO: 23542 - protein, 39 aa, Artificial Sequence
  Synthetic polypeptide
DAVRHPEVHEPHRDREPLSEPGECLPLGLPPAEARHGPR

SEQ ID NO: 23543 - protein, 39 aa, Artificial Sequence; identical to SEQ ID NO: 23542
  Synthetic polypeptide

SEQ ID NO: 23544 - protein, 908 aa, Artificial Sequence
  Synthetic polypeptide
SFRLWDSGESFQLSETQFVIRKSMSLIEIGNPSQSLENVCRWAYLQQKPDTGHDEYHDHAIFLTRQDFGPSGMQGYAPVTGMCHPVRSCTLNHEDGFSSAFVVAHETGHVLGMEHDGQGNRCGDEVRLGSIMAPLVQAAFHRFHWSRCSQQELSRYLHSYDCLLDDPFAHDWPALPQLPGLHYSMNEQCRFDFGLGYMMCTAFRTFDPCKQLWCSHPDNPYFCKTKKGPPLDGTMCAPGKHCFKGHCIWLTPDILKRDGSWGAWSPFGSCSRTCGTGVKFRTRQCDNPHPANGGRTCSGLAYDFQLCSRQDCPDSLADFREEQCRQWDLYFEHGDAQHHWLPHEHRDAKERCHLYCESRETGEVVSMKRMVHDGTRCSYKDAFSLCVRGDCRKVGCDGVIGSSKQEDKCGVCGGDNSHCKVVKGTFTRSPKKHGYIKMFEIPAGARHLLIQEVDATSHHLAVKNLETGKFILNEENDVDASSKTFIAMGVEWEYRDEDGRETLQTMGPLHGTITVLVIPVGDTRVSLTYKYMIHEDSLNVDDNNVLEEDSVVYEWALKKWSPCSKPCGGGSQFTKYGCRRRLDHKMVHRGFCAALSKPKAIRRACNPQECSQPVWVTGEWEPCSQTCGRTGMQVRSVRCIQPLHDNTTRSVHAKHCNDARPESRRACSRELCPGRWRAGPWSQCSVTCGNGTQERPVLCRTADDSFGICQEERPETARTCRLGPCPRNISDPSKKSYVVQWLSRPDPDSPIRKISSKGHCQGDKSIFCRMEVLSRYCSIPGYNKLCCKSCNLYNNLTNVEGRIEPPPGKHNDIDVFMPTLPVPTVAMEVRPSPSTPLEVPLNASSTNATEDHPETNAVDEPYKIHGLEDEVQPPNLIPRRPSPYEKTRNQRIQELIDEMRKKEMLGKF

SEQ ID NO: 23545 - protein, 263 aa, Artificial Sequence
  Synthetic polypeptide
SFRLWDSGESFQLSETQFVIRKSMSLIEIGNPSQSLENVCRWAYLQQKPDTGHDEYHDHAIFLTRQDFGPSGMQGYAPVTGMCHPVRSCTLNHEDGFSSAFVVAHETGHVLGMEHDGQGNRCGDEVRLGSIMAPLVQAAFHRFHWSRCSQQELSRYLHSYDCLLDDPFAHDWPALPQLPGLHYSMNEQCRFDFGLGYMMCTAFRTFDPCKQLWCSHPDNPYFCKTKKGPPLDGTMCAPGKFRPGAVAHACYPSTLGGQGRWIA

SEQ ID NO: 23546 - protein, 1000 aa, Artificial Sequence
  Synthetic polypeptide
DVPFIFCHDCEASPAMWNWASLDSLDSLSRALGVLEEHANSSRRRARRHAADDDYNIEVLLGVDDSVVQFHGKEHVQKYLLTLMNIVNEIYHDESLGAHINVVLVRIILLSYGKSMSLIEIGNPSQSLENVCRWAYLQQKPDTGHDEYHDHAIFLTRQDFGPSGMQGYAPVTGMCHPVRSCTLNHEDGFSSAFVVAHETGHVLGMEHDGQGNRCGDEVRLGSIMAPLVQAAFHRFHWSRCSQQELSRYLHSYDCLLDDPFAHDWPALPQLPGLHYSMNEQCRFDFGLGYMMCTAFRTFDPCKQLWCSHPDNPYFCKTKKGPPLDGTMCAPGKHCFKGHCIWLTPDILKRDGSWGAWSPFGSCSRTCGTGVKFRTRQCDNPHPANGGRTCSGLAYDFQLCSRQDCPDSLADFREEQCRQWDLYFEHGDAQHHWLPHEHRDAKERCHLYCESRETGEVVSMKRMVHDGTRCSYKDAFSLCVRGDCRKVGCDGVIGSSKQEDKCGVCGGDNSHCKVVKGTFTRSPKKHGYIKMFEIPAGARHLLIQEVDATSHHLAVKNLETGKFILNEENDVDASSKTFIAMGVEWEYRDEDGRETLQTMGPLHGTITVLVIPVGDTRVSLTYKYMIHEDSLNVDDNNVLEEDSVVYEWALKKWSPCSKPCGGGSQFTKYGCRRRLDHKMVHRGFCAALSKPKAIRRACNPQECSQPVWVTGEWEPCSQTCGRTGMQVRSVRCIQPLHDNTTRSVHAKHCNDARPESRRACSRELCPGRWRAGPWSQCSVTCGNGTQERPVLCRTADDSFGICQEERPETARTCRLGPCPRNISDPSKKSYVVQWLSRPDPDSPIRKISSKGHCQGDKSIFCRMEVLSRYCSIPGYNKLCCKSCNLYNNLTNVEGRIEPPPGKHNDIDVFMPTLPVPTVAMEVRPSPSTPLEVPLNASSTNATEDHPETNAVDEPYKIHGLEDEVQPPNLIPRRPSPYEKTRNQRIQELIDEMRKKEMLGKF

SEQ ID NO: 23547 - protein, 77 aa, Artificial Sequence
  Synthetic polypeptide
LNHGGGSFPCCSHDGEWVSRDLRVLKTGVALHKLSLSRLLPCETCLSSSAMIVRPPQPCGTGPPWTAWTASAAPWAS

SEQ ID NO: 23548 - protein, 77 aa, Artificial Sequence; identical to SEQ ID NO: 23547
  Synthetic polypeptide

SEQ ID NO: 23549 - protein, 42 aa, Artificial Sequence
  Synthetic polypeptide
GLPSHVELGLPGQPGQPQPRPGRPRGARQQLEAEGTQACCGR

SEQ ID NO: 23550 - protein, 42 aa, Artificial Sequence; identical to SEQ ID NO: 23549
  Synthetic polypeptide

SEQ ID NO: 23551 - protein, 355 aa, Artificial Sequence
  Synthetic polypeptide
DVPFIFCHDCEASPAMWNWASLDSLDSLSRALGVLEEHANSSRRRARRHAADDDYNIEVLLGVDDSVVQFHGKEHVQKYLLTLMNIVNEIYHDESLGAHINVVLVRIILLSYGKSMSLIEIGNPSQSLENVCRWAYLQQKPDTGHDEYHDHAIFLTRQDFGPSGMQGYAPVTGMCHPVRSCTLNHEDGFSSAFVVAHETGHVLGMEHDGQGNRCGDEVRLGSIMAPLVQAAFHRFHWSRCSQQELSRYLHSYDCLLDDPFAHDWPALPQLPGLHYSMNEQCRFDFGLGYMMCTAFRTFDPCKQLWCSHPDNPYFCKTKKGPPLDGTMCAPGKFRPGAVAHACYPSTLGGQGRWIA

SEQ ID NO: 23552 - protein, 33 aa, Artificial Sequence
  Synthetic polypeptide
PGVVAHTCNPSTLGGQGRRITTSECREQFAAEE

SEQ ID NO: 23553 - protein, 33 aa, Artificial Sequence; identical to SEQ ID NO: 23552
  Synthetic polypeptide

SEQ ID NO: 23554 - protein, 33 aa, Artificial Sequence; identical to SEQ ID NO: 23552
  Synthetic polypeptide

SEQ ID NO: 23555 - protein, 33 aa, Artificial Sequence; identical to SEQ ID NO: 23552
  Synthetic polypeptide

SEQ ID NO: 23556 - protein, 33 aa, Artificial Sequence; identical to SEQ ID NO: 23552
  Synthetic polypeptide

SEQ ID NO: 23557 - protein, 260 aa, Artificial Sequence
  Synthetic polypeptide
RAWWLTPVIPALWEAKAGGSRRQNAESSLQQKNEAITSFEGKTNQVMSSMKQMEERLQHSERARQGAEERSHKLQQELGGRIGALQLQLSQLHEQCSSLEKELKSEKEQRQALQRELQHEKDTSSLLRMELQQVEGLKKELRELQDEKAELQKICEEQEQALQEMGLHLSQSKLKMEDIKEVNQALKGHAWLKDDEATHCRQCEKEFSISRRKHHCRNCGHIFCNTCSSNELALPSYPKPVRVCDSCHTLLLQRCSSTAS

SEQ ID NO: 23558 - protein, 260 aa, Artificial Sequence; identical to SEQ ID NO: 23557
  Synthetic polypeptide

SEQ ID NO: 23559 - protein, 260 aa, Artificial Sequence; identical to SEQ ID NO: 23557
  Synthetic polypeptide

SEQ ID NO: 23560 - protein, 41 aa, Artificial Sequence
  Synthetic polypeptide
SQHSGRPRQADHDVRMQRAVCSRRMKPSHPLKEKPTKLCPA

SEQ ID NO: 23561 - protein, 41 aa, Artificial Sequence; identical to SEQ ID NO: 23560
  Synthetic polypeptide

SEQ ID NO: 23562 - protein, 41 aa, Artificial Sequence; identical to SEQ ID NO: 23560
  Synthetic polypeptide

SEQ ID NO: 23563 - protein, 41 aa, Artificial Sequence; identical to SEQ ID NO: 23560
  Synthetic polypeptide

SEQ ID NO: 23564 - protein, 34 aa, Artificial Sequence
  Synthetic polypeptide
RAWWLTPVIPALWEAKAGGSRRQNAESSLQQKNE

SEQ ID NO: 23565 - protein, 25 aa, Artificial Sequence
  Synthetic polypeptide
SQHSGRPRQADHDVRMQRAVCSRRM

SEQ ID NO: 23566 - protein, 202 aa, Artificial Sequence
  Synthetic polypeptide
RAWWLTPVIPALWEAKAGGSRRQNAESSLQQKNEAITSFEGKTNQVMSSMKQMEERLQHSERARQGAEERSHKLQQELGGRIGALQLQLSQLHEQCSSLEKELKSEKEQRQALQRELQHEKDTSSLLRMELQQVEGLKKELRELQDEKAELQKICEEQEQALQEMGLHLSQSKLKMEDIKEVNQALKGHAWLKDDEATHCRQ

SEQ ID NO: 23567 - protein, 538 aa, Artificial Sequence
  Synthetic polypeptide
GRAWWLTPVIPALCEAEAGGSQGDVVDVYQREFLALRDRLHAAEQESLKRSKELNLVLDEIKRAVSERQALRDGDGNRTWGRLTEDPRLKPWNGSHRHVLHLPTVFHHLPHLLAKESSLQPAVRVGQGRTGVSVVMGIPSVRREVHSYLTDTLHSLISELSPQEKEDSVIVVLIAETDSQYTSAVTENIKALFPTEIHSGLLEVISPSPHFYPDFSRLRESFGDPKERVRWRTKQNLDYCFLMMYAQSKGIYYVQLEDDIVAKPNYLSTMKNFALQQPSEDWMILEFSQLGFIGKMFKSLDLSLIVEFILMFYRDKPIDWLLDHILWVKVCNPEKDAKHCDRQKANLRIRFKPSLFQHVGTHSSLAGKIQKLKDKDFGKQALRKEHVNPPAEVSTSLKTYQHFTLEKAYLREDFFWAFTPAAGDFIRFRFFQPLRLERFFFRSGNIEHPEDKLFNTSVEVLPFDNPQSDKEALQEGRTATLRYPRSPDGYLQIGSFYKGVAEGEVDPAFGPLEALRLSIQTDSPVWVILSEIFLKKAD

SEQ ID NO: 23568 - protein, 538 aa, Artificial Sequence; identical to SEQ ID NO: 23567
  Synthetic polypeptide

SEQ ID NO: 23569 - protein, 73 aa, Artificial Sequence
  Synthetic polypeptide
SQHFVRPRRADHKATLWTFTSGSSWRCAIGCTQLSRRASSAPRSSTWCWTRSRGPCQKGRRCETETAIAPGAA

SEQ ID NO: 23570 - protein, 73 aa, Artificial Sequence; identical to SEQ ID NO: 23569
  Synthetic polypeptide

SEQ ID NO: 23571 - protein, 73 aa, Artificial Sequence; identical to SEQ ID NO: 23569
  Synthetic polypeptide

SEQ ID NO: 23572 - protein, 73 aa, Artificial Sequence; identical to SEQ ID NO: 23569
  Synthetic polypeptide

SEQ ID NO: 23573 - protein, 28 aa, Artificial Sequence
  Synthetic polypeptide
GRGGRITRRRCGRLPAGVPGAARSVARS

SEQ ID NO: 23574 - protein, 28 aa, Artificial Sequence
  Synthetic polypeptide
GRGGRITRRRCGRLPAGVPGAARSVARS

SEQ ID NO: 23575 - protein, 28 aa, Artificial Sequence
  Synthetic polypeptide
GRGGRITRRRCGRLPAGVPGAARSVARS

SEQ ID NO: 23576 - protein, 28 aa, Artificial Sequence
  Synthetic polypeptide
GRGGRITRRRCGRLPAGVPGAARSVARS

SEQ ID NO: 23577 - protein, 132 aa, Artificial Sequence
  Synthetic polypeptide
GRAWWLTPVIPALCEAEAGGSQGDVVDVYQREFLALRDRLHAAEQESLKRSKELNLVLDEIKRAVSERQALRDGDGNRTWGRLTEDPRLKPWNGSHRHVLHLPTVFHHLPHLLAKESSLQPAVRVGQGRTGD

SEQ ID NO: 23578 - protein, 149 aa, Artificial Sequence
  Synthetic polypeptide
GRAWWLTPVIPALCEAEAGGSQGDVVDVYQREFLALRDRLHAAEQESLKRSKELNLVLDEIKRAVSERQALRDGDGNRTWGRLTGPPIEAVERLTPARAAPAHRLPSPATPAGQGEQSAARGARGPGPHRSVGGDGHPERAARGALVPD

SEQ ID NO: 23579 - protein, 371 aa, Artificial Sequence
  Synthetic polypeptide
MACNMGLEKGDEELTMAMSYVKDDIFRIYIKEKKECRRDHRPPCAQEAPRNMVHPNVICDGCNGPVVGTRYKCSVCPDYDLCSVCEGKGLHRGHTKLAFPSPFGHLSEGFSHSRWLRKVKHGHFGWPGWEMGPPGNWSPRPPRAGEARPGPTAESASGPSEDPSVNFLKNVGESVAAALSPLGIEVDIDVEHGGKRSRLTPVSPESSSTEEKSSSQPSSCCSDPSKPGGNVEGATQSLAEQMRKIALESEGRPEEQMESDNCSGGDDDWTHLSSKEVDPSTGELQSLQMPESEGPSSLDPSQEGPTGLKEAALYPHLPPEADPRLIESLSQMLSMGFSDEGGWLTRLLQTKNYDIGAALDTIQYSKHPPPL

SEQ ID NO: 23580 - protein, 13 aa, Artificial Sequence
  Synthetic polypeptide
WRATWGLRKVTRN

SEQ ID NO: 23581 - protein, 13 aa, Artificial Sequence
  Synthetic polypeptide
WRATWGLRKVTRN

SEQ ID NO: 23582 - protein, 13 aa, Artificial Sequence
  Synthetic polypeptide
WRATWGLRKVTRN

SEQ ID NO: 23583 - protein, 98 aa, Artificial Sequence
  Synthetic polypeptide
MACNMGLEKGDEELTMAMSYVKDDIFRIYIKEKKECRRDHRPPCAQEAPRNMVHPNVICDGCNGPVVGTRYKCSVCPDYDLCSVCEGKGLHRGHTKLA

SEQ ID NO: 23584 - protein, 309 aa, Artificial Sequence
  Synthetic polypeptide
MACNMGLEKGDEELTMAMSYVKDDIFRIYIKEKKECRRDHRPPCAQEAPRNMVHPNVICDGCNGPVVGTRYKCSVCPDYDLCSVCEGKGLHRGHTKLAFPSPFGHLSEGFSHSRWLRKVKHGHFGWPGWEMGPPGNWSPRPPRAGEARPGPTAESASGPSEDPSVNFLKNVGESVAAALSPLGIEVDIDVEHGGKRSRLTPVSPESSSTEEKSSSQPSSCCSDPSKPGGNVEGATQSLAEQMRKIALECCPWASLMKAAGSPGSCRPRTMTSERLWTPSSIQSIPRRCDHFCPPLLRAPLLSHSCVKLA

SEQ ID NO: 23585 - protein, 27 aa, Artificial Sequence
  Synthetic polypeptide
ERRKKSAGGTTAHRVLRRRPATWCTPM

SEQ ID NO: 23586 - protein, 27 aa, Artificial Sequence
  Synthetic polypeptide
ERRKKSAGGTTAHRVLRRRPATWCTPM

SEQ ID NO: 23587 - protein, 27 aa, Artificial Sequence
  Synthetic polypeptide
ERRKKSAGGTTAHRVLRRRPATWCTPM

SEQ ID NO: 23588 - protein, 27 aa, Artificial Sequence
  Synthetic polypeptide
ERRKKSAGGTTAHRVLRRRPATWCTPM

SEQ ID NO: 23589 - protein, 27 aa, Artificial Sequence
  Synthetic polypeptide
ERRKKSAGGTTAHRVLRRRPATWCTPM

SEQ ID NO: 23590 - protein, 27 aa, Artificial Sequence
  Synthetic polypeptide
ERRKKSAGGTTAHRVLRRRPATWCTPM

SEQ ID NO: 23591 - protein, 27 aa, Artificial Sequence
  Synthetic polypeptide
ERRKKSAGGTTAHRVLRRRPATWCTPM

SEQ ID NO: 23592 - protein, 27 aa, Artificial Sequence
  Synthetic polypeptide
ERRKKSAGGTTAHRVLRRRPATWCTPM

SEQ ID NO: 23593 - protein, 60 aa, Artificial Sequence
  Synthetic polypeptide
MACNMGLEKGEKRVPAGPPPTVCSGGAPQHGAPQCDLRWLQWACGRNPLQVQRLPRLRLV

SEQ ID NO: 23594 - protein, 60 aa, Artificial Sequence; identical to SEQ ID NO: 23593
  Synthetic polypeptide

SEQ ID NO: 23595 - protein, 60 aa, Artificial Sequence; identical to SEQ ID NO: 23593
  Synthetic polypeptide

SEQ ID NO: 23596 - protein, 60 aa, Artificial Sequence; identical to SEQ ID NO: 23593
  Synthetic polypeptide

SEQ ID NO: 23597 - protein, 60 aa, Artificial Sequence; identical to SEQ ID NO: 23593
  Synthetic polypeptide

SEQ ID NO: 23598 - protein, 60 aa, Artificial Sequence; identical to SEQ ID NO: 23593
  Synthetic polypeptide

SEQ ID NO: 23599 - protein, 60 aa, Artificial Sequence; identical to SEQ ID NO: 23593
  Synthetic polypeptide

SEQ ID NO: 23600 - protein, 60 aa, Artificial Sequence; identical to SEQ ID NO: 23593
  Synthetic polypeptide

SEQ ID NO: 23601 - protein, 349 aa, Artificial Sequence
  Synthetic polypeptide
WRATWGLRKEKKECRRDHRPPCAQEAPRNMVHPNVICDGCNGPVVGTRYKCSVCPDYDLCSVCEGKGLHRGHTKLAFPSPFGHLSEGFSHSRWLRKVKHGHFGWPGWEMGPPGNWSPRPPRAGEARPGPTAESASGPSEDPSVNFLKNVGESVAAALSPLGIEVDIDVEHGGKRSRLTPVSPESSSTEEKSSSQPSSCCSDPSKPGGNVEGATQSLAEQMRKIALESEGRPEEQMESDNCSGGDDDWTHLSSKEVDPSTGELQSLQMPESEGPSSLDPSQEGPTGLKEAALYPHLPPEADPRLIESLSQMLSMGFSDEGGWLTRLLQTKNYDIGAALDTIQYSKHPPPL

SEQ ID NO: 23602 - protein, 349 aa, Artificial Sequence; identical to SEQ ID NO: 23601
  Synthetic polypeptide

SEQ ID NO: 23603 - protein, 349 aa, Artificial Sequence; identical to SEQ ID NO: 23601
  Synthetic polypeptide

SEQ ID NO: 23604 - protein, 349 aa, Artificial Sequence; identical to SEQ ID NO: 23601
  Synthetic polypeptide

SEQ ID NO: 23605 - protein, 160 aa, Artificial Sequence
  Synthetic polypeptide
WRATWGLRKEKKECRRDHRPPCAQEAPRNMVHPNVICDGCNGPVVGTRYKCSVCPDYDLCSVCEGKGLHRGHTKLAFPSPFGHLSEGFSHSRWLRKVKHGHFGWPGWEMGPPGNWSPRPPRAGEARPGPTAESASGPSEDPSVNFLKNVGESVAAALSPL

SEQ ID NO: 23606 - protein, 133 aa, Artificial Sequence
  Synthetic polypeptide
WRATWGLRKEKKECRRDHRPPCAQEAPRNMVHPNVICDGCNGPVVGTRYKCSVCPDYDLCSVCEGKGLHRGHTKLAFPSPFGHLSEGFSHSRWLRKVKHGHFGWPGWEMGPPGNWSPRPPRAGEARPGPTAES

SEQ ID NO: 23607 - protein, 76 aa, Artificial Sequence
  Synthetic polypeptide
WRATWGLRKEKKECRRDHRPPCAQEAPRNMVHPNVICDGCNGPVVGTRYKCSVCPDYDLCSVCEGKGLHRGHTKLA

SEQ ID NO: 23608 - protein, 287 aa, Artificial Sequence
  Synthetic polypeptide
WRATWGLRKEKKECRRDHRPPCAQEAPRNMVHPNVICDGCNGPVVGTRYKCSVCPDYDLCSVCEGKGLHRGHTKLAFPSPFGHLSEGFSHSRWLRKVKHGHFGWPGWEMGPPGNWSPRPPRAGEARPGPTAESASGPSEDPSVNFLKNVGESVAAALSPLGIEVDIDVEHGGKRSRLTPVSPESSSTEEKSSSQPSSCCSDPSKPGGNVEGATQSLAEQMRKIALECCPWASLMKAAGSPGSCRPRTMTSERLWTPSSIQSIPRRCDHFCPPLLRAPLLSHSCVKLA

SEQ ID NO: 23609 - protein, 18 aa, Artificial Sequence
  Synthetic polypeptide
ERALKLISMWSTEGKEAA

SEQ ID NO: 23610 - protein, 18 aa, Artificial Sequence
  Synthetic polypeptide
ERALKLISMWSTEGKEAA

SEQ ID NO: 23611 - protein, 18 aa, Artificial Sequence
  Synthetic polypeptide
ERALKLISMWSTEGKEAA

SEQ ID NO: 23612 - protein, 18 aa, Artificial Sequence
  Synthetic polypeptide
ERALKLISMWSTEGKEAA

SEQ ID NO: 23613 - protein, 18 aa, Artificial Sequence
  Synthetic polypeptide
ERALKLISMWSTEGKEAA

SEQ ID NO: 23614 - protein, 11 aa, Artificial Sequence
  Synthetic polypeptide
MACNMGLEKGH

SEQ ID NO: 23615 - protein, 11 aa, Artificial Sequence
  Synthetic polypeptide
MACNMGLEKGH

SEQ ID NO: 23616 - protein, 11 aa, Artificial Sequence
  Synthetic polypeptide
MACNMGLEKGH

SEQ ID NO: 23617 - protein, 11 aa, Artificial Sequence
  Synthetic polypeptide
MACNMGLEKGH

SEQ ID NO: 23618 - protein, 11 aa, Artificial Sequence
  Synthetic polypeptide
MACNMGLEKGH

SEQ ID NO: 23619 - protein, 198 aa, Artificial Sequence
  Synthetic polypeptide
WRATWGLRKGIEVDIDVEHGGKRSRLTPVSPESSSTEEKSSSQPSSCCSDPSKPGGNVEGATQSLAEQMRKIALESEGRPEEQMESDNCSGGDDDWTHLSSKEVDPSTGELQSLQMPESEGPSSLDPSQEGPTGLKEAALYPHLPPEADPRLIESLSQMLSMGFSDEGGWLTRLLQTKNYDIGAALDTIQYSKHPPPL

SEQ ID NO: 23620 - protein, 198 aa, Artificial Sequence; identical to SEQ ID NO: 23619
  Synthetic polypeptide

SEQ ID NO: 23621 - protein, 198 aa, Artificial Sequence; identical to SEQ ID NO: 23619
  Synthetic polypeptide

SEQ ID NO: 23622 - protein, 198 aa, Artificial Sequence; identical to SEQ ID NO: 23619
  Synthetic polypeptide

SEQ ID NO: 23623 - protein, 136 aa, Artificial Sequence
  Synthetic polypeptide
WRATWGLRKGIEVDIDVEHGGKRSRLTPVSPESSSTEEKSSSQPSSCCSDPSKPGGNVEGATQSLAEQMRKIALECCPWASLMKAAGSPGSCRPRTMTSERLWTPSSIQSIPRRCDHFCPPLLRAPLLSHSCVKLA

SEQ ID NO: 23624 - protein, 44 aa, Artificial Sequence
  Synthetic polypeptide
VASLSPLPPLRQQDQPSLPPPQPALREDDEDEDLYDDPLPLNEK

SEQ ID NO: 23625 - protein, 44 aa, Artificial Sequence; identical to SEQ ID NO: 23624
  Synthetic polypeptide

SEQ ID NO: 23626 - protein, 35 aa, Artificial Sequence
  Synthetic polypeptide
DSRTNPPFLLLSLLYVKMMRMKTFMTIHFHLMKSE

SEQ ID NO: 23627 - protein, 35 aa, Artificial Sequence; identical to SEQ ID NO: 23626
  Synthetic polypeptide

SEQ ID NO: 23628 - protein, 63 aa, Artificial Sequence
  Synthetic polypeptide
KVNENFAIDLIAEQPVSEVETRVIACDGGGGALGHPKVYINLDKETKTGTCGYCGLQFRQHHH

SEQ ID NO: 23629 - protein, 111 aa, Artificial Sequence
  Synthetic polypeptide
KVNENFAIDLIAEQPVSEVETRVIACDGGGGALGHPKVYINLVRSWPPVHMLGQPARPHTPLHSQCLFFLSSSLPAPEAALTGFTLLAHSPYSATLQGLHRAACPKTPFQL

SEQ ID NO: 23630 - protein, 77 aa, Artificial Sequence
  Synthetic polypeptide
ELGKNPKEKENVELKNNEDEKLELFNLKDKRLRYYQDSFAQHGSRKQGAVPSGDSSQGYGRPDGRIIWDHHREHHTD

SEQ ID NO: 23631 - protein, 77 aa, Artificial Sequence; identical to SEQ ID NO: 23630
  Synthetic polypeptide

SEQ ID NO: 23632 - protein, 33 aa, Artificial Sequence
  Synthetic polypeptide
KIRIIQLKGQKAEVLSRQLCSTWIEKTGSSTKW

SEQ ID NO: 23633 - protein, 33 aa, Artificial Sequence; identical to SEQ ID NO: 23632
  Synthetic polypeptide

SEQ ID NO: 23634 - protein, 37 aa, Artificial Sequence
  Synthetic polypeptide
VPQLRKWERETLLSQAHTSTGEAEDWIFPTTTWRLFH

SEQ ID NO: 23635 - protein, 37 aa, Artificial Sequence; identical to SEQ ID NO: 23634
  Synthetic polypeptide

SEQ ID NO: 23636 - protein, 37 aa, Artificial Sequence; identical to SEQ ID NO: 23634
  Synthetic polypeptide

SEQ ID NO: 23637 - protein, 1494 aa, Artificial Sequence
  Synthetic polypeptide
ILAPDRLQEQTSNPKRPHRPSEGSGLLLQDRKRHPKYCECPSCGSGKGRPSSPKHTPPLEKLKTGFFQLPHGDFFIEPVKKHPLVEGGYHPHIVYRRQKVPETKEPTCGLKDSVNISQKQELWREKWERHNLPSRSLSRRSISKERWVETLVVADTKMIEYHGSENVESYILTIMNMVTGLFHNPSIGNAIHIVVVRLILLEEEEQGLKIVHHAEKTLSSFCKWQKSINPKSDLNPVHHDVAVLLTRKDICAGFNRPCETLGLSHLSGMCQPHRSCNINEDSGLPLAFTIAHELGHSFGIQHDGKENDCEPVGRHPYIMSRQLQYDPTPLTWSKCSEEYITRFLDRGWGFCLDDIPKKKGLKSKVIAPGVIYDVHHQCQLQYGPNATFCQEVENVCQTLWCSVKGFCRSKLDAAADGTQCGEKKWCMAGKCITVGKKPESIPGGWGRWSPWSHCSRTCGAGVQSAERLCNNPEPKFGGKYCTGERKRYRLCNVHPCRSEAPTFRQMQCSEFDTVPYKNELYHWFPIFNPAHPCELYCRPIDGQFSEKMLDAVIDGTPCFEGGNSRNVCINGICKMVGCDYEIDSNATEDRCGVCLGDGSSCQTVRKMFKQKEGSGYVDIGLIPKGARDIRVMEIEGAGNFLAIRSEDPEKYYLNGGFIIQWNGNYKLAGTVFQYDRKGDLEKLMATGPTNESVWIQLLFQVTNPGIKYEYTIQKDGLDNDVEQQMYFWQYGHWTECSVTCGTGIRRQTAHCIKKGRGMVKATFCDPETQPNGRQKKCHEKACPPRWWAGEWEACSATCGPHGEKKRTVLCIQTMVSDEQALPPTDCQHLLKPKTLLSCNRDILCPSDWTVGNWSECSVSCGGGVRIRSVTCAKNHDEPCDVTRKPNSRALCGLQQCPSSRRVLKPNKGTISNGKNPPTLKPVPPPTSRPRMLTTPTGPESMSTSTPAISSPSPTTASKEGDLGGKQWQDSSTQPELSSRYLISTGSTSQPILTSQSLSIQPSEENVSSSDTGPTSEGGLVATTTSGSGLSSSRNPITWPVTPFYNTLTKGPEMEIHSGSGEEREQPEDKDESNPVIWTKIRVPGNDAPVESTEMPLAPPLTPDLSRESWWPPFSTVMEGLLPSQRPTTSETGTPRVEGMVTEKPANTLLPLGGDHQPEPSGKTANRNHLKLPNNMNQTKSSEPVLTEEDATSLITEGFLLNASNYKQLTNGHGSAHWIVGNWSECSTTCGLGAYWRRVECSTQMDSDCAAIQRPDPAKRCHLRPCAGWKVGNWSKCSRNCSGGFKIREIQCVDSRDHRNLRPFHCQFLAGIPPPLSMSCNPEPCEAWQVEPWSQCSRSCGGGVQERGVFCPGGLCDWTKRPTSTMSCNEHLCCHWATGNWDLCSTSCGGGFQKRTVQCVPSEGNKTEDQDQCLCDHKPRPPEFKKCNQQACKKSADLLCTKDKLSASFCQTLKAMKKCSVPTVRAECCFSCPQTHITHTQRQRRQRLLQKSKEL

SEQ ID NO: 23638 - protein, 1409 aa, Artificial Sequence
  Synthetic polypeptide
ILAPDRLQEQTSNPKRPHRPSEGSGLLLQDRKRHPKYCECPSCGSGKGRPSSPKHTPPLEKLKTGFFQLPHGDFFIEPVKKHPLVEGGYHPHIVYRRQKVPETKEPTCGLKDSVNISQKQELWREKWERHNLPSRSLSRRSISKERWVETLVVADTKMIEYHGSENVESYILTIMNMVTGLFHNPSIGNAIHIVVVRLILLEEEEQGLKIVHHAEKTLSSFCKWQKSINPKSDLNPVHHDVAVLLTRKDICAGFNRPCETLGLSHLSGMCQPHRSCNINEDSGLPLAFTIAHELGHSFGIQHDGKENDCEPVGRHPYIMSRQLQYDPTPLTWSKCSEEYITRFLDRGWGFCLDDIPKKKGLKSKVIAPGVIYDVHHQCQLQYGPNATFCQEVENVCQTLWCSVKGFCRSKLDAAADGTQCGEKKWCMAGKCITVGKKPESIPGGWGRWSPWSHCSRTCGAGVQSAERLCNNPEPKFGGKYCTGERKRYRLCNVHPCRSEAPTFRQMQCSEFDTVPYKNELYHWFPIFNPGYVDIGLIPKGARDIRVMEIEGAGNFLAIRSEDPEKYYLNGGFIIQWNGNYKLAGTVFQYDRKGDLEKLMATGPTNESVWIQLLFQVTNPGIKYEYTIQKDGLDNDVEQQMYFWQYGHWTECSVTCGTGIRRQTAHCIKKGRGMVKATFCDPETQPNGRQKKCHEKACPPRWWAGEWEACSATCGPHGEKKRTVLCIQTMVSDEQALPPTDCQHLLKPKTLLSCNRDILCPSDWTVGNWSECSVSCGGGVRIRSVTCAKNHDEPCDVTRKPNSRALCGLQQCPSSRRVLKPNKGTISNGKNPPTLKPVPPPTSRPRMLTTPTGPESMSTSTPAISSPSPTTASKEGDLGGKQWQDSSTQPELSSRYLISTGSTSQPILTSQSLSIQPSEENVSSSDTGPTSEGGLVATTTSGSGLSSSRNPITWPVTPFYNTLTKGPEMEIHSGSGEEREQPEDKDESNPVIWTKIRVPGNDAPVESTEMPLAPPLTPDLSRESWWPPFSTVMEGLLPSQRPTTSETGTPRVEGMVTEKPANTLLPLGGDHQPEPSGKTANRNHLKLPNNMNQTKSSEPVLTEEDATSLITEGFLLNASNYKQLTNGHGSAHWIVGNWSECSTTCGLGAYWRRVECSTQMDSDCAAIQRPDPAKRCHLRPCAGWKVGNWSKCSRNCSGGFKIREIQCVDSRDHRNLRPFHCQFLAGIPPPLSMSCNPEPCEAWQVEPWSQCSRSCGGGVQERGVFCPGGLCDWTKRPTSTMSCNEHLCCHWATGNWDLCSTSCGGGFQKRTVQCVPSEGNKTEDQDQCLCDHKPRPPEFKKCNQQACKKSADLLCTKDKLSASFCQTLKAMKKCSVPTVRAECCFSCPQTHITHTQRQRRQRLLQKSKEL

SEQ ID NO: 23639 - protein, 132 aa, Artificial Sequence
  Synthetic polypeptide
ILAPDRLQEQTSNPKRPHRPSEGSGLLLQDRKRHPKYCECPSCGSGKGRPSSPKHTPPLEKLKTGFFQLPHGDFFIEPVKKHPLVEGGYHPHIVYRRQKVPETKEPTCGLKGIVTHMSSWVEESVLFFWLFY

SEQ ID NO: 23640 - protein, 1466 aa, Artificial Sequence
  Synthetic polypeptide
LQIDCKNKPAIPRGPTDPLKEADFSCRTGRDTPNTTGFFQLPHGDFFIEPVKKHPLVEGGYHPHIVYRRQKVPETKEPTCGLKDSVNISQKQELWREKWERHNLPSRSLSRRSISKERWVETLVVADTKMIEYHGSENVESYILTIMNMVTGLFHNPSIGNAIHIVVVRLILLEEEEQGLKIVHHAEKTLSSFCKWQKSINPKSDLNPVHHDVAVLLTRKDICAGFNRPCETLGLSHLSGMCQPHRSCNINEDSGLPLAFTIAHELGHSFGIQHDGKENDCEPVGRHPYIMSRQLQYDPTPLTWSKCSEEYITRFLDRGWGFCLDDIPKKKGLKSKVIAPGVIYDVHHQCQLQYGPNATFCQEVENVCQTLWCSVKGFCRSKLDAAADGTQCGEKKWCMAGKCITVGKKPESIPGGWGRWSPWSHCSRTCGAGVQSAERLCNNPEPKFGGKYCTGERKRYRLCNVHPCRSEAPTFRQMQCSEFDTVPYKNELYHWFPIFNPAHPCELYCRPIDGQFSEKMLDAVIDGTPCFEGGNSRNVCINGICKMVGCDYEIDSNATEDRCGVCLGDGSSCQTVRKMFKQKEGSGYVDIGLIPKGARDIRVMEIEGAGNFLAIRSEDPEKYYLNGGFIIQWNGNYKLAGTVFQYDRKGDLEKLMATGPTNESVWIQLLFQVTNPGIKYEYTIQKDGLDNDVEQQMYFWQYGHWTECSVTCGTGIRRQTAHCIKKGRGMVKATFCDPETQPNGRQKKCHEKACPPRWWAGEWEACSATCGPHGEKKRTVLCIQTMVSDEQALPPTDCQHLLKPKTLLSCNRDILCPSDWTVGNWSECSVSCGGGVRIRSVTCAKNHDEPCDVTRKPNSRALCGLQQCPSSRRVLKPNKGTISNGKNPPTLKPVPPPTSRPRMLTTPTGPESMSTSTPAISSPSPTTASKEGDLGGKQWQDSSTQPELSSRYLISTGSTSQPILTSQSLSIQPSEENVSSSDTGPTSEGGLVATTTSGSGLSSSRNPITWPVTPFYNTLTKGPEMEIHSGSGEEREQPEDKDESNPVIWTKIRVPGNDAPVESTEMPLAPPLTPDLSRESWWPPFSTVMEGLLPSQRPTTSETGTPRVEGMVTEKPANTLLPLGGDHQPEPSGKTANRNHLKLPNNMNQTKSSEPVLTEEDATSLITEGFLLNASNYKQLTNGHGSAHWIVGNWSECSTTCGLGAYWRRVECSTQMDSDCAAIQRPDPAKRCHLRPCAGWKVGNWSKCSRNCSGGFKIREIQCVDSRDHRNLRPFHCQFLAGIPPPLSMSCNPEPCEAWQVEPWSQCSRSCGGGVQERGVFCPGGLCDWTKRPTSTMSCNEHLCCHWATGNWDLCSTSCGGGFQKRTVQCVPSEGNKTEDQDQCLCDHKPRPPEFKKCNQQACKKSADLLCTKDKLSASFCQTLKAMKKCSVPTVRAECCFSCPQTHITHTQRQRRQRLLQKSKEL

SEQ ID NO: 23641 - protein, 31 aa, Artificial Sequence
  Synthetic polypeptide
RKRTSPAGPEETPQILLDFSNYHMETFSLNP

SEQ ID NO: 23642 - protein, 31 aa, Artificial Sequence; identical to SEQ ID NO: 23641
  Synthetic polypeptide

SEQ ID NO: 23643 - protein, 31 aa, Artificial Sequence; identical to SEQ ID NO: 23641
  Synthetic polypeptide

SEQ ID NO: 23644 - protein, 50 aa, Artificial Sequence
  Synthetic polypeptide
ILAPDRLQEQTSNPKRPHRPSEGSGLLLQDRKRHPKYYWIFPTTTWRLFH

SEQ ID NO: 23645 - protein, 50 aa, Artificial Sequence; identical to SEQ ID NO: 23644
  Synthetic polypeptide

SEQ ID NO: 23646 - protein, 50 aa, Artificial Sequence; identical to SEQ ID NO: 23644
  Synthetic polypeptide

SEQ ID NO: 23647 - protein, 1381 aa, Artificial Sequence
  Synthetic polypeptide
LQIDCKNKPAIPRGPTDPLKEADFSCRTGRDTPNTTGFFQLPHGDFFIEPVKKHPLVEGGYHPHIVYRRQKVPETKEPTCGLKDSVNISQKQELWREKWERHNLPSRSLSRRSISKERWVETLVVADTKMIEYHGSENVESYILTIMNMVTGLFHNPSIGNAIHIVVVRLILLEEEEQGLKIVHHAEKTLSSFCKWQKSINPKSDLNPVHHDVAVLLTRKDICAGFNRPCETLGLSHLSGMCQPHRSCNINEDSGLPLAFTIAHELGHSFGIQHDGKENDCEPVGRHPYIMSRQLQYDPTPLTWSKCSEEYITRFLDRGWGFCLDDIPKKKGLKSKVIAPGVIYDVHHQCQLQYGPNATFCQEVENVCQTLWCSVKGFCRSKLDAAADGTQCGEKKWCMAGKCITVGKKPESIPGGWGRWSPWSHCSRTCGAGVQSAERLCNNPEPKFGGKYCTGERKRYRLCNVHPCRSEAPTFRQMQCSEFDTVPYKNELYHWFPIFNPGYVDIGLIPKGARDIRVMEIEGAGNFLAIRSEDPEKYYLNGGFIIQWNGNYKLAGTVFQYDRKGDLEKLMATGPTNESVWIQLLFQVTNPGIKYEYTIQKDGLDNDVEQQMYFWQYGHWTECSVTCGTGIRRQTAHCIKKGRGMVKATFCDPETQPNGRQKKCHEKACPPRWWAGEWEACSATCGPHGEKKRTVLCIQTMVSDEQALPPTDCQHLLKPKTLLSCNRDILCPSDWTVGNWSECSVSCGGGVRIRSVTCAKNHDEPCDVTRKPNSRALCGLQQCPSSRRVLKPNKGTISNGKNPPTLKPVPPPTSRPRMLTTPTGPESMSTSTPAISSPSPTTASKEGDLGGKQWQDSSTQPELSSRYLISTGSTSQPILTSQSLSIQPSEENVSSSDTGPTSEGGLVATTTSGSGLSSSRNPITWPVTPFYNTLTKGPEMEIHSGSGEEREQPEDKDESNPVIWTKIRVPGNDAPVESTEMPLAPPLTPDLSRESWWPPFSTVMEGLLPSQRPTTSETGTPRVEGMVTEKPANTLLPLGGDHQPEPSGKTANRNHLKLPNNMNQTKSSEPVLTEEDATSLITEGFLLNASNYKQLTNGHGSAHWIVGNWSECSTTCGLGAYWRRVECSTQMDSDCAAIQRPDPAKRCHLRPCAGWKVGNWSKCSRNCSGGFKIREIQCVDSRDHRNLRPFHCQFLAGIPPPLSMSCNPEPCEAWQVEPWSQCSRSCGGGVQERGVFCPGGLCDWTKRPTSTMSCNEHLCCHWATGNWDLCSTSCGGGFQKRTVQCVPSEGNKTEDQDQCLCDHKPRPPEFKKCNQQACKKSADLLCTKDKLSASFCQTLKAMKKCSVPTVRAECCFSCPQTHITHTQRQRRQRLLQKSKEL

SEQ ID NO: 23648 - protein, 104 aa, Artificial Sequence
  Synthetic polypeptide
LQIDCKNKPAIPRGPTDPLKEADFSCRTGRDTPNTTGFFQLPHGDFFIEPVKKHPLVEGGYHPHIVYRRQKVPETKEPTCGLKGIVTHMSSWVEESVLFFWLFY

SEQ ID NO: 23649 - protein, 15 aa, Artificial Sequence
  Synthetic polypeptide
NKSVTKGLILTWTKV

SEQ ID NO: 23650 - protein, 15 aa, Artificial Sequence
  Synthetic polypeptide
NKSVTKGLILTWTKV

SEQ ID NO: 23651 - protein, 15 aa, Artificial Sequence
  Synthetic polypeptide
NKSVTKGLILTWTKV

SEQ ID NO: 23652 - protein, 15 aa, Artificial Sequence
  Synthetic polypeptide
NKSVTKGLILTWTKV

SEQ ID NO: 23653 - protein, 11 aa, Artificial Sequence
  Synthetic polypeptide
VSHQRANTDLD

SEQ ID NO: 23654 - protein, 11 aa, Artificial Sequence
  Synthetic polypeptide
VSHQRANTDLD

SEQ ID NO: 23655 - protein, 11 aa, Artificial Sequence
  Synthetic polypeptide
VSHQRANTDLD

SEQ ID NO: 23656 - protein, 11 aa, Artificial Sequence
  Synthetic polypeptide
VSHQRANTDLD

SEQ ID NO: 23657 - protein, 7 aa, Artificial Sequence
  Synthetic polypeptide
NKTWTKV

SEQ ID NO: 23658 - protein, 7 aa, Artificial Sequence
  Synthetic polypeptide
NKTWTKV

SEQ ID NO: 23659 - protein, 7 aa, Artificial Sequence
  Synthetic polypeptide
NKTWTKV

SEQ ID NO: 23660 - protein, 7 aa, Artificial Sequence
  Synthetic polypeptide
NKTWTKV

SEQ ID NO: 23661 - protein, 162 aa, Artificial Sequence
  Synthetic polypeptide
FSLKKTRKFQHVTTEMNLEDIMLSEIRLGLKSDELPNQMSMDDWPEMKKKFADVFAEKTKAEWCQIFDGTDACVTPVLTFEEVVHHDHNKERGSFITSEEQDVSPRPAPLLLNTPAIPSFKRDPFIGEHTEEILEEFGFSREEIYQLNSDKIIESNKVKASL

SEQ ID NO: 23662 - protein, 162 aa, Artificial Sequence; identical to SEQ ID NO: 23661
  Synthetic polypeptide

SEQ ID NO: 23663 - protein, 32 aa, Artificial Sequence
  Synthetic polypeptide
FSLKKTRKFQHVTTEMNLEDIMLSEIRLGLKS

SEQ ID NO: 23664 - protein, 174 aa, Artificial Sequence
  Synthetic polypeptide
FSLKKTRKFQHVTTEMNLEDIMLSEIRLGLKSDELPNQMSMDDWPEMKKKFADVFAEKTKAEWCQIFDGTDACVTPVLTFEEVVHHDHNKERGSFITSEEQDVSPRPAPLLLNTPAIPSFKRDPFIGEHTEEILEEFGFSREEIYQLNSDKIIESNKAGSKFWILYPTHSNIQK

SEQ ID NO: 23665 - protein, 313 aa, Artificial Sequence
  Synthetic polypeptide
PKHCLVYSGKSVNGVMEKLQLGPEILQRENPRLIYARLSGFGQSGSFCRLAGHDINYLALSGVLSKIGRSGENPYAPLNLLADFAGGGLMCALGIIMALFDRTRTGKGQVIDANMVEGTAYLSSFLWKTQKLSLWEAPRGQNMLDGGAPFYTTYRTADGEFMAVGAIEPQFYELLIKGLGLKSDELPNQMSMDDWPEMKKKFADVFAEKTKAEWCQIFDGTDACVTPVLTFEEVVHHDHNKERGSFITSEEQDVSPRPAPLLLNTPAIPSFKRDPFIGEHTEEILEEFGFSREEIYQLNSDKIIESNKVKASL

SEQ ID NO: 23666 - protein, 25 aa, Artificial Sequence
  Synthetic polypeptide
MVSWRNSSWAQRFCSGKIQGLFMPG

SEQ ID NO: 23667 - protein, 25 aa, Artificial Sequence
  Synthetic polypeptide
MVSWRNSSWAQRFCSGKIQGLFMPG

SEQ ID NO: 23668 - protein, 25 aa, Artificial Sequence
  Synthetic polypeptide
MVSWRNSSWAQRFCSGKIQGLFMPG

SEQ ID NO: 23669 - protein, 25 aa, Artificial Sequence
  Synthetic polypeptide
MVSWRNSSWAQRFCSGKIQGLFMPG

SEQ ID NO: 23670 - protein, 25 aa, Artificial Sequence
  Synthetic polypeptide
MVSWRNSSWAQRFCSGKIQGLFMPG

SEQ ID NO: 23671 - protein, 25 aa, Artificial Sequence
  Synthetic polypeptide
MVSWRNSSWAQRFCSGKIQGLFMPG

SEQ ID NO: 23672 - protein, 25 aa, Artificial Sequence
  Synthetic polypeptide
MVSWRNSSWAQRFCSGKIQGLFMPG

SEQ ID NO: 23673 - protein, 25 aa, Artificial Sequence
  Synthetic polypeptide
MVSWRNSSWAQRFCSGKIQGLFMPG

SEQ ID NO: 23674 - protein, 25 aa, Artificial Sequence
  Synthetic polypeptide
MVSWRNSSWAQRFCSGKIQGLFMPG

SEQ ID NO: 23675 - protein, 25 aa, Artificial Sequence
  Synthetic polypeptide
MVSWRNSSWAQRFCSGKIQGLFMPG

SEQ ID NO: 23676 - protein, 63 aa, Artificial Sequence
  Synthetic polypeptide
WEIGKWCHGETPAGPRDSAAGKSKAYLCQAEWIWPVRKLLPVSWPRYQLFGFVRCSLKNWQKW

SEQ ID NO: 23677 - protein, 63 aa, Artificial Sequence; identical to SEQ ID NO: 23676
  Synthetic polypeptide

SEQ ID NO: 23678 - protein, 63 aa, Artificial Sequence; identical to SEQ ID NO: 23676
  Synthetic polypeptide

SEQ ID NO: 23679 - protein, 63 aa, Artificial Sequence; identical to SEQ ID NO: 23676
  Synthetic polypeptide

SEQ ID NO: 23680 - protein, 63 aa, Artificial Sequence; identical to SEQ ID NO: 23676
  Synthetic polypeptide

SEQ ID NO: 23681 - protein, 129 aa, Artificial Sequence
  Synthetic polypeptide
PKHCLVYSGKSVNGVMEKLQLGPEILQRENPRLIYARLSGFGQSGSFCRLAGHDINYLALSGGRNSIFKFFSVENSEIESVGSTSRTEHVGWWSTFLYDLQDSRWGIHGCWSNRTPVLRAADQRTWTKV

SEQ ID NO: 23682 - protein, 60 aa, Artificial Sequence
  Synthetic polypeptide
WEIGKWCHGETPAGPRDSAAGKSKAYLCQAEWIWPVRKLLPVSWPRYQLFGFVRWKEQHI

SEQ ID NO: 23683 - protein, 60 aa, Artificial Sequence; identical to SEQ ID NO: 23682
  Synthetic polypeptide

SEQ ID NO: 23684 - protein, 60 aa, Artificial Sequence; identical to SEQ ID NO: 23682
  Synthetic polypeptide

SEQ ID NO: 23685 - protein, 60 aa, Artificial Sequence; identical to SEQ ID NO: 23682
  Synthetic polypeptide

SEQ ID NO: 23686 - protein, 60 aa, Artificial Sequence; identical to SEQ ID NO: 23682
  Synthetic polypeptide

SEQ ID NO: 23687 - protein, 68 aa, Artificial Sequence
  Synthetic polypeptide
PKHCLVYSGKSVNGVMEKLQLGPEILQRENPRLIYARLSGFGQSGSFCRLAGHDINYLALSGGRNSIF

SEQ ID NO: 23688 - protein, 160 aa, Artificial Sequence
  Synthetic polypeptide
PKHCLVYSGKSVNGVMEKLQLGPEILQRENPRLIYARLSGFGQSGSFCRLAGHDINYLALSGGRNSIFKFFSVENSEIESVGSTSRTEHVGWWSTFLYDLQDSRWGIHGCWSNRTPVLRAADQRSLIPYFNLYLQFLNISMQNLFKVHTLLRPCYFLGQK

SEQ ID NO: 23689 - protein, 160 aa, Artificial Sequence; identical to SEQ ID NO: 23688
  Synthetic polypeptide

SEQ ID NO: 23690 - protein, 325 aa, Artificial Sequence
  Synthetic polypeptide
PKHCLVYSGKSVNGVMEKLQLGPEILQRENPRLIYARLSGFGQSGSFCRLAGHDINYLALSGVLSKIGRSGENPYAPLNLLADFAGGGLMCALGIIMALFDRTRTGKGQVIDANMVEGTAYLSSFLWKTQKLSLWEAPRGQNMLDGGAPFYTTYRTADGEFMAVGAIEPQFYELLIKGLGLKSDELPNQMSMDDWPEMKKKFADVFAEKTKAEWCQIFDGTDACVTPVLTFEEVVHHDHNKERGSFITSEEQDVSPRPAPLLLNTPAIPSFKRDPFIGEHTEEILEEFGFSREEIYQLNSDKIIESNKAGSKFWILYPTHSNIQK

SEQ ID NO: 23691 - protein, 298 aa, Artificial Sequence
  Synthetic polypeptide
PKHCLVYSGKSVNGVMEKLQLGPEILQRENPRLIYARLSGFGQSGSFCRLAGHDINYLALSGVLSKIGRSGENPYAPLNLLADFAGGGLMCALGIIMALFDRTRTGKGQVIDANMKLSLWEAPRGQNMLDGGAPFYTTYRTADGEFMAVGAIEPQFYELLIKGLGLKSDELPNQMSMDDWPEMKKKFADVFAEKTKAEWCQIFDGTDACVTPVLTFEEVVHHDHNKERGSFITSEEQDVSPRPAPLLLNTPAIPSFKRDPFIGEHTEEILEEFGFSREEIYQLNSDKIIESNKVKASL

SEQ ID NO: 23692 - protein, 219 aa, Artificial Sequence
  Synthetic polypeptide
PKHCLVYSGKSVNGVMEKLQLGPEILQRENPRLIYARLSGFGQSGSFCRLAGHDINYLALSGVLSKIGRSGENPYAPLNLLADFAGGGLMCALGIIMALFDRTRTGKGQVIDANMVEGTAYLSSFLWKTQKLSLWEAPRGQNMLDGGAPFYTTYRTADGEFMAVGAIEPQFYELLIKGLGELILLKIQQEAVSCQARQTLVSVKQWPSLQPKSWGFVWQ

SEQ ID NO: 23693 - protein, 191 aa, Artificial Sequence
  Synthetic polypeptide
PKHCLVYSGKSVNGVMEKLQLGPEILQRENPRLIYARLSGFGQSGSFCRLAGHDINYLALSGVLSKIGRSGENPYAPLNLLADFAGGGLMCALGIIMALFDRTRTGKGQVIDANMVEGTAYLSSFLWKTQKLSLWEAPRGQNMLDGGAPFYTTYRTADGEFMAVGAIEPQFYELLIKGCWGMLQFPSQKTK

SEQ ID NO: 23694 - protein, 212 aa, Artificial Sequence
  Synthetic polypeptide
PKHCLVYSGKSVNGVMEKLQLGPEILQRENPRLIYARLSGFGQSGSFCRLAGHDINYLALSGGRNSIFKFFSVENSEIESVGSTSRTEHVGWWSTFLYDLQDSRWGIHGCWSNRTPVLRAADQRSGRTDLAENTTGSSIVPGKANPRQCEAMAIVAAQVMGFCVAVTVGGGNGHFELDVFKPMMIKNLCYTQAAGGCFSFLHRKLNSGNPDQ

SEQ ID NO: 23695 - protein, 35 aa, Artificial Sequence
  Synthetic polypeptide
PKHCLVYSGKSVSWRNSSWAQRFCSGKIQGLFMPG

SEQ ID NO: 23696 - protein, 35 aa, Artificial Sequence; identical to SEQ ID NO: 23695
  Synthetic polypeptide

SEQ ID NO: 23697 - protein, 35 aa, Artificial Sequence; identical to SEQ ID NO: 23695
  Synthetic polypeptide

SEQ ID NO: 23698 - protein, 35 aa, Artificial Sequence; identical to SEQ ID NO: 23695
  Synthetic polypeptide

SEQ ID NO: 23699 - protein, 35 aa, Artificial Sequence; identical to SEQ ID NO: 23695
  Synthetic polypeptide

SEQ ID NO: 23700 - protein, 35 aa, Artificial Sequence; identical to SEQ ID NO: 23695
  Synthetic polypeptide

SEQ ID NO: 23701 - protein, 35 aa, Artificial Sequence; identical to SEQ ID NO: 23695
  Synthetic polypeptide

SEQ ID NO: 23702 - protein, 35 aa, Artificial Sequence; identical to SEQ ID NO: 23695
  Synthetic polypeptide

SEQ ID NO: 23703 - protein, 35 aa, Artificial Sequence; identical to SEQ ID NO: 23695
  Synthetic polypeptide

SEQ ID NO: 23704 - protein, 35 aa, Artificial Sequence; identical to SEQ ID NO: 23695
  Synthetic polypeptide

SEQ ID NO: 23705 - protein, 68 aa, Artificial Sequence
  Synthetic polypeptide
QSIAWSIVGNRCHGETPAGPRDSAAGKSKAYLCQAEWIWPVRKLLPVSWPRYQLFGFVRCSLKNWQKW

SEQ ID NO: 23706 - protein, 68 aa, Artificial Sequence; identical to SEQ ID NO: 23705
  Synthetic polypeptide

SEQ ID NO: 23707 - protein, 68 aa, Artificial Sequence; identical to SEQ ID NO: 23705
  Synthetic polypeptide

SEQ ID NO: 23708 - protein, 68 aa, Artificial Sequence; identical to SEQ ID NO: 23705
  Synthetic polypeptide

SEQ ID NO: 23709 - protein, 68 aa, Artificial Sequence; identical to SEQ ID NO: 23705
  Synthetic polypeptide

SEQ ID NO: 23710 - protein, 303 aa, Artificial Sequence
  Synthetic polypeptide
WEIGVMEKLQLGPEILQRENPRLIYARLSGFGQSGSFCRLAGHDINYLALSGVLSKIGRSGENPYAPLNLLADFAGGGLMCALGIIMALFDRTRTGKGQVIDANMVEGTAYLSSFLWKTQKLSLWEAPRGQNMLDGGAPFYTTYRTADGEFMAVGAIEPQFYELLIKGLGLKSDELPNQMSMDDWPEMKKKFADVFAEKTKAEWCQIFDGTDACVTPVLTFEEVVHHDHNKERGSFITSEEQDVSPRPAPLLLNTPAIPSFKRDPFIGEHTEEILEEFGFSREEIYQLNSDKIIESNKVKASL

SEQ ID NO: 23711 - protein, 65 aa, Artificial Sequence
  Synthetic polypeptide
QSIAWSIVGNRCHGETPAGPRDSAAGKSKAYLCQAEWIWPVRKLLPVSWPRYQLFGFVRWKEQHI

SEQ ID NO: 23712 - protein, 65 aa, Artificial Sequence; identical to SEQ ID NO: 23711
  Synthetic polypeptide

SEQ ID NO: 23713 - protein, 65 aa, Artificial Sequence; identical to SEQ ID NO: 23711
  Synthetic polypeptide

SEQ ID NO: 23714 - protein, 65 aa, Artificial Sequence; identical to SEQ ID NO: 23711
  Synthetic polypeptide

SEQ ID NO: 23715 - protein, 65 aa, Artificial Sequence; identical to SEQ ID NO: 23711
  Synthetic polypeptide

SEQ ID NO: 23716 - protein, 119 aa, Artificial Sequence
  Synthetic polypeptide
WEIGVMEKLQLGPEILQRENPRLIYARLSGFGQSGSFCRLAGHDINYLALSGGRNSIFKFFSVENSEIESVGSTSRTEHVGWWSTFLYDLQDSRWGIHGCWSNRTPVLRAADQRTWTKV

SEQ ID NO: 23717 - protein, 58 aa, Artificial Sequence
  Synthetic polypeptide
WEIGVMEKLQLGPEILQRENPRLIYARLSGFGQSGSFCRLAGHDINYLALSGGRNSIF

SEQ ID NO: 23718 - protein, 150 aa, Artificial Sequence
  Synthetic polypeptide
WEIGVMEKLQLGPEILQRENPRLIYARLSGFGQSGSFCRLAGHDINYLALSGGRNSIFKFFSVENSEIESVGSTSRTEHVGWWSTFLYDLQDSRWGIHGCWSNRTPVLRAADQRSLIPYFNLYLQFLNISMQNLFKVHTLLRPCYFLGQK

SEQ ID NO: 23719 - protein, 150 aa, Artificial Sequence; identical to SEQ ID NO: 23718
  Synthetic polypeptide

SEQ ID NO: 23720 - protein, 315 aa, Artificial Sequence
  Synthetic polypeptide
WEIGVMEKLQLGPEILQRENPRLIYARLSGFGQSGSFCRLAGHDINYLALSGVLSKIGRSGENPYAPLNLLADFAGGGLMCALGIIMALFDRTRTGKGQVIDANMVEGTAYLSSFLWKTQKLSLWEAPRGQNMLDGGAPFYTTYRTADGEFMAVGAIEPQFYELLIKGLGLKSDELPNQMSMDDWPEMKKKFADVFAEKTKAEWCQIFDGTDACVTPVLTFEEVVHHDHNKERGSFITSEEQDVSPRPAPLLLNTPAIPSFKRDPFIGEHTEEILEEFGFSREEIYQLNSDKIIESNKAGSKFWILYPTHSNIQK

SEQ ID NO: 23721 - protein, 288 aa, Artificial Sequence
  Synthetic polypeptide
WEIGVMEKLQLGPEILQRENPRLIYARLSGFGQSGSFCRLAGHDINYLALSGVLSKIGRSGENPYAPLNLLADFAGGGLMCALGIIMALFDRTRTGKGQVIDANMKLSLWEAPRGQNMLDGGAPFYTTYRTADGEFMAVGAIEPQFYELLIKGLGLKSDELPNQMSMDDWPEMKKKFADVFAEKTKAEWCQIFDGTDACVTPVLTFEEVVHHDHNKERGSFITSEEQDVSPRPAPLLLNTPAIPSFKRDPFIGEHTEEILEEFGFSREEIYQLNSDKIIESNKVKASL

SEQ ID NO: 23722 - protein, 209 aa, Artificial Sequence
  Synthetic polypeptide
WEIGVMEKLQLGPEILQRENPRLIYARLSGFGQSGSFCRLAGHDINYLALSGVLSKIGRSGENPYAPLNLLADFAGGGLMCALGIIMALFDRTRTGKGQVIDANMVEGTAYLSSFLWKTQKLSLWEAPRGQNMLDGGAPFYTTYRTADGEFMAVGAIEPQFYELLIKGLGELILLKIQQEAVSCQARQTLVSVKQWPSLQPKSWGFVWQ

SEQ ID NO: 23723 - protein, 181 aa, Artificial Sequence
  Synthetic polypeptide
WEIGVMEKLQLGPEILQRENPRLIYARLSGFGQSGSFCRLAGHDINYLALSGVLSKIGRSGENPYAPLNLLADFAGGGLMCALGIIMALFDRTRTGKGQVIDANMVEGTAYLSSFLWKTQKLSLWEAPRGQNMLDGGAPFYTTYRTADGEFMAVGAIEPQFYELLIKGCWGMLQFPSQKTK

SEQ ID NO: 23724 - protein, 202 aa, Artificial Sequence
  Synthetic polypeptide
WEIGVMEKLQLGPEILQRENPRLIYARLSGFGQSGSFCRLAGHDINYLALSGGRNSIFKFFSVENSEIESVGSTSRTEHVGWWSTFLYDLQDSRWGIHGCWSNRTPVLRAADQRSGRTDLAENTTGSSIVPGKANPRQCEAMAIVAAQVMGFCVAVTVGGGNGHFELDVFKPMMIKNLCYTQAAGGCFSFLHRKLNSGNPDQ

SEQ ID NO: 23725 - protein, 59 aa, Artificial Sequence
  Synthetic polypeptide
HWCHGETPAGPRDSAAGKSKAYLCQAEWIWPVRKLLPVSWPRYQLFGFVRCSLKNWQKW

SEQ ID NO: 23726 - protein, 59 aa, Artificial Sequence; identical to SEQ ID NO: 23725
  Synthetic polypeptide

SEQ ID NO: 23727 - protein, 59 aa, Artificial Sequence; identical to SEQ ID NO: 23725
  Synthetic polypeptide

SEQ ID NO: 23728 - protein, 59 aa, Artificial Sequence; identical to SEQ ID NO: 23725
  Synthetic polypeptide

SEQ ID NO: 23729 - protein, 59 aa, Artificial Sequence; identical to SEQ ID NO: 23725
  Synthetic polypeptide

SEQ ID NO: 23730 - protein, 316 aa, Artificial Sequence
  Synthetic polypeptide
PTRTISLHTCCNCLDTGVMEKLQLGPEILQRENPRLIYARLSGFGQSGSFCRLAGHDINYLALSGVLSKIGRSGENPYAPLNLLADFAGGGLMCALGIIMALFDRTRTGKGQVIDANMVEGTAYLSSFLWKTQKLSLWEAPRGQNMLDGGAPFYTTYRTADGEFMAVGAIEPQFYELLIKGLGLKSDELPNQMSMDDWPEMKKKFADVFAEKTKAEWCQIFDGTDACVTPVLTFEEVVHHDHNKERGSFITSEEQDVSPRPAPLLLNTPAIPSFKRDPFIGEHTEEILEEFGFSREEIYQLNSDKIIESNKVKASL

SEQ ID NO: 23731 - protein, 72 aa, Artificial Sequence
  Synthetic polypeptide
MPESQTCTSSWTPVFLSHPISMIINTVILLLSPLGLFLSIPAATALTLVSWRNSSWAQRFCSGKIQGLFMPG

SEQ ID NO: 23732 - protein, 72 aa, Artificial Sequence; identical to SEQ ID NO: 23731
  Synthetic polypeptide

SEQ ID NO: 23733 - protein, 72 aa, Artificial Sequence; identical to SEQ ID NO: 23731
  Synthetic polypeptide

SEQ ID NO: 23734 - protein, 72 aa, Artificial Sequence; identical to SEQ ID NO: 23731
  Synthetic polypeptide

SEQ ID NO: 23735 - protein, 72 aa, Artificial Sequence; identical to SEQ ID NO: 23731
  Synthetic polypeptide

SEQ ID NO: 23736 - protein, 72 aa, Artificial Sequence; identical to SEQ ID NO: 23731
  Synthetic polypeptide

SEQ ID NO: 23737 - protein, 72 aa, Artificial Sequence; identical to SEQ ID NO: 23731
  Synthetic polypeptide

SEQ ID NO: 23738 - protein, 72 aa, Artificial Sequence; identical to SEQ ID NO: 23731
  Synthetic polypeptide

SEQ ID NO: 23739 - protein, 72 aa, Artificial Sequence; identical to SEQ ID NO: 23731
  Synthetic polypeptide

SEQ ID NO: 23740 - protein, 72 aa, Artificial Sequence; identical to SEQ ID NO: 23731
  Synthetic polypeptide

SEQ ID NO: 23741 - protein, 56 aa, Artificial Sequence
  Synthetic polypeptide
HWCHGETPAGPRDSAAGKSKAYLCQAEWIWPVRKLLPVSWPRYQLFGFVRWKEQHI

SEQ ID NO: 23742 - protein, 56 aa, Artificial Sequence; identical to SEQ ID NO: 23741
  Synthetic polypeptide

SEQ ID NO: 23743 - protein, 56 aa, Artificial Sequence; identical to SEQ ID NO: 23741
  Synthetic polypeptide

SEQ ID NO: 23744 - protein, 56 aa, Artificial Sequence; identical to SEQ ID NO: 23741
  Synthetic polypeptide

SEQ ID NO: 23745 - protein, 56 aa, Artificial Sequence; identical to SEQ ID NO: 23741
  Synthetic polypeptide

SEQ ID NO: 23746 - protein, 132 aa, Artificial Sequence
  Synthetic polypeptide
PTRTISLHTCCNCLDTGVMEKLQLGPEILQRENPRLIYARLSGFGQSGSFCRLAGHDINYLALSGGRNSIFKFFSVENSEIESVGSTSRTEHVGWWSTFLYDLQDSRWGIHGCWSNRTPVLRAADQRTWTKV

SEQ ID NO: 23747 - protein, 71 aa, Artificial Sequence
  Synthetic polypeptide
PTRTISLHTCCNCLDTGVMEKLQLGPEILQRENPRLIYARLSGFGQSGSFCRLAGHDINYLALSGGRNSIF

SEQ ID NO: 23748 - protein, 163 aa, Artificial Sequence
  Synthetic polypeptide
PTRTISLHTCCNCLDTGVMEKLQLGPEILQRENPRLIYARLSGFGQSGSFCRLAGHDINYLALSGGRNSIFKFFSVENSEIESVGSTSRTEHVGWWSTFLYDLQDSRWGIHGCWSNRTPVLRAADQRSLIPYFNLYLQFLNISMQNLFKVHTLLRPCYFLGQK

SEQ ID NO: 23749 - protein, 163 aa, Artificial Sequence; identical to SEQ ID NO: 23748
  Synthetic polypeptide

SEQ ID NO: 23750 - protein, 328 aa, Artificial Sequence
  Synthetic polypeptide
PTRTISLHTCCNCLDTGVMEKLQLGPEILQRENPRLIYARLSGFGQSGSFCRLAGHDINYLALSGVLSKIGRSGENPYAPLNLLADFAGGGLMCALGIIMALFDRTRTGKGQVIDANMVEGTAYLSSFLWKTQKLSLWEAPRGQNMLDGGAPFYTTYRTADGEFMAVGAIEPQFYELLIKGLGLKSDELPNQMSMDDWPEMKKKFADVFAEKTKAEWCQIFDGTDACVTPVLTFEEVVHHDHNKERGSFITSEEQDVSPRPAPLLLNTPAIPSFKRDPFIGEHTEEILEEFGFSREEIYQLNSDKIIESNKAGSKFWILYPTHSNIQK

SEQ ID NO: 23751 - protein, 301 aa, Artificial Sequence
  Synthetic polypeptide
PTRTISLHTCCNCLDTGVMEKLQLGPEILQRENPRLIYARLSGFGQSGSFCRLAGHDINYLALSGVLSKIGRSGENPYAPLNLLADFAGGGLMCALGIIMALFDRTRTGKGQVIDANMKLSLWEAPRGQNMLDGGAPFYTTYRTADGEFMAVGAIEPQFYELLIKGLGLKSDELPNQMSMDDWPEMKKKFADVFAEKTKAEWCQIFDGTDACVTPVLTFEEVVHHDHNKERGSFITSEEQDVSPRPAPLLLNTPAIPSFKRDPFIGEHTEEILEEFGFSREEIYQLNSDKIIESNKVKASL

SEQ ID NO: 23752 - protein, 222 aa, Artificial Sequence
  Synthetic polypeptide
PTRTISLHTCCNCLDTGVMEKLQLGPEILQRENPRLIYARLSGFGQSGSFCRLAGHDINYLALSGVLSKIGRSGENPYAPLNLLADFAGGGLMCALGIIMALFDRTRTGKGQVIDANMVEGTAYLSSFLWKTQKLSLWEAPRGQNMLDGGAPFYTTYRTADGEFMAVGAIEPQFYELLIKGLGELILLKIQQEAVSCQARQTLVSVKQWPSLQPKSWGFVWQ

SEQ ID NO: 23753 - protein, 194 aa, Artificial Sequence
  Synthetic polypeptide
PTRTISLHTCCNCLDTGVMEKLQLGPEILQRENPRLIYARLSGFGQSGSFCRLAGHDINYLALSGVLSKIGRSGENPYAPLNLLADFAGGGLMCALGIIMALFDRTRTGKGQVIDANMVEGTAYLSSFLWKTQKLSLWEAPRGQNMLDGGAPFYTTYRTADGEFMAVGAIEPQFYELLIKGCWGMLQFPSQKTK

SEQ ID NO: 23754 - protein, 215 aa, Artificial Sequence
  Synthetic polypeptide
PTRTISLHTCCNCLDTGVMEKLQLGPEILQRENPRLIYARLSGFGQSGSFCRLAGHDINYLALSGGRNSIFKFFSVENSEIESVGSTSRTEHVGWWSTFLYDLQDSRWGIHGCWSNRTPVLRAADQRSGRTDLAENTTGSSIVPGKANPRQCEAMAIVAAQVMGFCVAVTVGGGNGHFELDVFKPMMIKNLCYTQAAGGCFSFLHRKLNSGNPDQ

SEQ ID NO: 23755 - protein, 71 aa, Artificial Sequence
  Synthetic polypeptide
RLPPFRAADAGIHRCHGETPAGPRDSAAGKSKAYLCQAEWIWPVRKLLPVSWPRYQLFGFVRCSLKNWQKW

SEQ ID NO: 23756 - protein, 71 aa, Artificial Sequence; identical to SEQ ID NO: 23755
  Synthetic polypeptide

SEQ ID NO: 23757 - protein, 71 aa, Artificial Sequence; identical to SEQ ID NO: 23755
  Synthetic polypeptide

SEQ ID NO: 23758 - protein, 71 aa, Artificial Sequence; identical to SEQ ID NO: 23755
  Synthetic polypeptide

SEQ ID NO: 23759 - protein, 71 aa, Artificial Sequence; identical to SEQ ID NO: 23755
  Synthetic polypeptide

SEQ ID NO: 23760 - protein, 313 aa, Artificial Sequence
  Synthetic polypeptide
DFPLSERQTLAYTGVMEKLQLGPEILQRENPRLIYARLSGFGQSGSFCRLAGHDINYLALSGVLSKIGRSGENPYAPLNLLADFAGGGLMCALGIIMALFDRTRTGKGQVIDANMVEGTAYLSSFLWKTQKLSLWEAPRGQNMLDGGAPFYTTYRTADGEFMAVGAIEPQFYELLIKGLGLKSDELPNQMSMDDWPEMKKKFADVFAEKTKAEWCQIFDGTDACVTPVLTFEEVVHHDHNKERGSFITSEEQDVSPRPAPLLLNTPAIPSFKRDPFIGEHTEEILEEFGFSREEIYQLNSDKIIESNKVKASL

SEQ ID NO: 23761 - protein, 37 aa, Artificial Sequence
  Synthetic polypeptide
TSPFQSGRRWHTQVSWRNSSWAQRFCSGKIQGLFMPG

SEQ ID NO: 23762 - protein, 37 aa, Artificial Sequence; identical to SEQ ID NO: 23761
  Synthetic polypeptide

SEQ ID NO: 23763 - protein, 37 aa, Artificial Sequence; identical to SEQ ID NO: 23761
  Synthetic polypeptide

SEQ ID NO: 23764 - protein, 37 aa, Artificial Sequence; identical to SEQ ID NO: 23761
  Synthetic polypeptide

SEQ ID NO: 23765 - protein, 37 aa, Artificial Sequence; identical to SEQ ID NO: 23761
  Synthetic polypeptide

SEQ ID NO: 23766 - protein, 37 aa, Artificial Sequence; identical to SEQ ID NO: 23761
  Synthetic polypeptide

SEQ ID NO: 23767 - protein, 37 aa, Artificial Sequence; identical to SEQ ID NO: 23761
  Synthetic polypeptide

SEQ ID NO: 23768 - protein, 37 aa, Artificial Sequence; identical to SEQ ID NO: 23761
  Synthetic polypeptide

SEQ ID NO: 23769 - protein, 37 aa, Artificial Sequence; identical to SEQ ID NO: 23761
  Synthetic polypeptide

SEQ ID NO: 23770 - protein, 37 aa, Artificial Sequence; identical to SEQ ID NO: 23761
  Synthetic polypeptide

SEQ ID NO: 23771 - protein, 68 aa, Artificial Sequence
  Synthetic polypeptide
RLPPFRAADAGIHRCHGETPAGPRDSAAGKSKAYLCQAEWIWPVRKLLPVSWPRYQLFGFVRWKEQHI

SEQ ID NO: 23772 - protein, 68 aa, Artificial Sequence; identical to SEQ ID NO: 23771
  Synthetic polypeptide

SEQ ID NO: 23773 - protein, 68 aa, Artificial Sequence; identical to SEQ ID NO: 23771
  Synthetic polypeptide

SEQ ID NO: 23774 - protein, 68 aa, Artificial Sequence; identical to SEQ ID NO: 23771
  Synthetic polypeptide

SEQ ID NO: 23775 - protein, 68 aa, Artificial Sequence; identical to SEQ ID NO: 23771
  Synthetic polypeptide

SEQ ID NO: 23776 - protein, 129 aa, Artificial Sequence
  Synthetic polypeptide
DFPLSERQTLAYTGVMEKLQLGPEILQRENPRLIYARLSGFGQSGSFCRLAGHDINYLALSGGRNSIFKFFSVENSEIESVGSTSRTEHVGWWSTFLYDLQDSRWGIHGCWSNRTPVLRAADQRTWTKV

SEQ ID NO: 23777 - protein, 68 aa, Artificial Sequence
  Synthetic polypeptide
DFPLSERQTLAYTGVMEKLQLGPEILQRENPRLIYARLSGFGQSGSFCRLAGHDINYLALSGGRNSIF

SEQ ID NO: 23778 - protein, 160 aa, Artificial Sequence
  Synthetic polypeptide
DFPLSERQTLAYTGVMEKLQLGPEILQRENPRLIYARLSGFGQSGSFCRLAGHDINYLALSGGRNSIFKFFSVENSEIESVGSTSRTEHVGWWSTFLYDLQDSRWGIHGCWSNRTPVLRAADQRSLIPYFNLYLQFLNISMQNLFKVHTLLRPCYFLGQK

SEQ ID NO: 23779 - protein, 160 aa, Artificial Sequence; identical to SEQ ID NO: 23778
  Synthetic polypeptide

SEQ ID NO: 23780 - protein, 325 aa, Artificial Sequence
  Synthetic polypeptide
DFPLSERQTLAYTGVMEKLQLGPEILQRENPRLIYARLSGFGQSGSFCRLAGHDINYLALSGVLSKIGRSGENPYAPLNLLADFAGGGLMCALGIIMALFDRTRTGKGQVIDANMVEGTAYLSSFLWKTQKLSLWEAPRGQNMLDGGAPFYTTYRTADGEFMAVGAIEPQFYELLIKGLGLKSDELPNQMSMDDWPEMKKKFADVFAEKTKAEWCQIFDGTDACVTPVLTFEEVVHHDHNKERGSFITSEEQDVSPRPAPLLLNTPAIPSFKRDPFIGEHTEEILEEFGFSREEIYQLNSDKIIESNKAGSKFWILYPTHSNIQK

SEQ ID NO: 23781 - protein, 298 aa, Artificial Sequence
  Synthetic polypeptide
DFPLSERQTLAYTGVMEKLQLGPEILQRENPRLIYARLSGFGQSGSFCRLAGHDINYLALSGVLSKIGRSGENPYAPLNLLADFAGGGLMCALGIIMALFDRTRTGKGQVIDANMKLSLWEAPRGQNMLDGGAPFYTTYRTADGEFMAVGAIEPQFYELLIKGLGLKSDELPNQMSMDDWPEMKKKFADVFAEKTKAEWCQIFDGTDACVTPVLTFEEVVHHDHNKERGSFITSEEQDVSPRPAPLLLNTPAIPSFKRDPFIGEHTEEILEEFGFSREEIYQLNSDKIIESNKVKASL

SEQ ID NO: 23782 - protein, 219 aa, Artificial Sequence
  Synthetic polypeptide
DFPLSERQTLAYTGVMEKLQLGPEILQRENPRLIYARLSGFGQSGSFCRLAGHDINYLALSGVLSKIGRSGENPYAPLNLLADFAGGGLMCALGIIMALFDRTRTGKGQVIDANMVEGTAYLSSFLWKTQKLSLWEAPRGQNMLDGGAPFYTTYRTADGEFMAVGAIEPQFYELLIKGLGELILLKIQQEAVSCQARQTLVSVKQWPSLQPKSWGFVWQ

SEQ ID NO: 23783 - protein, 191 aa, Artificial Sequence
  Synthetic polypeptide
DFPLSERQTLAYTGVMEKLQLGPEILQRENPRLIYARLSGFGQSGSFCRLAGHDINYLALSGVLSKIGRSGENPYAPLNLLADFAGGGLMCALGIIMALFDRTRTGKGQVIDANMVEGTAYLSSFLWKTQKLSLWEAPRGQNMLDGGAPFYTTYRTADGEFMAVGAIEPQFYELLIKGCWGMLQFPSQKTK

SEQ ID NO: 23784 - protein, 212 aa, Artificial Sequence
  Synthetic polypeptide
DFPLSERQTLAYTGVMEKLQLGPEILQRENPRLIYARLSGFGQSGSFCRLAGHDINYLALSGGRNSIFKFFSVENSEIESVGSTSRTEHVGWWSTFLYDLQDSRWGIHGCWSNRTPVLRAADQRSGRTDLAENTTGSSIVPGKANPRQCEAMAIVAAQVMGFCVAVTVGGGNGHFELDVFKPMMIKNLCYTQAAGGCFSFLHRKLNSGNPDQ

SEQ ID NO: 23785 - protein, 37 aa, Artificial Sequence
  Synthetic polypeptide
CHPWWPSCKILLFVSWRNSSWAQRFCSGKIQGLFMPG

SEQ ID NO: 23786 - protein, 37 aa, Artificial Sequence; identical to SEQ ID NO: 23785
  Synthetic polypeptide

SEQ ID NO: 23787 - protein, 37 aa, Artificial Sequence; identical to SEQ ID NO: 23785
  Synthetic polypeptide

SEQ ID NO: 23788 - protein, 37 aa, Artificial Sequence; identical to SEQ ID NO: 23785
  Synthetic polypeptide

SEQ ID NO: 23789 - protein, 37 aa, Artificial Sequence; identical to SEQ ID NO: 23785
  Synthetic polypeptide

SEQ ID NO: 23790 - protein, 37 aa, Artificial Sequence; identical to SEQ ID NO: 23785
  Synthetic polypeptide

SEQ ID NO: 23791 - protein, 37 aa, Artificial Sequence; identical to SEQ ID NO: 23785
  Synthetic polypeptide

SEQ ID NO: 23792 - protein, 37 aa, Artificial Sequence; identical to SEQ ID NO: 23785
  Synthetic polypeptide

SEQ ID NO: 23793 - protein, 37 aa, Artificial Sequence; identical to SEQ ID NO: 23785
  Synthetic polypeptide

SEQ ID NO: 23794 - protein, 37 aa, Artificial Sequence; identical to SEQ ID NO: 23785
  Synthetic polypeptide

SEQ ID NO: 23795 - protein, 88 aa, Artificial Sequence
  Synthetic polypeptide
KLAGFAAQVGITDLPICDVTPGGPAVKFFSLCHGETPAGPRDSAAGKSKAYLCQAEWIWPVRKLLPVSWPRYQLFGFVRCSLKNWQKW

SEQ ID NO: 23796 - protein, 88 aa, Artificial Sequence; identical to SEQ ID NO: 23795
  Synthetic polypeptide

SEQ ID NO: 23797 - protein, 88 aa, Artificial Sequence; identical to SEQ ID NO: 23795
  Synthetic polypeptide

SEQ ID NO: 23798 - protein, 88 aa, Artificial Sequence; identical to SEQ ID NO: 23795
  Synthetic polypeptide

SEQ ID NO: 23799 - protein, 88 aa, Artificial Sequence; identical to SEQ ID NO: 23795
  Synthetic polypeptide

SEQ ID NO: 23800 - protein, 304 aa, Artificial Sequence
  Synthetic polypeptide
NSSLCVMEKLQLGPEILQRENPRLIYARLSGFGQSGSFCRLAGHDINYLALSGVLSKIGRSGENPYAPLNLLADFAGGGLMCALGIIMALFDRTRTGKGQVIDANMVEGTAYLSSFLWKTQKLSLWEAPRGQNMLDGGAPFYTTYRTADGEFMAVGAIEPQFYELLIKGLGLKSDELPNQMSMDDWPEMKKKFADVFAEKTKAEWCQIFDGTDACVTPVLTFEEVVHHDHNKERGSFITSEEQDVSPRPAPLLLNTPAIPSFKRDPFIGEHTEEILEEFGFSREEIYQLNSDKIIESNKVKASL

SEQ ID NO: 23801 - protein, 85 aa, Artificial Sequence
  Synthetic polypeptide
KLAGFAAQVGITDLPICDVTPGGPAVKFFSLCHGETPAGPRDSAAGKSKAYLCQAEWIWPVRKLLPVSWPRYQLFGFVRWKEQHI

SEQ ID NO: 23802 - protein, 85 aa, Artificial Sequence; identical to SEQ ID NO: 23801
  Synthetic polypeptide

SEQ ID NO: 23803 - protein, 85 aa, Artificial Sequence; identical to SEQ ID NO: 23801
  Synthetic polypeptide

SEQ ID NO: 23804 - protein, 85 aa, Artificial Sequence; identical to SEQ ID NO: 23801
  Synthetic polypeptide

SEQ ID NO: 23805 - protein, 85 aa, Artificial Sequence; identical to SEQ ID NO: 23801
  Synthetic polypeptide

SEQ ID NO: 23806 - protein, 120 aa, Artificial Sequence
  Synthetic polypeptide
NSSLCVMEKLQLGPEILQRENPRLIYARLSGFGQSGSFCRLAGHDINYLALSGGRNSIFKFFSVENSEIESVGSTSRTEHVGWWSTFLYDLQDSRWGIHGCWSNRTPVLRAADQRTWTKV

SEQ ID NO: 23807 - protein, 59 aa, Artificial Sequence
  Synthetic polypeptide
NSSLCVMEKLQLGPEILQRENPRLIYARLSGFGQSGSFCRLAGHDINYLALSGGRNSIF

SEQ ID NO: 23808 - protein, 151 aa, Artificial Sequence
  Synthetic polypeptide
NSSLCVMEKLQLGPEILQRENPRLIYARLSGFGQSGSFCRLAGHDINYLALSGGRNSIFKFFSVENSEIESVGSTSRTEHVGWWSTFLYDLQDSRWGIHGCWSNRTPVLRAADQRSLIPYFNLYLQFLNISMQNLFKVHTLLRPCYFLGQK

SEQ ID NO: 23809 - protein, 151 aa, Artificial Sequence; identical to SEQ ID NO: 23808
  Synthetic polypeptide

SEQ ID NO: 23810 - protein, 316 aa, Artificial Sequence
  Synthetic polypeptide
NSSLCVMEKLQLGPEILQRENPRLIYARLSGFGQSGSFCRLAGHDINYLALSGVLSKIGRSGENPYAPLNLLADFAGGGLMCALGIIMALFDRTRTGKGQVIDANMVEGTAYLSSFLWKTQKLSLWEAPRGQNMLDGGAPFYTTYRTADGEFMAVGAIEPQFYELLIKGLGLKSDELPNQMSMDDWPEMKKKFADVFAEKTKAEWCQIFDGTDACVTPVLTFEEVVHHDHNKERGSFITSEEQDVSPRPAPLLLNTPAIPSFKRDPFIGEHTEEILEEFGFSREEIYQLNSDKIIESNKAGSKFWILYPTHSNIQK

SEQ ID NO: 23811 - protein, 289 aa, Artificial Sequence
  Synthetic polypeptide
NSSLCVMEKLQLGPEILQRENPRLIYARLSGFGQSGSFCRLAGHDINYLALSGVLSKIGRSGENPYAPLNLLADFAGGGLMCALGIIMALFDRTRTGKGQVIDANMKLSLWEAPRGQNMLDGGAPFYTTYRTADGEFMAVGAIEPQFYELLIKGLGLKSDELPNQMSMDDWPEMKKKFADVFAEKTKAEWCQIFDGTDACVTPVLTFEEVVHHDHNKERGSFITSEEQDVSPRPAPLLLNTPAIPSFKRDPFIGEHTEEILEEFGFSREEIYQLNSDKIIESNKVKASL

SEQ ID NO: 23812 - protein, 210 aa, Artificial Sequence
  Synthetic polypeptide
NSSLCVMEKLQLGPEILQRENPRLIYARLSGFGQSGSFCRLAGHDINYLALSGVLSKIGRSGENPYAPLNLLADFAGGGLMCALGIIMALFDRTRTGKGQVIDANMVEGTAYLSSFLWKTQKLSLWEAPRGQNMLDGGAPFYTTYRTADGEFMAVGAIEPQFYELLIKGLGELILLKIQQEAVSCQARQTLVSVKQWPSLQPKSWGFVWQ

SEQ ID NO: 23813 - protein, 182 aa, Artificial Sequence
  Synthetic polypeptide
NSSLCVMEKLQLGPEILQRENPRLIYARLSGFGQSGSFCRLAGHDINYLALSGVLSKIGRSGENPYAPLNLLADFAGGGLMCALGIIMALFDRTRTGKGQVIDANMVEGTAYLSSFLWKTQKLSLWEAPRGQNMLDGGAPFYTTYRTADGEFMAVGAIEPQFYELLIKGCWGMLQFPSQKTK

SEQ ID NO: 23814 - protein, 203 aa, Artificial Sequence
  Synthetic polypeptide
NSSLCVMEKLQLGPEILQRENPRLIYARLSGFGQSGSFCRLAGHDINYLALSGGRNSIFKFFSVENSEIESVGSTSRTEHVGWWSTFLYDLQDSRWGIHGCWSNRTPVLRAADQRSGRTDLAENTTGSSIVPGKANPRQCEAMAIVAAQVMGFCVAVTVGGGNGHFELDVFKPMMIKNLCYTQAAGGCFSFLHRKLNSGNPDQ

SEQ ID NO: 23815 - protein, 307 aa, Artificial Sequence
  Synthetic polypeptide
CHPWWPSCVMEKLQLGPEILQRENPRLIYARLSGFGQSGSFCRLAGHDINYLALSGVLSKIGRSGENPYAPLNLLADFAGGGLMCALGIIMALFDRTRTGKGQVIDANMVEGTAYLSSFLWKTQKLSLWEAPRGQNMLDGGAPFYTTYRTADGEFMAVGAIEPQFYELLIKGLGLKSDELPNQMSMDDWPEMKKKFADVFAEKTKAEWCQIFDGTDACVTPVLTFEEVVHHDHNKERGSFITSEEQDVSPRPAPLLLNTPAIPSFKRDPFIGEHTEEILEEFGFSREEIYQLNSDKIIESNKVKASL

SEQ ID NO: 23816 - protein, 49 aa, Artificial Sequence
  Synthetic polypeptide
KLAGFAAQVGITDLPICDVTPGGPAVSWRNSSWAQRFCSGKIQGLFMPG

SEQ ID NO: 23817 - protein, 49 aa, Artificial Sequence; identical to SEQ ID NO: 23816
  Synthetic polypeptide

SEQ ID NO: 23818 - protein, 49 aa, Artificial Sequence; identical to SEQ ID NO: 23816
  Synthetic polypeptide

SEQ ID NO: 23819 - protein, 49 aa, Artificial Sequence; identical to SEQ ID NO: 23816
  Synthetic polypeptide

SEQ ID NO: 23820 - protein, 49 aa, Artificial Sequence; identical to SEQ ID NO: 23816
  Synthetic polypeptide

SEQ ID NO: 23821 - protein, 49 aa, Artificial Sequence; identical to SEQ ID NO: 23816
  Synthetic polypeptide

SEQ ID NO: 23822 - protein, 49 aa, Artificial Sequence; identical to SEQ ID NO: 23816
  Synthetic polypeptide

SEQ ID NO: 23823 - protein, 49 aa, Artificial Sequence; identical to SEQ ID NO: 23816
  Synthetic polypeptide

SEQ ID NO: 23824 - protein, 49 aa, Artificial Sequence; identical to SEQ ID NO: 23816
  Synthetic polypeptide

SEQ ID NO: 23825 - protein, 49 aa, Artificial Sequence; identical to SEQ ID NO: 23816
  Synthetic polypeptide

SEQ ID NO: 23826 - protein, 92 aa, Artificial Sequence
  Synthetic polypeptide
TSSPFEILNKNLLVLRLRWASRTYQYVMSPLVAQLCHGETPAGPRDSAAGKSKAYLCQAEWIWPVRKLLPVSWPRYQLFGFVRCSLKNWQKW

SEQ ID NO: 23827 - protein, 92 aa, Artificial Sequence; identical to SEQ ID NO: 23826
  Synthetic polypeptide

SEQ ID NO: 23828 - protein, 92 aa, Artificial Sequence; identical to SEQ ID NO: 23826
  Synthetic polypeptide

SEQ ID NO: 23829 - protein, 92 aa, Artificial Sequence; identical to SEQ ID NO: 23826
  Synthetic polypeptide

SEQ ID NO: 23830 - protein, 92 aa, Artificial Sequence; identical to SEQ ID NO: 23826
  Synthetic polypeptide

SEQ ID NO: 23831 - protein, 123 aa, Artificial Sequence
  Synthetic polypeptide
CHPWWPSCVMEKLQLGPEILQRENPRLIYARLSGFGQSGSFCRLAGHDINYLALSGGRNSIFKFFSVENSEIESVGSTSRTEHVGWWSTFLYDLQDSRWGIHGCWSNRTPVLRAADQRTWTKV

SEQ ID NO: 23832 - protein, 89 aa, Artificial Sequence
  Synthetic polypeptide
TSSPFEILNKNLLVLRLRWASRTYQYVMSPLVAQLCHGETPAGPRDSAAGKSKAYLCQAEWIWPVRKLLPVSWPRYQLFGFVRWKEQHI

SEQ ID NO: 23833 - protein, 89 aa, Artificial Sequence; identical to SEQ ID NO: 23832
  Synthetic polypeptide

SEQ ID NO: 23834 - protein, 89 aa, Artificial Sequence; identical to SEQ ID NO: 23832
  Synthetic polypeptide

SEQ ID NO: 23835 - protein, 89 aa, Artificial Sequence; identical to SEQ ID NO: 23832
  Synthetic polypeptide

SEQ ID NO: 23836 - protein, 89 aa, Artificial Sequence; identical to SEQ ID NO: 23832
  Synthetic polypeptide

SEQ ID NO: 23837 - protein, 62 aa, Artificial Sequence
  Synthetic polypeptide
CHPWWPSCVMEKLQLGPEILQRENPRLIYARLSGFGQSGSFCRLAGHDINYLALSGGRNSIF

SEQ ID NO: 23838 - protein, 154 aa, Artificial Sequence
  Synthetic polypeptide
CHPWWPSCVMEKLQLGPEILQRENPRLIYARLSGFGQSGSFCRLAGHDINYLALSGGRNSIFKFFSVENSEIESVGSTSRTEHVGWWSTFLYDLQDSRWGIHGCWSNRTPVLRAADQRSLIPYFNLYLQFLNISMQNLFKVHTLLRPCYFLGQK

SEQ ID NO: 23839 - protein, 154 aa, Artificial Sequence; identical to SEQ ID NO: 23838
  Synthetic polypeptide

SEQ ID NO: 23840 - protein, 319 aa, Artificial Sequence
  Synthetic polypeptide
CHPWWPSCVMEKLQLGPEILQRENPRLIYARLSGFGQSGSFCRLAGHDINYLALSGVLSKIGRSGENPYAPLNLLADFAGGGLMCALGIIMALFDRTRTGKGQVIDANMVEGTAYLSSFLWKTQKLSLWEAPRGQNMLDGGAPFYTTYRTADGEFMAVGAIEPQFYELLIKGLGLKSDELPNQMSMDDWPEMKKKFADVFAEKTKAEWCQIFDGTDACVTPVLTFEEVVHHDHNKERGSFITSEEQDVSPRPAPLLLNTPAIPSFKRDPFIGEHTEEILEEFGFSREEIYQLNSDKIIESNKAGSKFWILYPTHSNIQK

SEQ ID NO: 23841 - protein, 292 aa, Artificial Sequence
  Synthetic polypeptide
CHPWWPSCVMEKLQLGPEILQRENPRLIYARLSGFGQSGSFCRLAGHDINYLALSGVLSKIGRSGENPYAPLNLLADFAGGGLMCALGIIMALFDRTRTGKGQVIDANMKLSLWEAPRGQNMLDGGAPFYTTYRTADGEFMAVGAIEPQFYELLIKGLGLKSDELPNQMSMDDWPEMKKKFADVFAEKTKAEWCQIFDGTDACVTPVLTFEEVVHHDHNKERGSFITSEEQDVSPRPAPLLLNTPAIPSFKRDPFIGEHTEEILEEFGFSREEIYQLNSDKIIESNKVKASL

SEQ ID NO: 23842 - protein, 213 aa, Artificial Sequence
  Synthetic polypeptide
CHPWWPSCVMEKLQLGPEILQRENPRLIYARLSGFGQSGSFCRLAGHDINYLALSGVLSKIGRSGENPYAPLNLLADFAGGGLMCALGIIMALFDRTRTGKGQVIDANMVEGTAYLSSFLWKTQKLSLWEAPRGQNMLDGGAPFYTTYRTADGEFMAVGAIEPQFYELLIKGLGELILLKIQQEAVSCQARQTLVSVKQWPSLQPKSWGFVWQ

SEQ ID NO: 23843 - protein, 185 aa, Artificial Sequence
  Synthetic polypeptide
CHPWWPSCVMEKLQLGPEILQRENPRLIYARLSGFGQSGSFCRLAGHDINYLALSGVLSKIGRSGENPYAPLNLLADFAGGGLMCALGIIMALFDRTRTGKGQVIDANMVEGTAYLSSFLWKTQKLSLWEAPRGQNMLDGGAPFYTTYRTADGEFMAVGAIEPQFYELLIKGCWGMLQFPSQKTK

SEQ ID NO: 23844 - protein, 206 aa, Artificial Sequence
  Synthetic polypeptide
CHPWWPSCVMEKLQLGPEILQRENPRLIYARLSGFGQSGSFCRLAGHDINYLALSGGRNSIFKFFSVENSEIESVGSTSRTEHVGWWSTFLYDLQDSRWGIHGCWSNRTPVLRAADQRSGRTDLAENTTGSSIVPGKANPRQCEAMAIVAAQVMGFCVAVTVGGGNGHFELDVFKPMMIKNLCYTQAAGGCFSFLHRKLNSGNPDQ

SEQ ID NO: 23845 - protein, 61 aa, Artificial Sequence
  Synthetic polypeptide
CHPWCHGETPAGPRDSAAGKSKAYLCQAEWIWPVRKLLPVSWPRYQLFGFVRCSLKNWQKW

SEQ ID NO: 23846 - protein, 61 aa, Artificial Sequence; identical to SEQ ID NO: 23845
  Synthetic polypeptide

SEQ ID NO: 23847 - protein, 61 aa, Artificial Sequence; identical to SEQ ID NO: 23845
  Synthetic polypeptide

SEQ ID NO: 23848 - protein, 61 aa, Artificial Sequence; identical to SEQ ID NO: 23845
  Synthetic polypeptide

SEQ ID NO: 23849 - protein, 61 aa, Artificial Sequence; identical to SEQ ID NO: 23845
  Synthetic polypeptide

SEQ ID NO: 23850 - protein, 321 aa, Artificial Sequence
  Synthetic polypeptide
KLAGFAAQVGITDLPICDVTPGVMEKLQLGPEILQRENPRLIYARLSGFGQSGSFCRLAGHDINYLALSGVLSKIGRSGENPYAPLNLLADFAGGGLMCALGIIMALFDRTRTGKGQVIDANMVEGTAYLSSFLWKTQKLSLWEAPRGQNMLDGGAPFYTTYRTADGEFMAVGAIEPQFYELLIKGLGLKSDELPNQMSMDDWPEMKKKFADVFAEKTKAEWCQIFDGTDACVTPVLTFEEVVHHDHNKERGSFITSEEQDVSPRPAPLLLNTPAIPSFKRDPFIGEHTEEILEEFGFSREEIYQLNSDKIIESNKVKASL

SEQ ID NO: 23851 - protein, 55 aa, Artificial Sequence
  Synthetic polypeptide
TSSPFEILNKNLLVLRLRWASRTYQYVMSPLVSWRNSSWAQRFCSGKIQGLFMPG

SEQ ID NO: 23852 - protein, 55 aa, Artificial Sequence; identical to SEQ ID NO: 23851
  Synthetic polypeptide

SEQ ID NO: 23853 - protein, 55 aa, Artificial Sequence; identical to SEQ ID NO: 23851
  Synthetic polypeptide

SEQ ID NO: 23854 - protein, 55 aa, Artificial Sequence; identical to SEQ ID NO: 23851
  Synthetic polypeptide

SEQ ID NO: 23855 - protein, 55 aa, Artificial Sequence; identical to SEQ ID NO: 23851
  Synthetic polypeptide

SEQ ID NO: 23856 - protein, 55 aa, Artificial Sequence; identical to SEQ ID NO: 23851
  Synthetic polypeptide

SEQ ID NO: 23857 - protein, 55 aa, Artificial Sequence; identical to SEQ ID NO: 23851
  Synthetic polypeptide

SEQ ID NO: 23858 - protein, 55 aa, Artificial Sequence; identical to SEQ ID NO: 23851
  Synthetic polypeptide

SEQ ID NO: 23859 - protein, 55 aa, Artificial Sequence; identical to SEQ ID NO: 23851
  Synthetic polypeptide

SEQ ID NO: 23860 - protein, 55 aa, Artificial Sequence; identical to SEQ ID NO: 23851
  Synthetic polypeptide

SEQ ID NO: 23861 - protein, 58 aa, Artificial Sequence
  Synthetic polypeptide
CHPWCHGETPAGPRDSAAGKSKAYLCQAEWIWPVRKLLPVSWPRYQLFGFVRWKEQHI

SEQ ID NO: 23862 - protein, 58 aa, Artificial Sequence; identical to SEQ ID NO: 23861
  Synthetic polypeptide

SEQ ID NO: 23863 - protein, 58 aa, Artificial Sequence; identical to SEQ ID NO: 23861
  Synthetic polypeptide

SEQ ID NO: 23864 - protein, 58 aa, Artificial Sequence; identical to SEQ ID NO: 23861
  Synthetic polypeptide

SEQ ID NO: 23865 - protein, 58 aa, Artificial Sequence; identical to SEQ ID NO: 23861
  Synthetic polypeptide

SEQ ID NO: 23866 - protein, 137 aa, Artificial Sequence
  Synthetic polypeptide
KLAGFAAQVGITDLPICDVTPGVMEKLQLGPEILQRENPRLIYARLSGFGQSGSFCRLAGHDINYLALSGGRNSIFKFFSVENSEIESVGSTSRTEHVGWWSTFLYDLQDSRWGIHGCWSNRTPVLRAADQRTWTKV

SEQ ID NO: 23867 - protein, 76 aa, Artificial Sequence
  Synthetic polypeptide
KLAGFAAQVGITDLPICDVTPGVMEKLQLGPEILQRENPRLIYARLSGFGQSGSFCRLAGHDINYLALSGGRNSIF

SEQ ID NO: 23868 - protein, 168 aa, Artificial Sequence
  Synthetic polypeptide
KLAGFAAQVGITDLPICDVTPGVMEKLQLGPEILQRENPRLIYARLSGFGQSGSFCRLAGHDINYLALSGGRNSIFKFFSVENSEIESVGSTSRTEHVGWWSTFLYDLQDSRWGIHGCWSNRTPVLRAADQRSLIPYFNLYLQFLNISMQNLFKVHTLLRPCYFLGQK

SEQ ID NO: 23869 - protein, 168 aa, Artificial Sequence; identical to SEQ ID NO: 23868
  Synthetic polypeptide

SEQ ID NO: 23870 - protein, 333 aa, Artificial Sequence
  Synthetic polypeptide
KLAGFAAQVGITDLPICDVTPGVMEKLQLGPEILQRENPRLIYARLSGFGQSGSFCRLAGHDINYLALSGVLSKIGRSGENPYAPLNLLADFAGGGLMCALGIIMALFDRTRTGKGQVIDANMVEGTAYLSSFLWKTQKLSLWEAPRGQNMLDGGAPFYTTYRTADGEFMAVGAIEPQFYELLIKGLGLKSDELPNQMSMDDWPEMKKKFADVFAEKTKAEWCQIFDGTDACVTPVLTFEEVVHHDHNKERGSFITSEEQDVSPRPAPLLLNTPAIPSFKRDPFIGEHTEEILEEFGFSREEIYQLNSDKIIESNKAGSKFWILYPTHSNIQK

SEQ ID NO: 23871 - protein, 306 aa, Artificial Sequence
  Synthetic polypeptide
KLAGFAAQVGITDLPICDVTPGVMEKLQLGPEILQRENPRLIYARLSGFGQSGSFCRLAGHDINYLALSGVLSKIGRSGENPYAPLNLLADFAGGGLMCALGIIMALFDRTRTGKGQVIDANMKLSLWEAPRGQNMLDGGAPFYTTYRTADGEFMAVGAIEPQFYELLIKGLGLKSDELPNQMSMDDWPEMKKKFADVFAEKTKAEWCQIFDGTDACVTPVLTFEEVVHHDHNKERGSFITSEEQDVSPRPAPLLLNTPAIPSFKRDPFIGEHTEEILEEFGFSREEIYQLNSDKIIESNKVKASL

SEQ ID NO: 23872 - protein, 227 aa, Artificial Sequence
  Synthetic polypeptide
KLAGFAAQVGITDLPICDVTPGVMEKLQLGPEILQRENPRLIYARLSGFGQSGSFCRLAGHDINYLALSGVLSKIGRSGENPYAPLNLLADFAGGGLMCALGIIMALFDRTRTGKGQVIDANMVEGTAYLSSFLWKTQKLSLWEAPRGQNMLDGGAPFYTTYRTADGEFMAVGAIEPQFYELLIKGLGELILLKIQQEAVSCQARQTLVSVKQWPSLQPKSWGFVWQ

SEQ ID NO: 23873 - protein, 199 aa, Artificial Sequence
  Synthetic polypeptide
KLAGFAAQVGITDLPICDVTPGVMEKLQLGPEILQRENPRLIYARLSGFGQSGSFCRLAGHDINYLALSGVLSKIGRSGENPYAPLNLLADFAGGGLMCALGIIMALFDRTRTGKGQVIDANMVEGTAYLSSFLWKTQKLSLWEAPRGQNMLDGGAPFYTTYRTADGEFMAVGAIEPQFYELLIKGCWGMLQFPSQKTK

SEQ ID NO: 23874 - protein, 220 aa, Artificial Sequence
  Synthetic polypeptide
KLAGFAAQVGITDLPICDVTPGVMEKLQLGPEILQRENPRLIYARLSGFGQSGSFCRLAGHDINYLALSGGRNSIFKFFSVENSEIESVGSTSRTEHVGWWSTFLYDLQDSRWGIHGCWSNRTPVLRAADQRSGRTDLAENTTGSSIVPGKANPRQCEAMAIVAAQVMGFCVAVTVGGGNGHFELDVFKPMMIKNLCYTQAAGGCFSFLHRKLNSGNPDQ

SEQ ID NO: 23875 - protein, 347 aa, Artificial Sequence
  Synthetic polypeptide
SLLASEACDLCSSCLPFEACDLCDLLPVLKPPPLLKSLIKTCWFCGSGVMEKLQLGPEILQRENPRLIYARLSGFGQSGSFCRLAGHDINYLALSGVLSKIGRSGENPYAPLNLLADFAGGGLMCALGIIMALFDRTRTGKGQVIDANMVEGTAYLSSFLWKTQKLSLWEAPRGQNMLDGGAPFYTTYRTADGEFMAVGAIEPQFYELLIKGLGLKSDELPNQMSMDDWPEMKKKFADVFAEKTKAEWCQIFDGTDACVTPVLTFEEVVHHDHNKERGSFITSEEQDVSPRPAPLLLNTPAIPSFKRDPFIGEHTEEILEEFGFSREEIYQLNSDKIIESNKVKASL

SEQ ID NO: 23876 - protein, 32 aa, Artificial Sequence
  Synthetic polypeptide
KLAGFAAQVSWRNSSWAQRFCSGKIQGLFMPG

SEQ ID NO: 23877 - protein, 32 aa, Artificial Sequence; identical to SEQ ID NO: 23876
  Synthetic polypeptide

SEQ ID NO: 23878 - protein, 32 aa, Artificial Sequence; identical to SEQ ID NO: 23876
  Synthetic polypeptide

SEQ ID NO: 23879 - protein, 32 aa, Artificial Sequence; identical to SEQ ID NO: 23876
  Synthetic polypeptide

SEQ ID NO: 23880 - protein, 32 aa, Artificial Sequence; identical to SEQ ID NO: 23876
  Synthetic polypeptide

SEQ ID NO: 23881 - protein, 32 aa, Artificial Sequence; identical to SEQ ID NO: 23876
  Synthetic polypeptide

SEQ ID NO: 23882 - protein, 32 aa, Artificial Sequence; identical to SEQ ID NO: 23876
  Synthetic polypeptide

SEQ ID NO: 23883 - protein, 32 aa, Artificial Sequence; identical to SEQ ID NO: 23876
  Synthetic polypeptide

SEQ ID NO: 23884 - protein, 32 aa, Artificial Sequence; identical to SEQ ID NO: 23876
  Synthetic polypeptide

SEQ ID NO: 23885 - protein, 32 aa, Artificial Sequence; identical to SEQ ID NO: 23876
  Synthetic polypeptide

SEQ ID NO: 23886 - protein, 75 aa, Artificial Sequence
  Synthetic polypeptide
TSSPFEILNKNLLVLRLRCHGETPAGPRDSAAGKSKAYLCQAEWIWPVRKLLPVSWPRYQLFGFVRCSLKNWQKW

SEQ ID NO: 23887 - protein, 75 aa, Artificial Sequence; identical to SEQ ID NO: 23886
  Synthetic polypeptide

SEQ ID NO: 23888 - protein, 75 aa, Artificial Sequence; identical to SEQ ID NO: 23886
  Synthetic polypeptide

SEQ ID NO: 23889 - protein, 75 aa, Artificial Sequence; identical to SEQ ID NO: 23886
  Synthetic polypeptide

SEQ ID NO: 23890 - protein, 75 aa, Artificial Sequence; identical to SEQ ID NO: 23886
  Synthetic polypeptide

SEQ ID NO: 23891 - protein, 163 aa, Artificial Sequence
  Synthetic polypeptide
SLLASEACDLCSSCLPFEACDLCDLLPVLKPPPLLKSLIKTCWFCGSGVMEKLQLGPEILQRENPRLIYARLSGFGQSGSFCRLAGHDINYLALSGGRNSIFKFFSVENSEIESVGSTSRTEHVGWWSTFLYDLQDSRWGIHGCWSNRTPVLRAADQRTWTKV

SEQ ID NO: 23892 - protein, 72 aa, Artificial Sequence
  Synthetic polypeptide
TSSPFEILNKNLLVLRLRCHGETPAGPRDSAAGKSKAYLCQAEWIWPVRKLLPVSWPRYQLFGFVRWKEQHI

SEQ ID NO: 23893 - protein, 72 aa, Artificial Sequence; identical to SEQ ID NO: 23892
  Synthetic polypeptide

SEQ ID NO: 23894 - protein, 72 aa, Artificial Sequence; identical to SEQ ID NO: 23892
  Synthetic polypeptide

SEQ ID NO: 23895 - protein, 72 aa, Artificial Sequence; identical to SEQ ID NO: 23892
  Synthetic polypeptide

SEQ ID NO: 23896 - protein, 72 aa, Artificial Sequence; identical to SEQ ID NO: 23892
  Synthetic polypeptide

SEQ ID NO: 23897 - protein, 102 aa, Artificial Sequence
  Synthetic polypeptide
SLLASEACDLCSSCLPFEACDLCDLLPVLKPPPLLKSLIKTCWFCGSGVMEKLQLGPEILQRENPRLIYARLSGFGQSGSFCRLAGHDINYLALSGGRNSIF

SEQ ID NO: 23898 - protein, 194 aa, Artificial Sequence
  Synthetic polypeptide
SLLASEACDLCSSCLPFEACDLCDLLPVLKPPPLLKSLIKTCWFCGSGVMEKLQLGPEILQRENPRLIYARLSGFGQSGSFCRLAGHDINYLALSGGRNSIFKFFSVENSEIESVGSTSRTEHVGWWSTFLYDLQDSRWGIHGCWSNRTPVLRAADQRSLIPYFNLYLQFLNISMQNLFKVHTLLRPCYFLGQK

SEQ ID NO: 23899 - protein, 194 aa, Artificial Sequence; identical to SEQ ID NO: 23898
  Synthetic polypeptide

SEQ ID NO: 23900 - protein, 359 aa, Artificial Sequence
  Synthetic polypeptide
SLLASEACDLCSSCLPFEACDLCDLLPVLKPPPLLKSLIKTCWFCGSGVMEKLQLGPEILQRENPRLIYARLSGFGQSGSFCRLAGHDINYLALSGVLSKIGRSGENPYAPLNLLADFAGGGLMCALGIIMALFDRTRTGKGQVIDANMVEGTAYLSSFLWKTQKLSLWEAPRGQNMLDGGAPFYTTYRTADGEFMAVGAIEPQFYELLIKGLGLKSDELPNQMSMDDWPEMKKKFADVFAEKTKAEWCQIFDGTDACVTPVLTFEEVVHHDHNKERGSFITSEEQDVSPRPAPLLLNTPAIPSFKRDPFIGEHTEEILEEFGFSREEIYQLNSDKIIESNKAGSKFWILYPTHSNIQK

SEQ ID NO: 23901 - protein, 332 aa, Artificial Sequence
  Synthetic polypeptide
SLLASEACDLCSSCLPFEACDLCDLLPVLKPPPLLKSLIKTCWFCGSGVMEKLQLGPEILQRENPRLIYARLSGFGQSGSFCRLAGHDINYLALSGVLSKIGRSGENPYAPLNLLADFAGGGLMCALGIIMALFDRTRTGKGQVIDANMKLSLWEAPRGQNMLDGGAPFYTTYRTADGEFMAVGAIEPQFYELLIKGLGLKSDELPNQMSMDDWPEMKKKFADVFAEKTKAEWCQIFDGTDACVTPVLTFEEVVHHDHNKERGSFITSEEQDVSPRPAPLLLNTPAIPSFKRDPFIGEHTEEILEEFGFSREEIYQLNSDKIIESNKVKASL

SEQ ID NO: 23902 - protein, 253 aa, Artificial Sequence
  Synthetic polypeptide
SLLASEACDLCSSCLPFEACDLCDLLPVLKPPPLLKSLIKTCWFCGSGVMEKLQLGPEILQRENPRLIYARLSGFGQSGSFCRLAGHDINYLALSGVLSKIGRSGENPYAPLNLLADFAGGGLMCALGIIMALFDRTRTGKGQVIDANMVEGTAYLSSFLWKTQKLSLWEAPRGQNMLDGGAPFYTTYRTADGEFMAVGAIEPQFYELLIKGLGELILLKIQQEAVSCQARQTLVSVKQWPSLQPKSWGFVWQ

SEQ ID NO: 23903 - protein, 225 aa, Artificial Sequence
  Synthetic polypeptide
SLLASEACDLCSSCLPFEACDLCDLLPVLKPPPLLKSLIKTCWFCGSGVMEKLQLGPEILQRENPRLIYARLSGFGQSGSFCRLAGHDINYLALSGVLSKIGRSGENPYAPLNLLADFAGGGLMCALGIIMALFDRTRTGKGQVIDANMVEGTAYLSSFLWKTQKLSLWEAPRGQNMLDGGAPFYTTYRTADGEFMAVGAIEPQFYELLIKGCWGMLQFPSQKTK

SEQ ID NO: 23904 - protein, 246 aa, Artificial Sequence
  Synthetic polypeptide
SLLASEACDLCSSCLPFEACDLCDLLPVLKPPPLLKSLIKTCWFCGSGVMEKLQLGPEILQRENPRLIYARLSGFGQSGSFCRLAGHDINYLALSGGRNSIFKFFSVENSEIESVGSTSRTEHVGWWSTFLYDLQDSRWGIHGCWSNRTPVLRAADQRSGRTDLAENTTGSSIVPGKANPRQCEAMAIVAAQVMGFCVAVTVGGGNGHFELDVFKPMMIKNLCYTQAAGGCFSFLHRKLNSGNPDQ

SEQ ID NO: 23905 - protein, 25 aa, Artificial Sequence
  Synthetic polypeptide
TVSWRNSSWAQRFCSGKIQGLFMPG

SEQ ID NO: 23906 - protein, 25 aa, Artificial Sequence
  Synthetic polypeptide
TVSWRNSSWAQRFCSGKIQGLFMPG

SEQ ID NO: 23907 - protein, 25 aa, Artificial Sequence
  Synthetic polypeptide
TVSWRNSSWAQRFCSGKIQGLFMPG

SEQ ID NO: 23908 - protein, 25 aa, Artificial Sequence
  Synthetic polypeptide
TVSWRNSSWAQRFCSGKIQGLFMPG

SEQ ID NO: 23909 - protein, 25 aa, Artificial Sequence
  Synthetic polypeptide
TVSWRNSSWAQRFCSGKIQGLFMPG

SEQ ID NO: 23910 - protein, 25 aa, Artificial Sequence
  Synthetic polypeptide
TVSWRNSSWAQRFCSGKIQGLFMPG

SEQ ID NO: 23911 - protein, 25 aa, Artificial Sequence
  Synthetic polypeptide
TVSWRNSSWAQRFCSGKIQGLFMPG

SEQ ID NO: 23912 - protein, 25 aa, Artificial Sequence
  Synthetic polypeptide
TVSWRNSSWAQRFCSGKIQGLFMPG

SEQ ID NO: 23913 - protein, 25 aa, Artificial Sequence
  Synthetic polypeptide
TVSWRNSSWAQRFCSGKIQGLFMPG

SEQ ID NO: 23914 - protein, 25 aa, Artificial Sequence
  Synthetic polypeptide
TVSWRNSSWAQRFCSGKIQGLFMPG

SEQ ID NO: 23915 - protein, 65 aa, Artificial Sequence
  Synthetic polypeptide
SLPSHAELCHGETPAGPRDSAAGKSKAYLCQAEWIWPVRKLLPVSWPRYQLFGFVRCSLKNWQKW

SEQ ID NO: 23916 - protein, 65 aa, Artificial Sequence; identical to SEQ ID NO: 23915
  Synthetic polypeptide

SEQ ID NO: 23917 - protein, 65 aa, Artificial Sequence; identical to SEQ ID NO: 23915
  Synthetic polypeptide

SEQ ID NO: 23918 - protein, 65 aa, Artificial Sequence; identical to SEQ ID NO: 23915
  Synthetic polypeptide

SEQ ID NO: 23919 - protein, 65 aa, Artificial Sequence; identical to SEQ ID NO: 23915
  Synthetic polypeptide

SEQ ID NO: 23920 - protein, 310 aa, Artificial Sequence
  Synthetic polypeptide
FLEASPAMLNCVMEKLQLGPEILQRENPRLIYARLSGFGQSGSFCRLAGHDINYLALSGVLSKIGRSGENPYAPLNLLADFAGGGLMCALGIIMALFDRTRTGKGQVIDANMVEGTAYLSSFLWKTQKLSLWEAPRGQNMLDGGAPFYTTYRTADGEFMAVGAIEPQFYELLIKGLGLKSDELPNQMSMDDWPEMKKKFADVFAEKTKAEWCQIFDGTDACVTPVLTFEEVVHHDHNKERGSFITSEEQDVSPRPAPLLLNTPAIPSFKRDPFIGEHTEEILEEFGFSREEIYQLNSDKIIESNKVKASL

SEQ ID NO: 23921 - protein, 62 aa, Artificial Sequence
  Synthetic polypeptide
SLPSHAELCHGETPAGPRDSAAGKSKAYLCQAEWIWPVRKLLPVSWPRYQLFGFVRWKEQHI

SEQ ID NO: 23922 - protein, 62 aa, Artificial Sequence; identical to SEQ ID NO: 23921
  Synthetic polypeptide

SEQ ID NO: 23923 - protein, 62 aa, Artificial Sequence; identical to SEQ ID NO: 23921
  Synthetic polypeptide

SEQ ID NO: 23924 - protein, 62 aa, Artificial Sequence; identical to SEQ ID NO: 23921
  Synthetic polypeptide

SEQ ID NO: 23925 - protein, 62 aa, Artificial Sequence; identical to SEQ ID NO: 23921
  Synthetic polypeptide

SEQ ID NO: 23926 - protein, 126 aa, Artificial Sequence
  Synthetic polypeptide
FLEASPAMLNCVMEKLQLGPEILQRENPRLIYARLSGFGQSGSFCRLAGHDINYLALSGGRNSIFKFFSVENSEIESVGSTSRTEHVGWWSTFLYDLQDSRWGIHGCWSNRTPVLRAADQRTWTKV

SEQ ID NO: 23927 - protein, 65 aa, Artificial Sequence
  Synthetic polypeptide
FLEASPAMLNCVMEKLQLGPEILQRENPRLIYARLSGFGQSGSFCRLAGHDINYLALSGGRNSIF

SEQ ID NO: 23928 - protein, 157 aa, Artificial Sequence
  Synthetic polypeptide
FLEASPAMLNCVMEKLQLGPEILQRENPRLIYARLSGFGQSGSFCRLAGHDINYLALSGGRNSIFKFFSVENSEIESVGSTSRTEHVGWWSTFLYDLQDSRWGIHGCWSNRTPVLRAADQRSLIPYFNLYLQFLNISMQNLFKVHTLLRPCYFLGQK

SEQ ID NO: 23929 - protein, 157 aa, Artificial Sequence; identical to SEQ ID NO: 23928
  Synthetic polypeptide

SEQ ID NO: 23930 - protein, 322 aa, Artificial Sequence
  Synthetic polypeptide
FLEASPAMLNCVMEKLQLGPEILQRENPRLIYARLSGFGQSGSFCRLAGHDINYLALSGVLSKIGRSGENPYAPLNLLADFAGGGLMCALGIIMALFDRTRTGKGQVIDANMVEGTAYLSSFLWKTQKLSLWEAPRGQNMLDGGAPFYTTYRTADGEFMAVGAIEPQFYELLIKGLGLKSDELPNQMSMDDWPEMKKKFADVFAEKTKAEWCQIFDGTDACVTPVLTFEEVVHHDHNKERGSFITSEEQDVSPRPAPLLLNTPAIPSFKRDPFIGEHTEEILEEFGFSREEIYQLNSDKIIESNKAGSKFWILYPTHSNIQK

SEQ ID NO: 23931 - protein, 295 aa, Artificial Sequence
  Synthetic polypeptide
FLEASPAMLNCVMEKLQLGPEILQRENPRLIYARLSGFGQSGSFCRLAGHDINYLALSGVLSKIGRSGENPYAPLNLLADFAGGGLMCALGIIMALFDRTRTGKGQVIDANMKLSLWEAPRGQNMLDGGAPFYTTYRTADGEFMAVGAIEPQFYELLIKGLGLKSDELPNQMSMDDWPEMKKKFADVFAEKTKAEWCQIFDGTDACVTPVLTFEEVVHHDHNKERGSFITSEEQDVSPRPAPLLLNTPAIPSFKRDPFIGEHTEEILEEFGFSREEIYQLNSDKIIESNKVKASL

SEQ ID NO: 23932 - protein, 216 aa, Artificial Sequence
  Synthetic polypeptide
FLEASPAMLNCVMEKLQLGPEILQRENPRLIYARLSGFGQSGSFCRLAGHDINYLALSGVLSKIGRSGENPYAPLNLLADFAGGGLMCALGIIMALFDRTRTGKGQVIDANMVEGTAYLSSFLWKTQKLSLWEAPRGQNMLDGGAPFYTTYRTADGEFMAVGAIEPQFYELLIKGLGELILLKIQQEAVSCQARQTLVSVKQWPSLQPKSWGFVWQ

SEQ ID NO: 23933 - protein, 188 aa, Artificial Sequence
  Synthetic polypeptide
FLEASPAMLNCVMEKLQLGPEILQRENPRLIYARLSGFGQSGSFCRLAGHDINYLALSGVLSKIGRSGENPYAPLNLLADFAGGGLMCALGIIMALFDRTRTGKGQVIDANMVEGTAYLSSFLWKTQKLSLWEAPRGQNMLDGGAPFYTTYRTADGEFMAVGAIEPQFYELLIKGCWGMLQFPSQKTK

SEQ ID NO: 23934 - protein, 209 aa, Artificial Sequence
  Synthetic polypeptide
FLEASPAMLNCVMEKLQLGPEILQRENPRLIYARLSGFGQSGSFCRLAGHDINYLALSGGRNSIFKFFSVENSEIESVGSTSRTEHVGWWSTFLYDLQDSRWGIHGCWSNRTPVLRAADQRSGRTDLAENTTGSSIVPGKANPRQCEAMAIVAAQVMGFCVAVTVGGGNGHFELDVFKPMMIKNLCYTQAAGGCFSFLHRKLNSGNPDQ

SEQ ID NO: 23935 - protein, 15 aa, Artificial Sequence
  Synthetic polypeptide
AQALKTSLGWNISGV

SEQ ID NO: 23936 - protein, 15 aa, Artificial Sequence
  Synthetic polypeptide
AQALKTSLGWNISGV

SEQ ID NO: 23937 - protein, 220 aa, Artificial Sequence
  Synthetic polypeptide
RPAWAGIFQEFKVQEESVTFRINLTVLLDCLSIFGSSPMPGTLTALRMCYQGYGYPLMLFLEEGGVVTVCKINTQEPEETLDFDFCSTNVINKIILQSEGLREAFSELDMTSEVLQITMSPDKPYFRLSTFGNAGSSHLDYPKDSDLMEAFHCNQTQVNRYKISLLKPSTKALVLSCKVSIRTDNRGFLSLQYMIRNEDGQICFVEYYCCPDEEVPESES

SEQ ID NO: 23938 - protein, 220 aa, Artificial Sequence; identical to SEQ ID NO: 23937
  Synthetic polypeptide

SEQ ID NO: 23939 - protein, 50 aa, Artificial Sequence
  Synthetic polypeptide
YGGSHLYFQLLRRPRLKHEDRLSSGIKDQPGLEYFRSLKFRKSLLLFELI

SEQ ID NO: 23940 - protein, 50 aa, Artificial Sequence; identical to SEQ ID NO: 23939
  Synthetic polypeptide

SEQ ID NO: 23941 - protein, 23 aa, Artificial Sequence
  Synthetic polypeptide
NDKYLLDRKGNQSNWNRQGRASS

SEQ ID NO: 23942 - protein, 23 aa, Artificial Sequence
  Synthetic polypeptide
NDKYLLDRKGNQSNWNRQGRASS

SEQ ID NO: 23943 - protein, 995 aa, Artificial Sequence
  Synthetic polypeptide
IEKATSPTGTGKVGPPLDIKLGALNCTAFSIQWKMPRHPGSPILGYTVFYSEVGADKSLQEQLHSVPLSRDIPTTEEVIGDLKPGTEYRVSIAAYSQAGKGRLSSPRHVTTLSQDSCLPPAAPQQPHVIVVSDSEVALSWKPGASEGSAPIQYYSVEFIRPDFDKKWTSIHERIQMDSMVIKGLDPDTNYQFAVRAMNSHGPSPRSWPSDIIRTLCPEEAGSGRYGPRYITDMGAGEDDEGFEDDLDLDISFEEVKPLPATKGGNKKFLVESKKMSISNPKTISRLIPPTSASLPVTTVAPQPIPIQRKGKNGVAIMSRLFDMPCDETLCSADSFCVNDYTWGGSRCQCTLGKGGESCSEDIVIQYPQFFGHSYVTFEPLKNSYQAFQITLEFRAEAEDGLLLYCGENEHGRGDFMSLAIIRRSLQFRFNCGTGVAIIVSETKIKLGGWHTVMLYRDGLNGLLQLNNGTPVTGQSQGQYSKITFRTPLYLGGAPSAYWLVRATGTNRGFQGCVQSLAVNGRRIDMRPWPLGKALSGADVGECSSGICDEASCIHGGTCTAIKADSYICLCPLGFKGRHCEDAFTLTIPQFRESLRSYAATPWPLEPQHYLSFMEFEITFRPDSGDGVLLYSYDTGSKDFLSINLAGGHVEFRFDCGSGTGVLRSEDPLTLGNWHELRVSRTAKNGILQVDKQKIVEGMAEGGFTQIKCNTDIFIGGVPNYDDVKKNSGVLKPFSGSIQKIILNDRTIHVKHDFTSGVNVENAAHPCVRAPCAHGGSCRPRKEGYDCDCPLGFEGLHCQKECGNYCLNTIIEAIEIPQFIGRSYLTYDNPDILKRVSGSRSNVFMRFKTTAKDGLLLWRGDSPMRPNSDFISLGLRDGALVFSYNLGSGVASIMVNGSFNDGRWHRVKAVRDGQSGKITVDDYGARTGKSPGMMRQLNINGALYVGGMKEIALHTNRQYMRGLVGCISHFTLSTDYHISLVEDAVDGKNINTCGAK

SEQ ID NO: 23944 - protein, 11 aa, Artificial Sequence
  Synthetic polypeptide
KRQPVQLEQAR

SEQ ID NO: 23945 - protein, 11 aa, Artificial Sequence
  Synthetic polypeptide
KRQPVQLEQAR

SEQ ID NO: 23946 - protein, 987 aa, Artificial Sequence
  Synthetic polypeptide
IEKATSPTGTGKVGPPLDIKLGALNCTAFSIQWKMPRHPGSPILGYTVFYSEVGADKSLQEQLHSVPLSRDIPTTEEVIGDLKPGTEYRVSIAAYSQAGKGRLSSPRHVTTLSQDSCLPPAAPQQPHVIVVSDSEVALSWKPGASEGSAPIQYYSVEFIRPDFDKKWTSIHERIQMDSMVIKGLDPDTNYQFAVRAMNSHGPSPRSWPSDIIRTLCPEEAGSGRYGPRYITDMGAGEDDEGFEDDLDLDISFEEVKPLPATKGGNKKFLVESKKMSISNPKTISRLIPPTSASLPVTTVAPQPIPIQRKGKNGVAIMSRLFDMPCDETLCSADSFCVNDYTWGGSRCQCTLGKGGESCSEDIVIQYPQFFGHSYVTFEPLKNSYQAFQITLEFRAEAEDGLLLYCGENEHGRGDFMSLAIIRRSLQFRFNCGTGVAIIVSETKIKLGGWHTVMLYRDGLNGLLQLNNGTPVTGQSQGQYSKITFRTPLYLGGAPSAYWLVRATGTNRGFQGCVQSLAVNGRRIDMRPWPLGKALSGADVGECSSGICDEASCIHGGTCTAIKADSYICLCPLGFKGRHCEDAFTLTIPQFRESLRSYAATPWPLEPQHYLSFMEFEITFRPDSGDGVLLYSYDTGSKDFLSINLAGGHVEFRFDCGSGTGVLRSEDPLTLGNWHELRVSRTAKNGILQVDKQKIVEGMAEGGFTQIKCNTDIFIGGVPNYDDVKKNSGVLKPFSGSIQKIILNDRTIHVKHDFTSGVNVENAAHPCVRAPCAHGGSCRPRKEGYDCDCPLGFEGLHCQKAIIEAIEIPQFIGRSYLTYDNPDILKRVSGSRSNVFMRFKTTAKDGLLLWRGDSPMRPNSDFISLGLRDGALVFSYNLGSGVASIMVNGSFNDGRWHRVKAVRDGQSGKITVDDYGARTGKSPGMMRQLNINGALYVGGMKEIALHTNRQYMRGLVGCISHFTLSTDYHISLVEDAVDGKNINTCGAK

SEQ ID NO: 23947 - protein, 27 aa, Artificial Sequence
  Synthetic polypeptide
GRAWWLTPGIPALGEAEGWPVRKDNRG

SEQ ID NO: 23948 - protein, 27 aa, Artificial Sequence
  Synthetic polypeptide
GRAWWLTPGIPALGEAEGWPVRKDNRG

SEQ ID NO: 23949 - protein, 27 aa, Artificial Sequence
  Synthetic polypeptide
GRAWWLTPGIPALGEAEGWPVRKDNRG

SEQ ID NO: 23950 - protein, 27 aa, Artificial Sequence
  Synthetic polypeptide
GRAWWLTPGIPALGEAEGWPVRKDNRG

SEQ ID NO: 23951 - protein, 27 aa, Artificial Sequence
  Synthetic polypeptide
GRAWWLTPGIPALGEAEGWPVRKDNRG

SEQ ID NO: 23952 - protein, 27 aa, Artificial Sequence
  Synthetic polypeptide
GRAWWLTPGIPALGEAEGWPVRKDNRG

SEQ ID NO: 23953 - protein, 27 aa, Artificial Sequence
  Synthetic polypeptide
GRAWWLTPGIPALGEAEGWPVRKDNRG

SEQ ID NO: 23954 - protein, 27 aa, Artificial Sequence
  Synthetic polypeptide
GRAWWLTPGIPALGEAEGWPVRKDNRG

SEQ ID NO: 23955 - protein, 96 aa, Artificial Sequence
  Synthetic polypeptide
HLEYQHLGRPRDGQSGKITVDDYGARTGKSPGMMRQLNINGALYVGGMKEIALHTNRQYMRGLVGCISHFTLSTDYHISLVEDAVDGKNINTCGAK

SEQ ID NO: 23956 - protein, 96 aa, Artificial Sequence; identical to SEQ ID NO: 23955
  Synthetic polypeptide

SEQ ID NO: 23957 - protein, 96 aa, Artificial Sequence; identical to SEQ ID NO: 23955
  Synthetic polypeptide

SEQ ID NO: 23958 - protein, 96 aa, Artificial Sequence; identical to SEQ ID NO: 23955
  Synthetic polypeptide

SEQ ID NO: 23959 - protein, 96 aa, Artificial Sequence; identical to SEQ ID NO: 23955
  Synthetic polypeptide

SEQ ID NO: 23960 - protein, 96 aa, Artificial Sequence; identical to SEQ ID NO: 23955
  Synthetic polypeptide

SEQ ID NO: 23961 - protein, 96 aa, Artificial Sequence; identical to SEQ ID NO: 23955
  Synthetic polypeptide

SEQ ID NO: 23962 - protein, 23 aa, Artificial Sequence
  Synthetic polypeptide
PGMVADTWNTSTWGGRGMASQER

SEQ ID NO: 23963 - protein, 23 aa, Artificial Sequence
  Synthetic polypeptide
PGMVADTWNTSTWGGRGMASQER

SEQ ID NO: 23964 - protein, 23 aa, Artificial Sequence
  Synthetic polypeptide
PGMVADTWNTSTWGGRGMASQER

SEQ ID NO: 23965 - protein, 23 aa, Artificial Sequence
  Synthetic polypeptide
PGMVADTWNTSTWGGRGMASQER

SEQ ID NO: 23966 - protein, 23 aa, Artificial Sequence
  Synthetic polypeptide
PGMVADTWNTSTWGGRGMASQER

SEQ ID NO: 23967 - protein, 23 aa, Artificial Sequence
  Synthetic polypeptide
PGMVADTWNTSTWGGRGMASQER

SEQ ID NO: 23968 - protein, 23 aa, Artificial Sequence
  Synthetic polypeptide
PGMVADTWNTSTWGGRGMASQER

SEQ ID NO: 23969 - protein, 23 aa, Artificial Sequence
  Synthetic polypeptide
PGMVADTWNTSTWGGRGMASQER

SEQ ID NO: 23970 - protein, 56 aa, Artificial Sequence
  Synthetic polypeptide
HLEYQHLGRPRDGQSGKITVDDYGARTGKSPGMMRQLNINGALYVGGMKEIALHTN

SEQ ID NO: 23971 - protein, 850 aa, Artificial Sequence
  Synthetic polypeptide
RWSLPRTSCGPWDGKADVKSLMAKYNTGGNPTEDVSVNSRPFRVTGPNSSSGIQARKNLFNNQGNASPPAGPSNVPKFGSPKPPVAVKPSSEEKPDKEPKPPFLKPTGAGQRFGTPASLTTRDPEAKVGFLKPVGPKPINLPKEDSKPTFPWPPGNKPSLHSVNQDHDLKPLGPKSGPTPPTSENEQKQAFPKLTGVKGKFMSASQDLEPKPLFPKPAFGQKPPLSTENSHEDESPMKNVSSSKGSPAPLGVRSKSGPLKPAREDSENKDHAGEISSLPFPGVVLKPAASRGGPGLSKNGEEKKEDRKIDAAKNTFQSKINQEELASGTPPARFPKAPSKLTVGGPWGQSQEKEKGDKNSATPKQKPLPPLFTLGPPPPKPNRPPNVDLTKFHKTSSGNSTSKGQTSYSTTSLPPPPPSHPASQPPLPASHPSQPPVPSLPPRNIKPPFDLKSPVNEDNQDGVTHSDGAGNLDEEQDSEGETYEDIEASKEREKKREKEEKKRLELEKKEQKEKEKKEQEIKKKFKLTGPIQVIHLAKACCDVKGGKNELSFKQGEQIEIIRITDNPEGKWLGRTARGSYGYIKTTAVEIDYDSLKLKKDSLGAPSRPIEDDQEVYDDVAEQDDISSHSQSGSGGIFPPPPDDDIYDGIEEEDADDGSTLQVQEKSNTWSWGILKMLKGKDDRKKSIREKPKVSDSDNNEGSSFPAPPKQLDMGDEVYDDVDTSDFPVSSAEMSQGTNVGKAKTEEKDLKKLKKQEKEEKDFRKKFKYDGEIRVLYSTKVTTSITSKKWGTRDLQVKPGESLEVIQTTDDTKVLCRNEEGKYGYVLRSYLADNDGEIYDDIADGCIYDND

SEQ ID NO: 23972 - protein, 26 aa, Artificial Sequence
  Synthetic polypeptide
LQNQDPELEGGLCHAPAVGLGMERQM

SEQ ID NO: 23973 - protein, 36 aa, Artificial Sequence
  Synthetic polypeptide
DCDSRIKILSLKVVSATHQLWALGWKGRCKVPHGEI

SEQ ID NO: 23974 - protein, 256 aa, Artificial Sequence
  Synthetic polypeptide
KDTARRSICGLTVTLVYESADGPSSGTESPDIFIFPAFKTPTVCERELCVFAFQTLGVMNEAADEIATGAQKKNYDRVMKALDSITSIREMTQAPYLEIKKQMDKQDPLAHPLLQWVISSNRSHIVKLPVNRQLKFMHTPHQFLLLSSPPAKESNFRAAKKLFGSTFAFHGSHIENWHSILRNGLVVASNTRLQLHGAMYGSGIYLSPMSSISFGYSGMNKKQKVSAKDEPASSSKSSNTSQKTKKRTAIPIPAKP

SEQ ID NO: 23975 - protein, 73 aa, Artificial Sequence
  Synthetic polypeptide
CLCNRAQRALSLLYHERTQQEDQFVALLSLWSMNQQMGPHQALNLLTSLSSQPSKLLPYVNGSCVCLLFKPWE

SEQ ID NO: 23976 - protein, 73 aa, Artificial Sequence; identical to SEQ ID NO: 23975
  Synthetic polypeptide

SEQ ID NO: 23977 - protein, 73 aa, Artificial Sequence; identical to SEQ ID NO: 23975
  Synthetic polypeptide

SEQ ID NO: 23978 - protein, 73 aa, Artificial Sequence; identical to SEQ ID NO: 23975
  Synthetic polypeptide

SEQ ID NO: 23979 - protein, 73 aa, Artificial Sequence; identical to SEQ ID NO: 23975
  Synthetic polypeptide

SEQ ID NO: 23980 - protein, 73 aa, Artificial Sequence; identical to SEQ ID NO: 23975
  Synthetic polypeptide

SEQ ID NO: 23981 - protein, 13 aa, Artificial Sequence
  Synthetic polypeptide
HLYLPSLQNSYRM

SEQ ID NO: 23982 - protein, 13 aa, Artificial Sequence
  Synthetic polypeptide
HLYLPSLQNSYRM

SEQ ID NO: 23983 - protein, 13 aa, Artificial Sequence
  Synthetic polypeptide
HLYLPSLQNSYRM

SEQ ID NO: 23984 - protein, 13 aa, Artificial Sequence
  Synthetic polypeptide
HLYLPSLQNSYRM

SEQ ID NO: 23985 - protein, 13 aa, Artificial Sequence
  Synthetic polypeptide
HLYLPSLQNSYRM

SEQ ID NO: 23986 - protein, 13 aa, Artificial Sequence
  Synthetic polypeptide
HLYLPSLQNSYRM

SEQ ID NO: 23987 - protein, 369 aa, Artificial Sequence
  Synthetic polypeptide
KDTARRSICGLTVTLVYESADGPSSGTESPDIFIFPAFKTPTVCERELCVFAFQTLGVMNEAADEIATGAQVVDLLVSMCRSALESPRKVVIFEPYPSVVDPNDPQMLAFNPRKKNYDRVMKALDSITSIREMTQAPYLEIKKQMDKQDPLAHPLLQWVISSNRSHIVKLPVNRQLKFMHTPHQFLLLSSPPAKESNFRAAKKLFGSTFAFHGSHIENWHSILRNGLVVASNTRLQLHGAMYGSGIYLSPMSSISFGYSGMNKKQKVSAKDEPASSSKSSNTSQSQKKGQQSQFLQSRNLKCIALCEVITSSDLHKHGEIWVVPNTDHVCTRFFFVYEDGQVGDANINTQEGGIHKEILRVIGNQTATG

SEQ ID NO: 23988 - protein, 369 aa, Artificial Sequence; identical to SEQ ID NO: 23987
  Synthetic polypeptide

SEQ ID NO: 23989 - protein, 369 aa, Artificial Sequence; identical to SEQ ID NO: 23987
  Synthetic polypeptide

SEQ ID NO: 23990 - protein, 327 aa, Artificial Sequence
  Synthetic polypeptide
KDTARRSICGLTVTLVYESADGPSSGTESPDIFIFPAFKTPTVCERELCVFAFQTLGVMNEAADEIATGAQKKNYDRVMKALDSITSIREMTQAPYLEIKKQMDKQDPLAHPLLQWVISSNRSHIVKLPVNRQLKFMHTPHQFLLLSSPPAKESNFRAAKKLFGSTFAFHGSHIENWHSILRNGLVVASNTRLQLHGAMYGSGIYLSPMSSISFGYSGMNKKQKVSAKDEPASSSKSSNTSQSQKKGQQSQFLQSRNLKCIALCEVITSSDLHKHGEIWVVPNTDHVCTRFFFVYEDGQVGDANINTQEGGIHKEILRVIGNQTATG

SEQ ID NO: 23991 - protein, 327 aa, Artificial Sequence; identical to SEQ ID NO: 23990
  Synthetic polypeptide

SEQ ID NO: 23992 - protein, 32 aa, Artificial Sequence
  Synthetic polypeptide
PSQYCSACVQVVEDFHMEIGTGPDSRHTTHNS

SEQ ID NO: 23993 - protein, 32 aa, Artificial Sequence; identical to SEQ ID NO: 23992
  Synthetic polypeptide

SEQ ID NO: 23994 - protein, 32 aa, Artificial Sequence; identical to SEQ ID NO: 23992
  Synthetic polypeptide

SEQ ID NO: 23995 - protein, 32 aa, Artificial Sequence; identical to SEQ ID NO: 23992
  Synthetic polypeptide

SEQ ID NO: 23996 - protein, 62 aa, Artificial Sequence
  Synthetic polypeptide
SELSSHLGDKIDRLSIAVLVFKSLRTSTWRLAQDQTQDTQLITVDEKLAFGVPVHSTWMHFN

SEQ ID NO: 23997 - protein, 28 aa, Artificial Sequence
  Synthetic polypeptide
DTCVSQNLVAILVIRLTVSVLQCLCSSR

SEQ ID NO: 23998 - protein, 28 aa, Artificial Sequence
  Synthetic polypeptide
DTCVSQNLVAILVIRLTVSVLQCLCSSR

SEQ ID NO: 23999 - protein, 28 aa, Artificial Sequence
  Synthetic polypeptide
DTCVSQNLVAILVIRLTVSVLQCLCSSR

SEQ ID NO: 24000 - protein, 28 aa, Artificial Sequence
  Synthetic polypeptide
DTCVSQNLVAILVIRLTVSVLQCLCSSR

SEQ ID NO: 24001 - protein, 164 aa, Artificial Sequence
  Synthetic polypeptide
SELSSHLGDKIDRLSIAVLVFKSLRTSTWRLAQDQTQDTQLITVDEKLDITTLTGVPEEHIKTRKVRIFVPARNNMQSGVNNTKKWKMEFDTRERWENPLMGWASTADPLSNMVLTFSTKEDAVSFAEKNGWSYDIEERKVPKPKSKSYGANFSWNKRTRVSTK

SEQ ID NO: 24002 - protein, 120 aa, Artificial Sequence
  Synthetic polypeptide
SELSSHLGDKIDRLSIAVLVFKSLRTSTWRLAQDQTQDTQLITVDEKLVYLVPLCFTFCGLATPSLELATLFPASRHLEFLFTLPGCILTNPEDFIRSPSTYSSNGYHYFNWSSRRAYKN

SEQ ID NO: 24003 - protein, 109 aa, Artificial Sequence
  Synthetic polypeptide
SELSSHLGDKIDRLSIAVLVFKSLRTSTWRLAQDQTQDTQLITVDEKLDITTLTGVPEEHIKTRKVRIFVPARNNMQSGVNNTKKWKMEFDTRERWENPLMGWASTMEL

SEQ ID NO: 24004 - protein, 42 aa, Artificial Sequence
  Synthetic polypeptide
FKSLRTSTWRLAQDQTQDTQLITVDEKLAFGVPVHSTWMHFN

SEQ ID NO: 24005 - protein, 3 aa, Artificial Sequence
  Synthetic polypeptide
SSR

SEQ ID NO: 24006 - protein, 3 aa, Artificial Sequence
  Synthetic polypeptide
SSR

SEQ ID NO: 24007 - protein, 3 aa, Artificial Sequence
  Synthetic polypeptide
SSR

SEQ ID NO: 24008 - protein, 3 aa, Artificial Sequence
  Synthetic polypeptide
SSR

SEQ ID NO: 24009 - protein, 23 aa, Artificial Sequence
  Synthetic polypeptide
QVVEDFHMEIGTGPDSRHTTHNS

SEQ ID NO: 24010 - protein, 23 aa, Artificial Sequence
  Synthetic polypeptide
QVVEDFHMEIGTGPDSRHTTHNS

SEQ ID NO: 24011 - protein, 23 aa, Artificial Sequence
  Synthetic polypeptide
QVVEDFHMEIGTGPDSRHTTHNS

SEQ ID NO: 24012 - protein, 23 aa, Artificial Sequence
  Synthetic polypeptide
QVVEDFHMEIGTGPDSRHTTHNS

SEQ ID NO: 24013 - protein, 144 aa, Artificial Sequence
  Synthetic polypeptide
FKSLRTSTWRLAQDQTQDTQLITVDEKLDITTLTGVPEEHIKTRKVRIFVPARNNMQSGVNNTKKWKMEFDTRERWENPLMGWASTADPLSNMVLTFSTKEDAVSFAEKNGWSYDIEERKVPKPKSKSYGANFSWNKRTRVSTK

SEQ ID NO: 24014 - protein, 100 aa, Artificial Sequence
  Synthetic polypeptide
FKSLRTSTWRLAQDQTQDTQLITVDEKLVYLVPLCFTFCGLATPSLELATLFPASRHLEFLFTLPGCILTNPEDFIRSPSTYSSNGYHYFNWSSRRAYKN

SEQ ID NO: 24015 - protein, 89 aa, Artificial Sequence
  Synthetic polypeptide
FKSLRTSTWRLAQDQTQDTQLITVDEKLDITTLTGVPEEHIKTRKVRIFVPARNNMQSGVNNTKKWKMEFDTRERWENPLMGWASTMEL

SEQ ID NO: 24016 - protein, 32 aa, Artificial Sequence; identical to SEQ ID NO: 23992
  Synthetic polypeptide

SEQ ID NO: 24017 - protein, 32 aa, Artificial Sequence; identical to SEQ ID NO: 23992
  Synthetic polypeptide

SEQ ID NO: 24018 - protein, 32 aa, Artificial Sequence; identical to SEQ ID NO: 23992
  Synthetic polypeptide

SEQ ID NO: 24019 - protein, 32 aa, Artificial Sequence; identical to SEQ ID NO: 23992
  Synthetic polypeptide

SEQ ID NO: 24020 - protein, 62 aa, Artificial Sequence; identical to SEQ ID NO: 23996
  Synthetic polypeptide

SEQ ID NO: 24021 - protein, 28 aa, Artificial Sequence
  Synthetic polypeptide
DTCVSQNLVAILVIRLTVSVLQCLCSSR

SEQ ID NO: 24022 - protein, 28 aa, Artificial Sequence
  Synthetic polypeptide
DTCVSQNLVAILVIRLTVSVLQCLCSSR

SEQ ID NO: 24023 - protein, 28 aa, Artificial Sequence
  Synthetic polypeptide
DTCVSQNLVAILVIRLTVSVLQCLCSSR

SEQ ID NO: 24024 - protein, 28 aa, Artificial Sequence
  Synthetic polypeptide
DTCVSQNLVAILVIRLTVSVLQCLCSSR

SEQ ID NO: 24025 - protein, 164 aa, Artificial Sequence; identical to SEQ ID NO: 24001
  Synthetic polypeptide

SEQ ID NO: 24026 - protein, 120 aa, Artificial Sequence; identical to SEQ ID NO: 24002
  Synthetic polypeptide

SEQ ID NO: 24027 - protein, 109 aa, Artificial Sequence; identical to SEQ ID NO: 24003
  Synthetic polypeptide

SEQ ID NO: 24028 - protein, 30 aa, Artificial Sequence
  Synthetic polypeptide
QTVPTAPSGWIAERPATASQASVTGGRENA

SEQ ID NO: 24029 - protein, 25 aa, Artificial Sequence
  Synthetic polypeptide
KLDRLSLRHLRDGLQRDLQLPVRHL

SEQ ID NO: 24030 - protein, 99 aa, Artificial Sequence
  Synthetic polypeptide
KIVLAPFLENFRNLTDCPYGTFGMDCRETCNCQSGICDRGTGKCLKFPFFQYSVTKSSNRFVSLTEHDMASGDGNIVREEVVKENAAGSPVMRKWLNPR

SEQ ID NO: 24031 - protein, 14 aa, Artificial Sequence
  Synthetic polypeptide
IAEPITRGDGGIPL

SEQ ID NO: 24032 - protein, 255 aa, Artificial Sequence
  Synthetic polypeptide
NSGKLFNTPELLSSSAKWNPSPSFELLSPLREVTAESRCKLLSWLIPVHRQFGLSFESLCLTVNTLDRFLTTTPVAADCFQLLGVTSLLIACKQVEVHPPRVKQLLALCCGAFSRQQLCNLECIVLHKLHFTLGAPTISFFLEHFTHARVEAGQAEASEALEAQALARGVAELSLADYAFTSYSPSLLAICCLALADRMLRVSRPVDLRLGDHPEAALEDCMGKLQLLVAINSTSLTHMLPVQICEKCSLPPSSK

SEQ ID NO: 24033 - protein, 5 aa, Artificial Sequence
  Synthetic polypeptide
AHYAR

SEQ ID NO: 24034 - protein, 31 aa, Artificial Sequence
  Synthetic polypeptide
HVPIVPATWETDMERLLEPRSLRLHFIFKPG

SEQ ID NO: 24035 - protein, 31 aa, Artificial Sequence; identical to SEQ ID NO: 24034
  Synthetic polypeptide

SEQ ID NO: 24036 - protein, 38 aa, Artificial Sequence
  Synthetic polypeptide
GCTLSSSQDEGRLGKTLTPHTAIWSCCRIHLCGPFSSF

SEQ ID NO: 24037 - protein, 38 aa, Artificial Sequence; identical to SEQ ID NO: 24036
  Synthetic polypeptide

SEQ ID NO: 24038 - protein, 108 aa, Artificial Sequence
  Synthetic polypeptide
AQEFEAALYLQARMKGDWARLLRPTLQFGLVAVSIYVGLSRVSDYKHHWSDVLTGLIQGALVAILVAVYVSDFFKERTSFKERKEEDSHTTLHETPTTGNHYPSNHQP

SEQ ID NO: 24039 - protein, 108 aa, Artificial Sequence; identical to SEQ ID NO: 24038
  Synthetic polypeptide

SEQ ID NO: 24040 - protein, 29 aa, Artificial Sequence
  Synthetic polypeptide
DQPGQHSETSSLLKIQTITWEWCFIFKPG

SEQ ID NO: 24041 - protein, 29 aa, Artificial Sequence
  Synthetic polypeptide
DQPGQHSETSSLLKIQTITWEWCFIFKPG

SEQ ID NO: 24042 - protein, 45 aa, Artificial Sequence
  Synthetic polypeptide
KYRQLPGSGALSSSQDEGRLGKTLTPHTAIWSCCRIHLCGPFSSF

SEQ ID NO: 24043 - protein, 45 aa, Artificial Sequence; identical to SEQ ID NO: 24042
  Synthetic polypeptide

SEQ ID NO: 24044 - protein, 116 aa, Artificial Sequence
  Synthetic polypeptide
NIVPTKNTDNYLGVVLYLQARMKGDWARLLRPTLQFGLVAVSIYVGLSRVSDYKHHWSDVLTGLIQGALVAILVAVYVSDFFKERTSFKERKEEDSHTTLHETPTTGNHYPSNHQP

SEQ ID NO: 24045 - protein, 116 aa, Artificial Sequence; identical to SEQ ID NO: 24044
  Synthetic polypeptide

SEQ ID NO: 24046 - protein, 28 aa, Artificial Sequence
  Synthetic polypeptide
TLGLSWRLAQPVLMWTMAHLRDGVPWIP

SEQ ID NO: 24047 - protein, 28 aa, Artificial Sequence
  Synthetic polypeptide
TLGLSWRLAQPVLMWTMAHLRDGVPWIP

SEQ ID NO: 24048 - protein, 28 aa, Artificial Sequence
  Synthetic polypeptide
TLGLSWRLAQPVLMWTMAHLRDGVPWIP

SEQ ID NO: 24049 - protein, 28 aa, Artificial Sequence
  Synthetic polypeptide
TLGLSWRLAQPVLMWTMAHLRDGVPWIP

SEQ ID NO: 24050 - protein, 28 aa, Artificial Sequence
  Synthetic polypeptide
TLGLSWRLAQPVLMWTMAHLRDGVPWIP

SEQ ID NO: 24051 - protein, 28 aa, Artificial Sequence
  Synthetic polypeptide
TLGLSWRLAQPVLMWTMAHLRDGVPWIP

SEQ ID NO: 24052 - protein, 28 aa, Artificial Sequence
  Synthetic polypeptide
TLGLSWRLAQPVLMWTMAHLRDGVPWIP

SEQ ID NO: 24053 - protein, 28 aa, Artificial Sequence
  Synthetic polypeptide
TLGLSWRLAQPVLMWTMAHLRDGVPWIP

SEQ ID NO: 24054 - protein, 28 aa, Artificial Sequence
  Synthetic polypeptide
TLGLSWRLAQPVLMWTMAHLRDGVPWIP

SEQ ID NO: 24055 - protein, 30 aa, Artificial Sequence
  Synthetic polypeptide
SLHKIPEGQGSVSFHIAEHLDFHGGWHSQF

SEQ ID NO: 24056 - protein, 30 aa, Artificial Sequence; identical to SEQ ID NO: 24055
  Synthetic polypeptide

SEQ ID NO: 24057 - protein, 30 aa, Artificial Sequence; identical to SEQ ID NO: 24055
  Synthetic polypeptide

SEQ ID NO: 24058 - protein, 30 aa, Artificial Sequence; identical to SEQ ID NO: 24055
  Synthetic polypeptide

SEQ ID NO: 24059 - protein, 30 aa, Artificial Sequence; identical to SEQ ID NO: 24055
  Synthetic polypeptide

SEQ ID NO: 24060 - protein, 30 aa, Artificial Sequence; identical to SEQ ID NO: 24055
  Synthetic polypeptide

SEQ ID NO: 24061 - protein, 30 aa, Artificial Sequence; identical to SEQ ID NO: 24055
  Synthetic polypeptide

SEQ ID NO: 24062 - protein, 30 aa, Artificial Sequence; identical to SEQ ID NO: 24055
  Synthetic polypeptide

SEQ ID NO: 24063 - protein, 30 aa, Artificial Sequence; identical to SEQ ID NO: 24055
  Synthetic polypeptide

SEQ ID NO: 24064 - protein, 670 aa, Artificial Sequence
  Synthetic polypeptide
LNTWTFMEVGTASFDVDNGTSAGRSPLDPMTSPGSGLILQANFVHSQRRESFLYRSDSDYDLSPKSMSRNSSIASDIHGDDLIVTPFAQVLASLRTVRNNFAALTNLQDRAPSKRSPMCNQPSINKATITEEAYQKLASETLEELDWCLDQLETLQTRHSVSEMASNKFKRMLNRELTHLSEMSRSGNQVSEFISNTFLDKQHEVEIPSPTQKEKEKKKRPMSQISGVKKLMHSSSLTNSSIPRFGVKTEQEDVLAKELEDVNKWGLHVFRIAELSGNRPLTVIMHTIFQERDLLKTFKIPVDTLITYLMTLEDHYHADVAYHNNIHAADVVQSTHVLLSTPALEAVFTDLEILAAIFASAIHDVDHPGVSNQFLINTNSELALMYNDSSVLENHHLAVGFKLLQEENCDIFQNLTKKQRQSLRKMVIDIVLATDMSKHMNLLADLKTMVETKKVTSSGVLLLDNYSDRIQVLQNMVHCADLSNPTKPLQLYRQWTDRIMEEFFRQGDRERERGMEISPMCDKHNASVEKSQVGFIDYIVHPLWETWADLVHPDAQDILDTLEDNREWYQSTIPQSPSPAPDDPEEGRQGQTEKFQFELTLEEDGESDTEKDSGSQVEEDTSCSDSKTLCTQDSESTEIPLDEQVEEEAVGEEEESQPEACVIDDRSPDT

SEQ ID NO: 24065 - protein, 670 aa, Artificial Sequence; identical to SEQ ID NO: 24064
  Synthetic polypeptide

SEQ ID NO: 24066 - protein, 670 aa, Artificial Sequence; identical to SEQ ID NO: 24064
  Synthetic polypeptide

SEQ ID NO: 24067 - protein, 670 aa, Artificial Sequence; identical to SEQ ID NO: 24064
  Synthetic polypeptide

SEQ ID NO: 24068 - protein, 670 aa, Artificial Sequence; identical to SEQ ID NO: 24064
  Synthetic polypeptide

SEQ ID NO: 24069 - protein, 670 aa, Artificial Sequence; identical to SEQ ID NO: 24064
  Synthetic polypeptide

SEQ ID NO: 24070 - protein, 670 aa, Artificial Sequence; identical to SEQ ID NO: 24064
  Synthetic polypeptide

SEQ ID NO: 24071 - protein, 140 aa, Artificial Sequence
  Synthetic polypeptide
LNTWTFMEVGTASFDVDNGTSAGRSPLDPMTSPGSGLILQANFVHSQRRESFLYRSDSDYDLSPKSMSRNSSIASDIHGDDLIVTPFAQVLASLRTVRNNFAALTNLQDRAPSKRSPMCNQPSINKATITGLYNGIIAFL

SEQ ID NO: 24072 - protein, 144 aa, Artificial Sequence
  Synthetic polypeptide
LNTWTFMEVGTASFDVDNGTSAGRSPLDPMTSPGSGLILQANFVHSQRRESFLYRSDSDYDLSPKSMSRNSSIASDIHGDDLIVTPFAQVLASLRTVRNNFAALTNLQDRAPSKRSPMCNQPSINKATITGSWMELNPYTLLDM

SEQ ID NO: 24073 - protein, 21 aa, Artificial Sequence
  Synthetic polypeptide
RFWFLQRVGKVEPIPHGYQGL

SEQ ID NO: 24074 - protein, 21 aa, Artificial Sequence
  Synthetic polypeptide
RFWFLQRVGKVEPIPHGYQGL

SEQ ID NO: 24075 - protein, 21 aa, Artificial Sequence
  Synthetic polypeptide
RFWFLQRVGKVEPIPHGYQGL

SEQ ID NO: 24076 - protein, 21 aa, Artificial Sequence
  Synthetic polypeptide
RFWFLQRVGKVEPIPHGYQGL

SEQ ID NO: 24077 - protein, 756 aa, Artificial Sequence
  Synthetic polypeptide
ASEDFGFCRGWERLNQSPMDTKASEETLHSSNEEEDPFRGMEPYLVRRLSCRNIQLPPLAFRQLEQADLKSESENIQRPTSLPLKILPLIAITSAESSGFDVDNGTSAGRSPLDPMTSPGSGLILQANFVHSQRRESFLYRSDSDYDLSPKSMSRNSSIASDIHGDDLIVTPFAQVLASLRTVRNNFAALTNLQDRAPSKRSPMCNQPSINKATITEEAYQKLASETLEELDWCLDQLETLQTRHSVSEMASNKFKRMLNRELTHLSEMSRSGNQVSEFISNTFLDKQHEVEIPSPTQKEKEKKKRPMSQISGVKKLMHSSSLTNSSIPRFGVKTEQEDVLAKELEDVNKWGLHVFRIAELSGNRPLTVIMHTIFQERDLLKTFKIPVDTLITYLMTLEDHYHADVAYHNNIHAADVVQSTHVLLSTPALEAVFTDLEILAAIFASAIHDVDHPGVSNQFLINTNSELALMYNDSSVLENHHLAVGFKLLQEENCDIFQNLTKKQRQSLRKMVIDIVLATDMSKHMNLLADLKTMVETKKVTSSGVLLLDNYSDRIQVLQNMVHCADLSNPTKPLQLYRQWTDRIMEEFFRQGDRERERGMEISPMCDKHNASVEKSQVGFIDYIVHPLWETWADLVHPDAQDILDTLEDNREWYQSTIPQSPSPAPDDPEEGRQGQTEKFQFELTLEEDGESDTEKDSGSQVEEDTSCSDSKTLCTQDSESTEIPLDEQVEEEAVGEEEESQPEACVIDDRSPDT

SEQ ID NO: 24078 - protein, 756 aa, Artificial Sequence; identical to SEQ ID NO: 24077
  Synthetic polypeptide

SEQ ID NO: 24079 - protein, 54 aa, Artificial Sequence
  Synthetic polypeptide
TNPPWIPRPLRKHYIPVMKRKTLSAEWNPILSGDFHVAIFSFPLSPSDSWNKLT

SEQ ID NO: 24080 - protein, 54 aa, Artificial Sequence; identical to SEQ ID NO: 24079
  Synthetic polypeptide

SEQ ID NO: 24081 - protein, 54 aa, Artificial Sequence; identical to SEQ ID NO: 24079
  Synthetic polypeptide

SEQ ID NO: 24082 - protein, 54 aa, Artificial Sequence; identical to SEQ ID NO: 24079
  Synthetic polypeptide

SEQ ID NO: 24083 - protein, 89 aa, Artificial Sequence
  Synthetic polypeptide
ASEDFGFCRGWERLNQSPMDTKASEETLHSSNEEEDPFRGMEPYLVRRLSCRNIQLPPLAFRQLEQADLKSESENIQRPTSLPLKILPL

SEQ ID NO: 24084 - protein, 82 aa, Artificial Sequence
  Synthetic polypeptide
ASEDFGFCRGWERLNQSPMDTKASEETLHSSNEEEDPFRGMEPYLVRRLSCRNIQLPPLAFRQLEQADLKSESENIQRPTSL

SEQ ID NO: 24085 - protein, 49 aa, Artificial Sequence
  Synthetic polypeptide
KCGTFPFALFLSLLPPCEEGACFSFAFCHDFKFPEASPAMWNYFLLLHP

SEQ ID NO: 24086 - protein, 49 aa, Artificial Sequence; identical to SEQ ID NO: 24085
  Synthetic polypeptide

SEQ ID NO: 24087 - protein, 49 aa, Artificial Sequence; identical to SEQ ID NO: 24085
  Synthetic polypeptide

SEQ ID NO: 24088 - protein, 66 aa, Artificial Sequence
  Synthetic polypeptide
WFKSVALSPLRSFFLSCHLVKKVLASPLPSAMILSFPRPPQPCGTISSFFTPETISKEAPKPKGCY

SEQ ID NO: 24089 - protein, 66 aa, Artificial Sequence; identical to SEQ ID NO: 24088
  Synthetic polypeptide

SEQ ID NO: 24090 - protein, 66 aa, Artificial Sequence; identical to SEQ ID NO: 24088
  Synthetic polypeptide

SEQ ID NO: 24091 - protein, 435 aa, Artificial Sequence
  Synthetic polypeptide
VSRGLPSHVELFPPSSPLKPYPKKPPNQKDVIKFPEWNDLPPGTSQENIPVRPVVMNSEMWYKRHSIAIGEVPACRLVHRRQLTEANVEEIWKSMTLSYLQKILGLDSLEEVLDVKLVNSKFIIHNVYSVSKQGVVILDDKSKELPHWVLSAMKCLANWPNCSDLKQPMYLGFEKDVFKTIADYYGHLKEPLLTFHLFDAFVSVLGLLQKEKVAVEAFQICCLLLPPENRRKLQLLMRMMARICLNKEMPPLCDGFGTRTLMVQTFSRCILCSKDEVDLDELLAARLVTFLMDNYQEILKVPLALQTSIEERVAHLRRVQIKYPGADMDITLSAPSFCRQISPEEFEYQRSYGSQEPLAALLEEVITDAKLSNKEKKKKLKQFQKSYPEVYQERFPTPESAALLFPEKPKPKPQLLMWALKKPFQPFQRTRSFRM

SEQ ID NO: 24092 - protein, 373 aa, Artificial Sequence
  Synthetic polypeptide
VSRGLPSHVELFPPSSPLKPYPKKPPNQKDVIKFPEWNDLPPGTSQENIPVRPVVMNSEMWYKRHSIAIGEVPACRLVHRRQLTEANVEEIWKSMTLSYLQKILGLDSLEEVLDVKLVNSKFIIHNVYSVSKQGVVILDDKSKELPHWVLSAMKCLANWPNCSDLKQPMYLGFEKDVFKTIADYYGHLKEPLLTFHLFDAFVSVLGLLQKEKVAVEAFQICCLLLPPENRRKLQLLMRMMARICLNKEMPPLCDGFGTRTLMVQTFSRCILCSKDEVDLDELLAARLVTFLMDNYQEILKVPLALQTSIEERVAHLRRVQFQKSYPEVYQERFPTPESAALLFPEKPKPKPQLLMWALKKPFQPFQRTRSFRM

SEQ ID NO: 24093 - protein, 373 aa, Artificial Sequence; identical to SEQ ID NO: 24092
  Synthetic polypeptide

SEQ ID NO: 24094 - protein, 43 aa, Artificial Sequence
  Synthetic polypeptide
PTCGMRPWSFFVLRCRYGNIAVVSRAMSIVSQRPKLWIGCMSC

SEQ ID NO: 24095 - protein, 43 aa, Artificial Sequence; identical to SEQ ID NO: 24094
  Synthetic polypeptide

SEQ ID NO: 24096 - protein, 26 aa, Artificial Sequence
  Synthetic polypeptide
FQHFGRLRRLDHLRSRVRDHPDQHVE

SEQ ID NO: 24097 - protein, 26 aa, Artificial Sequence
  Synthetic polypeptide
FQHFGRLRRLDHLRSRVRDHPDQHVE

SEQ ID NO: 24098 - protein, 524 aa, Artificial Sequence
  Synthetic polypeptide
DQEFETTLTNMWNETVELFRAKMPLRKHRCRFKSYEHCFTAAEAVDWLHELLRCSQNFGPEVTRKQTVQLLKKFLKNHVIEDIKGKWGEEDFEDNRHLYRFPPSSPLKPYPKKPPNQKDVIKFPEWNDLPPGTSQENIPVRPVVMNSEMWYKRHSIAIGEVPACRLVHRRQLTEANVEEIWKSMTLSYLQKILGLDSLEEVLDVKLVNSKFIIHNVYSVSKQGVVILDDKSKELPHWVLSAMKCLANWPNCSDLKQPMYLGFEKDVFKTIADYYGHLKEPLLTFHLFDAFVSVLGLLQKEKVAVEAFQICCLLLPPENRRKLQLLMRMMARICLNKEMPPLCDGFGTRTLMVQTFSRCILCSKDEVDLDELLAARLVTFLMDNYQEILKVPLALQTSIEERVAHLRRVQIKYPGADMDITLSAPSFCRQISPEEFEYQRSYGSQEPLAALLEEVITDAKLSNKEKKKKLKQFQKSYPEVYQERFPTPESAALLFPEKPKPKPQLLMWALKKPFQPFQRTRSFRM

SEQ ID NO: 24099 - protein, 462 aa, Artificial Sequence
  Synthetic polypeptide
DQEFETTLTNMWNETVELFRAKMPLRKHRCRFKSYEHCFTAAEAVDWLHELLRCSQNFGPEVTRKQTVQLLKKFLKNHVIEDIKGKWGEEDFEDNRHLYRFPPSSPLKPYPKKPPNQKDVIKFPEWNDLPPGTSQENIPVRPVVMNSEMWYKRHSIAIGEVPACRLVHRRQLTEANVEEIWKSMTLSYLQKILGLDSLEEVLDVKLVNSKFIIHNVYSVSKQGVVILDDKSKELPHWVLSAMKCLANWPNCSDLKQPMYLGFEKDVFKTIADYYGHLKEPLLTFHLFDAFVSVLGLLQKEKVAVEAFQICCLLLPPENRRKLQLLMRMMARICLNKEMPPLCDGFGTRTLMVQTFSRCILCSKDEVDLDELLAARLVTFLMDNYQEILKVPLALQTSIEERVAHLRRVQFQKSYPEVYQERFPTPESAALLFPEKPKPKPQLLMWALKKPFQPFQRTRSFRM

SEQ ID NO: 24100 - protein, 66 aa, Artificial Sequence
  Synthetic polypeptide
EARGGSLEARSLRSPGQQSTTSSLQKNLKVSQVWWHMPVVSAAWEAKVATRTVSEQAVKNVATLVT

SEQ ID NO: 24101 - protein, 18 aa, Artificial Sequence
  Synthetic polypeptide
SQLLGRLRLQQGQCQSRL

SEQ ID NO: 24102 - protein, 2518 aa, Artificial Sequence
  Synthetic polypeptide
ATQETVISAFPSELDHILSPPPMPFRKCSNPDVASGPGKSLKYKRQLSEDGRQLRRGSLGGALTGRYLLPNPVAGQAWPASAETSNLVRMRSQALGQSAPSLTASLKELSLPRRGSFCRTSNRKSLIGNGQSPALPRPHSPLSAHAGNSPQDSPRNFSPSASAHFSFARSLNRTDGRRWSLASLPSSGYGTNTPSSTVSSSCSSQEKLHQLPYQPTPDELHFLSKHFCTTESIATENRCRNTPMRPRSRSLSPGRSPACCDHEIIMMNHVYKERFPKATAQMEERLKEIITSYSPDNVLPLADGVLSFTHHQIIELARDCLDKSHQGLITSRYFLELQHKLDKLLQEAHDRSESGELAFIKQLVRKILIVIARPARLLECLEFDPEEFYYLLEAAEGHAKEGQGIKTDIPRYIISQLGLNKDPLEEMAHLGNYDSGTAETPETDESVSSSNASLKLRRKPRESDFETIKLISNGAYGAVYFVRHKESRQRFAMKKINKQNLILRNQIQQAFVERDILTFAENPFVVSMYCSFETRRHLCMVMEYVEGGDCATLMKNMGPLPVDMARMYFAETVLALEYLHNYGIVHRDLKPDNLLVTSMGHIKLTDFGLSKVGLMSMTTNLYEGHIEKDAREFLDKQVCGTPEYIAPEVILRQGYGKPVDWWAMGIILYEFLVGCVPFFGDTPEELFGQVISDEINWPEKDEAPPPDAQDLITLLLRQNPLERLGTGGAYEVKQHRFFRSLDWNSLLRQKAEFIPQLESEDDTSYFDTRSEKYHHMETEEEDDTNDEDFNVEIRQFSSCSHRFSKVFSSIDRITQNSAEEKEDSVDKTKSTTLPSTETLSWSSEYSEMQQLSTSNSSDTESNRHKLSSGLLPKLAISTEGEQDEAASCPGDPHEEPGKPALPPEECAQEEPEVTTPASTISSSTLSVGSFSEHLDQINGRSECVDSTDNSSKPSSEPASHMARQRLESTEKKKISGKVTKSLSASALSLMIPGDMFAVSPLGSPMSPHSLSSDPSSSRDSSPSRDSSAASASPHQPIVIHSSGKNYGFTIRAIRVYVGDSDIYTVHHIVWNVEEGSPACQAGLKAGDLITHINGEPVHGLVHTEVIELLLKSGNKVSITTTPFENTSIKTGPARRNSYKSRMVRRSKKSKKKESLERRRSLFKKLAKQPSPLLHTSRSFSCLNRSLSSGESLPGSPTHSLSPRSPTPSYRSTPDFPSGTNSSQSSSPSSSAPNSPAGSGHIRPSTLHGLAPKLGGQRYRSGRRKSAGNIPLSPLARTPSPTPQPTSPQRSPSPLLGHSLGNSKIAQAFPSKMHSPPTIVRHIVRPKSAEPPRSPLLKRVQSEEKLSPSYGSDKKHLCSRKHSLEVTQEEVQREQSQREAPLQSLDENVCDVPPLSRARPVEQGCLKRPVSRKVGRQESVDDLDRDKLKAKVVVKKADGFPEKQESHQKSHGPGSDLENFALFKLEEREKKVYPKAVERSSTFENKASMQEAPPLGSLLKDALHKQASVRASEGAMSDGRVPAEHRQGGGDFRRAPAPGTLQDGLCHSLDRGISGKGEGTEKSSQAKELLRCEKLDSKLANIDYLRKKMSLEDKEDNLCPVLKPKMTAGSHECLPGNPVRPTGGQQEPPPASESRAFVSSTHAAQMSAVSFVPLKALTGRVDSGTEKPGLVAPESPVRKSPSEYKLEGRSVSCLKPIEGTLDIALLSGPQASKTELPSPESAQSPSPSGDVRASVPPVLPSSSGKKNDTTSARELSPSSLKMNKSYLLEPWFLPPSRGLQNSPAVSLPDPEFKRDRKGPHPTARSPGTVMESNPQQREGSSPKHQDHTTDPKLLTCLGQNLHSPDLARPRCPLPPEASPSREKPGLRESSERGPPTARSERSAARADTCREPSMELCFPETAKTSDNSKNLLSVGRTHPDFYTQTQAMEKAWAPGGKTNHKDGPGEARPPPRDNSSLHSAGIPCEKELGKVRRGVEPKPEALLARRSLQPPGIESEKSEKLSSFPSLQKDGAKEPERKEQPLQRHPSSIPPPPLTAKDLSSPAARQHCSSPSHASGREPGAKPSTAEPSSSPQDPPKPVAAHSESSSHKPRPGPDPGPPKTKHPDRSLSSQKPSVGATKGKEPATQSLGGSSREGKGHSKSGPDVFPATPGSQNKASDGIGQGEGGPSVPLHTDRAPLDAKPQPTSGGRPLEVLEKPVHLPRPGHPGPSEPADQKLSAVGEKQTLSPKHPKPSTVKDCPTLCKQTDNRQTDKSPSQPAANTDRRAEGKKCTEALYAPAEGDKLEAGLSFVHSENRLKGAERPAAGVGKGFPEARGKGPGPQKPPTEADKPNGMKRSPSATGQSSFRSTALPEKSLSCSSSFPETRAGVREASAASSDTSSAKAAGGMLELPAPSNRDHRKAQPAGEGRTHMTKSDSLPSFRVSTLPLESHHPDPNTMGGASHRDRALSVTATVGETKGKDPAPAQPPPARKQNVGRDVTKPSPAPNTDRPISLSNEKDFVVRQRRGKESLRSSPHKKAL

SEQ ID NO: 24103 - protein, 34 aa, Artificial Sequence
  Synthetic polypeptide
FLHFHLSLTTYYPLHPCRFGNAATQMWLLALENH

SEQ ID NO: 24104 - protein, 34 aa, Artificial Sequence; identical to SEQ ID NO: 24103
  Synthetic polypeptide

SEQ ID NO: 24105 - protein, 34 aa, Artificial Sequence; identical to SEQ ID NO: 24103
  Synthetic polypeptide

SEQ ID NO: 24106 - protein, 34 aa, Artificial Sequence; identical to SEQ ID NO: 24103
  Synthetic polypeptide

SEQ ID NO: 24107 - protein, 2515 aa, Artificial Sequence
  Synthetic polypeptide
ATQETVISAFPSELDHILSPPPMPFRKCSNPDVASGPGKSLKYKRQLSEDGRQLRRGSLGGALTGRYLLPNPVAGQAWPASAETSNLVRMRSQALGQSAPSLTASLKELSLPRRGSFCRTSNRKSLIGNGQSPALPRPHSPLSAHAGNSPQDSPRNFSPSASAHFSFARRTDGRRWSLASLPSSGYGTNTPSSTVSSSCSSQEKLHQLPYQPTPDELHFLSKHFCTTESIATENRCRNTPMRPRSRSLSPGRSPACCDHEIIMMNHVYKERFPKATAQMEERLKEIITSYSPDNVLPLADGVLSFTHHQIIELARDCLDKSHQGLITSRYFLELQHKLDKLLQEAHDRSESGELAFIKQLVRKILIVIARPARLLECLEFDPEEFYYLLEAAEGHAKEGQGIKTDIPRYIISQLGLNKDPLEEMAHLGNYDSGTAETPETDESVSSSNASLKLRRKPRESDFETIKLISNGAYGAVYFVRHKESRQRFAMKKINKQNLILRNQIQQAFVERDILTFAENPFVVSMYCSFETRRHLCMVMEYVEGGDCATLMKNMGPLPVDMARMYFAETVLALEYLHNYGIVHRDLKPDNLLVTSMGHIKLTDFGLSKVGLMSMTTNLYEGHIEKDAREFLDKQVCGTPEYIAPEVILRQGYGKPVDWWAMGIILYEFLVGCVPFFGDTPEELFGQVISDEINWPEKDEAPPPDAQDLITLLLRQNPLERLGTGGAYEVKQHRFFRSLDWNSLLRQKAEFIPQLESEDDTSYFDTRSEKYHHMETEEEDDTNDEDFNVEIRQFSSCSHRFSKVFSSIDRITQNSAEEKEDSVDKTKSTTLPSTETLSWSSEYSEMQQLSTSNSSDTESNRHKLSSGLLPKLAISTEGEQDEAASCPGDPHEEPGKPALPPEECAQEEPEVTTPASTISSSTLSVGSFSEHLDQINGRSECVDSTDNSSKPSSEPASHMARQRLESTEKKKISGKVTKSLSASALSLMIPGDMFAVSPLGSPMSPHSLSSDPSSSRDSSPSRDSSAASASPHQPIVIHSSGKNYGFTIRAIRVYVGDSDIYTVHHIVWNVEEGSPACQAGLKAGDLITHINGEPVHGLVHTEVIELLLKSGNKVSITTTPFENTSIKTGPARRNSYKSRMVRRSKKSKKKESLERRRSLFKKLAKQPSPLLHTSRSFSCLNRSLSSGESLPGSPTHSLSPRSPTPSYRSTPDFPSGTNSSQSSSPSSSAPNSPAGSGHIRPSTLHGLAPKLGGQRYRSGRRKSAGNIPLSPLARTPSPTPQPTSPQRSPSPLLGHSLGNSKIAQAFPSKMHSPPTIVRHIVRPKSAEPPRSPLLKRVQSEEKLSPSYGSDKKHLCSRKHSLEVTQEEVQREQSQREAPLQSLDENVCDVPPLSRARPVEQGCLKRPVSRKVGRQESVDDLDRDKLKAKVVVKKADGFPEKQESHQKSHGPGSDLENFALFKLEEREKKVYPKAVERSSTFENKASMQEAPPLGSLLKDALHKQASVRASEGAMSDGRVPAEHRQGGGDFRRAPAPGTLQDGLCHSLDRGISGKGEGTEKSSQAKELLRCEKLDSKLANIDYLRKKMSLEDKEDNLCPVLKPKMTAGSHECLPGNPVRPTGGQQEPPPASESRAFVSSTHAAQMSAVSFVPLKALTGRVDSGTEKPGLVAPESPVRKSPSEYKLEGRSVSCLKPIEGTLDIALLSGPQASKTELPSPESAQSPSPSGDVRASVPPVLPSSSGKKNDTTSARELSPSSLKMNKSYLLEPWFLPPSRGLQNSPAVSLPDPEFKRDRKGPHPTARSPGTVMESNPQQREGSSPKHQDHTTDPKLLTCLGQNLHSPDLARPRCPLPPEASPSREKPGLRESSERGPPTARSERSAARADTCREPSMELCFPETAKTSDNSKNLLSVGRTHPDFYTQTQAMEKAWAPGGKTNHKDGPGEARPPPRDNSSLHSAGIPCEKELGKVRRGVEPKPEALLARRSLQPPGIESEKSEKLSSFPSLQKDGAKEPERKEQPLQRHPSSIPPPPLTAKDLSSPAARQHCSSPSHASGREPGAKPSTAEPSSSPQDPPKPVAAHSESSSHKPRPGPDPGPPKTKHPDRSLSSQKPSVGATKGKEPATQSLGGSSREGKGHSKSGPDVFPATPGSQNKASDGIGQGEGGPSVPLHTDRAPLDAKPQPTSGGRPLEVLEKPVHLPRPGHPGPSEPADQKLSAVGEKQTLSPKHPKPSTVKDCPTLCKQTDNRQTDKSPSQPAANTDRRAEGKKCTEALYAPAEGDKLEAGLSFVHSENRLKGAERPAAGVGKGFPEARGKGPGPQKPPTEADKPNGMKRSPSATGQSSFRSTALPEKSLSCSSSFPETRAGVREASAASSDTSSAKAAGGMLELPAPSNRDHRKAQPAGEGRTHMTKSDSLPSFRVSTLPLESHHPDPNTMGGASHRDRALSVTATVGETKGKDPAPAQPPPARKQNVGRDVTKPSPAPNTDRPISLSNEKDFVVRQRRGKESLRSSPHKKAL

SEQ ID NO: 24108 - protein, 142 aa, Artificial Sequence
  Synthetic polypeptide
ATQETVISAFPSELDHILSPPPMPFRKCSNPDVASGPGKSLKYKRQLSEDGRQLRRGSLGGALTGRYLLPNPVAGQAWPASAETSNLVRMRSQALGQSAPSLTASLKELSLPRRGSLIDSQKWNCLVKRPVCPNAGRTSPLG

SEQ ID NO: 24109 - protein, 130 aa, Artificial Sequence
  Synthetic polypeptide
ATQETVISAFPSELDHILSPPPMPFRKCSNPDVASGPGKSLKYKRQLSEDGRQLRRGSLGGALTGRYLLPNPVAGQAWPASAETSNLVRMRSQALGQSAPSLTASLKELSLPRRGSFPVCPNAGRTSPLG

SEQ ID NO: 24110 - protein, 2426 aa, Artificial Sequence
  Synthetic polypeptide
PGTIALTPTVKITWKELSLPRRGSFCRTSNRKSLIGNGQSPALPRPHSPLSAHAGNSPQDSPRNFSPSASAHFSFARSLNRTDGRRWSLASLPSSGYGTNTPSSTVSSSCSSQEKLHQLPYQPTPDELHFLSKHFCTTESIATENRCRNTPMRPRSRSLSPGRSPACCDHEIIMMNHVYKERFPKATAQMEERLKEIITSYSPDNVLPLADGVLSFTHHQIIELARDCLDKSHQGLITSRYFLELQHKLDKLLQEAHDRSESGELAFIKQLVRKILIVIARPARLLECLEFDPEEFYYLLEAAEGHAKEGQGIKTDIPRYIISQLGLNKDPLEEMAHLGNYDSGTAETPETDESVSSSNASLKLRRKPRESDFETIKLISNGAYGAVYFVRHKESRQRFAMKKINKQNLILRNQIQQAFVERDILTFAENPFVVSMYCSFETRRHLCMVMEYVEGGDCATLMKNMGPLPVDMARMYFAETVLALEYLHNYGIVHRDLKPDNLLVTSMGHIKLTDFGLSKVGLMSMTTNLYEGHIEKDAREFLDKQVCGTPEYIAPEVILRQGYGKPVDWWAMGIILYEFLVGCVPFFGDTPEELFGQVISDEINWPEKDEAPPPDAQDLITLLLRQNPLERLGTGGAYEVKQHRFFRSLDWNSLLRQKAEFIPQLESEDDTSYFDTRSEKYHHMETEEEDDTNDEDFNVEIRQFSSCSHRFSKVFSSIDRITQNSAEEKEDSVDKTKSTTLPSTETLSWSSEYSEMQQLSTSNSSDTESNRHKLSSGLLPKLAISTEGEQDEAASCPGDPHEEPGKPALPPEECAQEEPEVTTPASTISSSTLSVGSFSEHLDQINGRSECVDSTDNSSKPSSEPASHMARQRLESTEKKKISGKVTKSLSASALSLMIPGDMFAVSPLGSPMSPHSLSSDPSSSRDSSPSRDSSAASASPHQPIVIHSSGKNYGFTIRAIRVYVGDSDIYTVHHIVWNVEEGSPACQAGLKAGDLITHINGEPVHGLVHTEVIELLLKSGNKVSITTTPFENTSIKTGPARRNSYKSRMVRRSKKSKKKESLERRRSLFKKLAKQPSPLLHTSRSFSCLNRSLSSGESLPGSPTHSLSPRSPTPSYRSTPDFPSGTNSSQSSSPSSSAPNSPAGSGHIRPSTLHGLAPKLGGQRYRSGRRKSAGNIPLSPLARTPSPTPQPTSPQRSPSPLLGHSLGNSKIAQAFPSKMHSPPTIVRHIVRPKSAEPPRSPLLKRVQSEEKLSPSYGSDKKHLCSRKHSLEVTQEEVQREQSQREAPLQSLDENVCDVPPLSRARPVEQGCLKRPVSRKVGRQESVDDLDRDKLKAKVVVKKADGFPEKQESHQKSHGPGSDLENFALFKLEEREKKVYPKAVERSSTFENKASMQEAPPLGSLLKDALHKQASVRASEGAMSDGRVPAEHRQGGGDFRRAPAPGTLQDGLCHSLDRGISGKGEGTEKSSQAKELLRCEKLDSKLANIDYLRKKMSLEDKEDNLCPVLKPKMTAGSHECLPGNPVRPTGGQQEPPPASESRAFVSSTHAAQMSAVSFVPLKALTGRVDSGTEKPGLVAPESPVRKSPSEYKLEGRSVSCLKPIEGTLDIALLSGPQASKTELPSPESAQSPSPSGDVRASVPPVLPSSSGKKNDTTSARELSPSSLKMNKSYLLEPWFLPPSRGLQNSPAVSLPDPEFKRDRKGPHPTARSPGTVMESNPQQREGSSPKHQDHTTDPKLLTCLGQNLHSPDLARPRCPLPPEASPSREKPGLRESSERGPPTARSERSAARADTCREPSMELCFPETAKTSDNSKNLLSVGRTHPDFYTQTQAMEKAWAPGGKTNHKDGPGEARPPPRDNSSLHSAGIPCEKELGKVRRGVEPKPEALLARRSLQPPGIESEKSEKLSSFPSLQKDGAKEPERKEQPLQRHPSSIPPPPLTAKDLSSPAARQHCSSPSHASGREPGAKPSTAEPSSSPQDPPKPVAAHSESSSHKPRPGPDPGPPKTKHPDRSLSSQKPSVGATKGKEPATQSLGGSSREGKGHSKSGPDVFPATPGSQNKASDGIGQGEGGPSVPLHTDRAPLDAKPQPTSGGRPLEVLEKPVHLPRPGHPGPSEPADQKLSAVGEKQTLSPKHPKPSTVKDCPTLCKQTDNRQTDKSPSQPAANTDRRAEGKKCTEALYAPAEGDKLEAGLSFVHSENRLKGAERPAAGVGKGFPEARGKGPGPQKPPTEADKPNGMKRSPSATGQSSFRSTALPEKSLSCSSSFPETRAGVREASAASSDTSSAKAAGGMLELPAPSNRDHRKAQPAGEGRTHMTKSDSLPSFRVSTLPLESHHPDPNTMGGASHRDRALSVTATVGETKGKDPAPAQPPPARKQNVGRDVTKPSPAPNTDRPISLSNEKDFVVRQRRGKESLRSSPHKKAL

SEQ ID NO: 24111 - protein, 4 aa, Artificial Sequence
  Synthetic polypeptide
PGRS

SEQ ID NO: 24112 - protein, 4 aa, Artificial Sequence
  Synthetic polypeptide
PGRS

SEQ ID NO: 24113 - protein, 4 aa, Artificial Sequence
  Synthetic polypeptide
PGRS

SEQ ID NO: 24114 - protein, 4 aa, Artificial Sequence
  Synthetic polypeptide
PGRS

SEQ ID NO: 24115 - protein, 4 aa, Artificial Sequence
  Synthetic polypeptide
PGRS

SEQ ID NO: 24116 - protein, 4 aa, Artificial Sequence
  Synthetic polypeptide
PGRS

SEQ ID NO: 24117 - protein, 4 aa, Artificial Sequence
  Synthetic polypeptide
PGRS

SEQ ID NO: 24118 - protein, 4 aa, Artificial Sequence
  Synthetic polypeptide
PGRS

SEQ ID NO: 24119 - protein, 4 aa, Artificial Sequence
  Synthetic polypeptide
PGRS

SEQ ID NO: 24120 - protein, 4 aa, Artificial Sequence
  Synthetic polypeptide
PGRS

SEQ ID NO: 24121 - protein, 4 aa, Artificial Sequence
  Synthetic polypeptide
PGRS

SEQ ID NO: 24122 - protein, 58 aa, Artificial Sequence
  Synthetic polypeptide
TMTRDHCSHSYSQNNLEGAESPQKRKFLPNKQPEKLNRQWAVTSIASTTLTSLCSCRK

SEQ ID NO: 24123 - protein, 58 aa, Artificial Sequence; identical to SEQ ID NO: 24122
  Synthetic polypeptide

SEQ ID NO: 24124 - protein, 2423 aa, Artificial Sequence
  Synthetic polypeptide
PGTIALTPTVKITWKELSLPRRGSFCRTSNRKSLIGNGQSPALPRPHSPLSAHAGNSPQDSPRNFSPSASAHFSFARRTDGRRWSLASLPSSGYGTNTPSSTVSSSCSSQEKLHQLPYQPTPDELHFLSKHFCTTESIATENRCRNTPMRPRSRSLSPGRSPACCDHEIIMMNHVYKERFPKATAQMEERLKEIITSYSPDNVLPLADGVLSFTHHQIIELARDCLDKSHQGLITSRYFLELQHKLDKLLQEAHDRSESGELAFIKQLVRKILIVIARPARLLECLEFDPEEFYYLLEAAEGHAKEGQGIKTDIPRYIISQLGLNKDPLEEMAHLGNYDSGTAETPETDESVSSSNASLKLRRKPRESDFETIKLISNGAYGAVYFVRHKESRQRFAMKKINKQNLILRNQIQQAFVERDILTFAENPFVVSMYCSFETRRHLCMVMEYVEGGDCATLMKNMGPLPVDMARMYFAETVLALEYLHNYGIVHRDLKPDNLLVTSMGHIKLTDFGLSKVGLMSMTTNLYEGHIEKDAREFLDKQVCGTPEYIAPEVILRQGYGKPVDWWAMGIILYEFLVGCVPFFGDTPEELFGQVISDEINWPEKDEAPPPDAQDLITLLLRQNPLERLGTGGAYEVKQHRFFRSLDWNSLLRQKAEFIPQLESEDDTSYFDTRSEKYHHMETEEEDDTNDEDFNVEIRQFSSCSHRFSKVFSSIDRITQNSAEEKEDSVDKTKSTTLPSTETLSWSSEYSEMQQLSTSNSSDTESNRHKLSSGLLPKLAISTEGEQDEAASCPGDPHEEPGKPALPPEECAQEEPEVTTPASTISSSTLSVGSFSEHLDQINGRSECVDSTDNSSKPSSEPASHMARQRLESTEKKKISGKVTKSLSASALSLMIPGDMFAVSPLGSPMSPHSLSSDPSSSRDSSPSRDSSAASASPHQPIVIHSSGKNYGFTIRAIRVYVGDSDIYTVHHIVWNVEEGSPACQAGLKAGDLITHINGEPVHGLVHTEVIELLLKSGNKVSITTTPFENTSIKTGPARRNSYKSRMVRRSKKSKKKESLERRRSLFKKLAKQPSPLLHTSRSFSCLNRSLSSGESLPGSPTHSLSPRSPTPSYRSTPDFPSGTNSSQSSSPSSSAPNSPAGSGHIRPSTLHGLAPKLGGQRYRSGRRKSAGNIPLSPLARTPSPTPQPTSPQRSPSPLLGHSLGNSKIAQAFPSKMHSPPTIVRHIVRPKSAEPPRSPLLKRVQSEEKLSPSYGSDKKHLCSRKHSLEVTQEEVQREQSQREAPLQSLDENVCDVPPLSRARPVEQGCLKRPVSRKVGRQESVDDLDRDKLKAKVVVKKADGFPEKQESHQKSHGPGSDLENFALFKLEEREKKVYPKAVERSSTFENKASMQEAPPLGSLLKDALHKQASVRASEGAMSDGRVPAEHRQGGGDFRRAPAPGTLQDGLCHSLDRGISGKGEGTEKSSQAKELLRCEKLDSKLANIDYLRKKMSLEDKEDNLCPVLKPKMTAGSHECLPGNPVRPTGGQQEPPPASESRAFVSSTHAAQMSAVSFVPLKALTGRVDSGTEKPGLVAPESPVRKSPSEYKLEGRSVSCLKPIEGTLDIALLSGPQASKTELPSPESAQSPSPSGDVRASVPPVLPSSSGKKNDTTSARELSPSSLKMNKSYLLEPWFLPPSRGLQNSPAVSLPDPEFKRDRKGPHPTARSPGTVMESNPQQREGSSPKHQDHTTDPKLLTCLGQNLHSPDLARPRCPLPPEASPSREKPGLRESSERGPPTARSERSAARADTCREPSMELCFPETAKTSDNSKNLLSVGRTHPDFYTQTQAMEKAWAPGGKTNHKDGPGEARPPPRDNSSLHSAGIPCEKELGKVRRGVEPKPEALLARRSLQPPGIESEKSEKLSSFPSLQKDGAKEPERKEQPLQRHPSSIPPPPLTAKDLSSPAARQHCSSPSHASGREPGAKPSTAEPSSSPQDPPKPVAAHSESSSHKPRPGPDPGPPKTKHPDRSLSSQKPSVGATKGKEPATQSLGGSSREGKGHSKSGPDVFPATPGSQNKASDGIGQGEGGPSVPLHTDRAPLDAKPQPTSGGRPLEVLEKPVHLPRPGHPGPSEPADQKLSAVGEKQTLSPKHPKPSTVKDCPTLCKQTDNRQTDKSPSQPAANTDRRAEGKKCTEALYAPAEGDKLEAGLSFVHSENRLKGAERPAAGVGKGFPEARGKGPGPQKPPTEADKPNGMKRSPSATGQSSFRSTALPEKSLSCSSSFPETRAGVREASAASSDTSSAKAAGGMLELPAPSNRDHRKAQPAGEGRTHMTKSDSLPSFRVSTLPLESHHPDPNTMGGASHRDRALSVTATVGETKGKDPAPAQPPPARKQNVGRDVTKPSPAPNTDRPISLSNEKDFVVRQRRGKESLRSSPHKKAL

SEQ ID NO: 24125 - protein, 50 aa, Artificial Sequence
  Synthetic polypeptide
PGTIALTPTVKITWKELSLPRRGSLIDSQKWNCLVKRPVCPNAGRTSPLG

SEQ ID NO: 24126 - protein, 53 aa, Artificial Sequence
  Synthetic polypeptide
TMTRDHCSHSYSQNNLEGAESPQKRKFDRFPEVELLGQTPCVSKCWENITPWM

SEQ ID NO: 24127 - protein, 38 aa, Artificial Sequence
  Synthetic polypeptide
PGTIALTPTVKITWKELSLPRRGSFPVCPNAGRTSPLG

SEQ ID NO: 24128 - protein, 41 aa, Artificial Sequence
  Synthetic polypeptide
TMTRDHCSHSYSQNNLEGAESPQKRKFPCVSKCWENITPWM

SEQ ID NO: 24129 - protein, 26 aa, Artificial Sequence
  Synthetic polypeptide
PGTIALTPTVKITWKELSLPRRGSFN

SEQ ID NO: 24130 - protein, 29 aa, Artificial Sequence
  Synthetic polypeptide
TMTRDHCSHSYSQNNLEGAESPQKRKFQL

SEQ ID NO: 24131 - protein, 50 aa, Artificial Sequence
  Synthetic polypeptide
PGTIALTPTVKITWKELSLPRRGSLCRSSDCDWVIDKRSERNCFLGKMLL

SEQ ID NO: 24132 - protein, 50 aa, Artificial Sequence; identical to SEQ ID NO: 24131
  Synthetic polypeptide

SEQ ID NO: 24133 - protein, 31 aa, Artificial Sequence
  Synthetic polypeptide
TMTRDHCSHSYSQNNLEGAESPQKRKFVQKQ

SEQ ID NO: 24134 - protein, 31 aa, Artificial Sequence; identical to SEQ ID NO: 24133
  Synthetic polypeptide

SEQ ID NO: 24135 - protein, 73 aa, Artificial Sequence
  Synthetic polypeptide
PGTIALTPTVKITWKELSLPRRGSLIDSQKWNCLVKRSLSPTPSSPGSPCSPLLAFHFWSPVCPNAGRTSPLG

SEQ ID NO: 24136 - protein, 52 aa, Artificial Sequence
  Synthetic polypeptide
TMTRDHCSHSYSQNNLEGAESPQKRKFDRFPEVELLGQTEPESNPIQPRQSL

SEQ ID NO: 24137 - protein, 351 aa, Artificial Sequence
  Synthetic polypeptide
PGTIALTPTVKITWKELSLPRRGSLIDSQKWNCLVKRCRTSNRKSLIGNGQSPALPRPHSPLSAHAGNSPQDSPRNFSPSASAHFSFARRTDGRRWSLASLPSSGYGTNTPSSTVSSSCSSQEKLHQLPYQPTPDELHFLSKHFCTTESIATENRCRNTPMRPRSRSLSPGRSPACCDHEIIMMNHVYKERFPKATAQMEERLKEIITSYSPDNVLPLADGVLSFTHHQIIELARDCLDKSHQGLITSRYFLELQHKLDKLLQEAHDRSESGELAFIKQLVRKILIVIARPARLLECLEFDPEEFYYLLEAAEGHAKEGQGIKTDIPRYIISQLGLNKDPLEGESLGCSYL

SEQ ID NO: 24138 - protein, 70 aa, Artificial Sequence
  Synthetic polypeptide
TMTRDHCSHSYSQNNLEGAESPQKRKFDRFPEVELLGQTLPNKQPEKLNRQWAVTSIASTTLTSLCSCRK

SEQ ID NO: 24139 - protein, 70 aa, Artificial Sequence; identical to SEQ ID NO: 24138
  Synthetic polypeptide

SEQ ID NO: 24140 - protein, 2435 aa, Artificial Sequence
  Synthetic polypeptide
PGTIALTPTVKITWKELSLPRRGSLIDSQKWNCLVKRCRTSNRKSLIGNGQSPALPRPHSPLSAHAGNSPQDSPRNFSPSASAHFSFARRTDGRRWSLASLPSSGYGTNTPSSTVSSSCSSQEKLHQLPYQPTPDELHFLSKHFCTTESIATENRCRNTPMRPRSRSLSPGRSPACCDHEIIMMNHVYKERFPKATAQMEERLKEIITSYSPDNVLPLADGVLSFTHHQIIELARDCLDKSHQGLITSRYFLELQHKLDKLLQEAHDRSESGELAFIKQLVRKILIVIARPARLLECLEFDPEEFYYLLEAAEGHAKEGQGIKTDIPRYIISQLGLNKDPLEEMAHLGNYDSGTAETPETDESVSSSNASLKLRRKPRESDFETIKLISNGAYGAVYFVRHKESRQRFAMKKINKQNLILRNQIQQAFVERDILTFAENPFVVSMYCSFETRRHLCMVMEYVEGGDCATLMKNMGPLPVDMARMYFAETVLALEYLHNYGIVHRDLKPDNLLVTSMGHIKLTDFGLSKVGLMSMTTNLYEGHIEKDAREFLDKQVCGTPEYIAPEVILRQGYGKPVDWWAMGIILYEFLVGCVPFFGDTPEELFGQVISDEINWPEKDEAPPPDAQDLITLLLRQNPLERLGTGGAYEVKQHRFFRSLDWNSLLRQKAEFIPQLESEDDTSYFDTRSEKYHHMETEEEDDTNDEDFNVEIRQFSSCSHRFSKVFSSIDRITQNSAEEKEDSVDKTKSTTLPSTETLSWSSEYSEMQQLSTSNSSDTESNRHKLSSGLLPKLAISTEGEQDEAASCPGDPHEEPGKPALPPEECAQEEPEVTTPASTISSSTLSVGSFSEHLDQINGRSECVDSTDNSSKPSSEPASHMARQRLESTEKKKISGKVTKSLSASALSLMIPGDMFAVSPLGSPMSPHSLSSDPSSSRDSSPSRDSSAASASPHQPIVIHSSGKNYGFTIRAIRVYVGDSDIYTVHHIVWNVEEGSPACQAGLKAGDLITHINGEPVHGLVHTEVIELLLKSGNKVSITTTPFENTSIKTGPARRNSYKSRMVRRSKKSKKKESLERRRSLFKKLAKQPSPLLHTSRSFSCLNRSLSSGESLPGSPTHSLSPRSPTPSYRSTPDFPSGTNSSQSSSPSSSAPNSPAGSGHIRPSTLHGLAPKLGGQRYRSGRRKSAGNIPLSPLARTPSPTPQPTSPQRSPSPLLGHSLGNSKIAQAFPSKMHSPPTIVRHIVRPKSAEPPRSPLLKRVQSEEKLSPSYGSDKKHLCSRKHSLEVTQEEVQREQSQREAPLQSLDENVCDVPPLSRARPVEQGCLKRPVSRKVGRQESVDDLDRDKLKAKVVVKKADGFPEKQESHQKSHGPGSDLENFALFKLEEREKKVYPKAVERSSTFENKASMQEAPPLGSLLKDALHKQASVRASEGAMSDGRVPAEHRQGGGDFRRAPAPGTLQDGLCHSLDRGISGKGEGTEKSSQAKELLRCEKLDSKLANIDYLRKKMSLEDKEDNLCPVLKPKMTAGSHECLPGNPVRPTGGQQEPPPASESRAFVSSTHAAQMSAVSFVPLKALTGRVDSGTEKPGLVAPESPVRKSPSEYKLEGRSVSCLKPIEGTLDIALLSGPQASKTELPSPESAQSPSPSGDVRASVPPVLPSSSGKKNDTTSARELSPSSLKMNKSYLLEPWFLPPSRGLQNSPAVSLPDPEFKRDRKGPHPTARSPGTVMESNPQQREGSSPKHQDHTTDPKLLTCLGQNLHSPDLARPRCPLPPEASPSREKPGLRESSERGPPTARSERSAARADTCREPSMELCFPETAKTSDNSKNLLSVGRTHPDFYTQTQAMEKAWAPGGKTNHKDGPGEARPPPRDNSSLHSAGIPCEKELGKVRRGVEPKPEALLARRSLQPPGIESEKSEKLSSFPSLQKDGAKEPERKEQPLQRHPSSIPPPPLTAKDLSSPAARQHCSSPSHASGREPGAKPSTAEPSSSPQDPPKPVAAHSESSSHKPRPGPDPGPPKTKHPDRSLSSQKPSVGATKGKEPATQSLGGSSREGKGHSKSGPDVFPATPGSQNKASDGIGQGEGGPSVPLHTDRAPLDAKPQPTSGGRPLEVLEKPVHLPRPGHPGPSEPADQKLSAVGEKQTLSPKHPKPSTVKDCPTLCKQTDNRQTDKSPSQPAANTDRRAEGKKCTEALYAPAEGDKLEAGLSFVHSENRLKGAERPAAGVGKGFPEARGKGPGPQKPPTEADKPNGMKRSPSATGQSSFRSTALPEKSLSCSSSFPETRAGVREASAASSDTSSAKAAGGMLELPAPSNRDHRKAQPAGEGRTHMTKSDSLPSFRVSTLPLESHHPDPNTMGGASHRDRALSVTATVGETKGKDPAPAQPPPARKQNVGRDVTKPSPAPNTDRPISLSNEKDFVVRQRRGKESLRSSPHKKAL

SEQ ID NO: 24141 - protein, 65 aa, Artificial Sequence
  Synthetic polypeptide
PGTIALTPTVKITWKELSLPRRGSLIDSQKWNCLVKRLTPRSLSPTPSSPGSPCSPLLAFHFWRE

SEQ ID NO: 24142 - protein, 56 aa, Artificial Sequence
  Synthetic polypeptide
TMTRDHCSHSYSQNNLEGAESPQKRKFDRFPEVELLGQTSHSQEPESNPIQPRQSL

SEQ ID NO: 24143 - protein, 75 aa, Artificial Sequence
  Synthetic polypeptide
IPEMGKLFKGKKRPMVSLTPGGLAGGGGICYGWEGAESPQKRKFLPNKQPEKLNRQWAVTSIASTTLTSLCSCRK

SEQ ID NO: 24144 - protein, 75 aa, Artificial Sequence; identical to SEQ ID NO: 24143
  Synthetic polypeptide

SEQ ID NO: 24145 - protein, 2448 aa, Artificial Sequence
  Synthetic polypeptide
KCKFQKWANSSKERRGPWFLSPLVDWQEEEESAMDGKELSLPRRGSFCRTSNRKSLIGNGQSPALPRPHSPLSAHAGNSPQDSPRNFSPSASAHFSFARSLNRTDGRRWSLASLPSSGYGTNTPSSTVSSSCSSQEKLHQLPYQPTPDELHFLSKHFCTTESIATENRCRNTPMRPRSRSLSPGRSPACCDHEIIMMNHVYKERFPKATAQMEERLKEIITSYSPDNVLPLADGVLSFTHHQIIELARDCLDKSHQGLITSRYFLELQHKLDKLLQEAHDRSESGELAFIKQLVRKILIVIARPARLLECLEFDPEEFYYLLEAAEGHAKEGQGIKTDIPRYIISQLGLNKDPLEEMAHLGNYDSGTAETPETDESVSSSNASLKLRRKPRESDFETIKLISNGAYGAVYFVRHKESRQRFAMKKINKQNLILRNQIQQAFVERDILTFAENPFVVSMYCSFETRRHLCMVMEYVEGGDCATLMKNMGPLPVDMARMYFAETVLALEYLHNYGIVHRDLKPDNLLVTSMGHIKLTDFGLSKVGLMSMTTNLYEGHIEKDAREFLDKQVCGTPEYIAPEVILRQGYGKPVDWWAMGIILYEFLVGCVPFFGDTPEELFGQVISDEINWPEKDEAPPPDAQDLITLLLRQNPLERLGTGGAYEVKQHRFFRSLDWNSLLRQKAEFIPQLESEDDTSYFDTRSEKYHHMETEEEDDTNDEDFNVEIRQFSSCSHRFSKVFSSIDRITQNSAEEKEDSVDKTKSTTLPSTETLSWSSEYSEMQQLSTSNSSDTESNRHKLSSGLLPKLAISTEGEQDEAASCPGDPHEEPGKPALPPEECAQEEPEVTTPASTISSSTLSVGSFSEHLDQINGRSECVDSTDNSSKPSSEPASHMARQRLESTEKKKISGKVTKSLSASALSLMIPGDMFAVSPLGSPMSPHSLSSDPSSSRDSSPSRDSSAASASPHQPIVIHSSGKNYGFTIRAIRVYVGDSDIYTVHHIVWNVEEGSPACQAGLKAGDLITHINGEPVHGLVHTEVIELLLKSGNKVSITTTPFENTSIKTGPARRNSYKSRMVRRSKKSKKKESLERRRSLFKKLAKQPSPLLHTSRSFSCLNRSLSSGESLPGSPTHSLSPRSPTPSYRSTPDFPSGTNSSQSSSPSSSAPNSPAGSGHIRPSTLHGLAPKLGGQRYRSGRRKSAGNIPLSPLARTPSPTPQPTSPQRSPSPLLGHSLGNSKIAQAFPSKMHSPPTIVRHIVRPKSAEPPRSPLLKRVQSEEKLSPSYGSDKKHLCSRKHSLEVTQEEVQREQSQREAPLQSLDENVCDVPPLSRARPVEQGCLKRPVSRKVGRQESVDDLDRDKLKAKVVVKKADGFPEKQESHQKSHGPGSDLENFALFKLEEREKKVYPKAVERSSTFENKASMQEAPPLGSLLKDALHKQASVRASEGAMSDGRVPAEHRQGGGDFRRAPAPGTLQDGLCHSLDRGISGKGEGTEKSSQAKELLRCEKLDSKLANIDYLRKKMSLEDKEDNLCPVLKPKMTAGSHECLPGNPVRPTGGQQEPPPASESRAFVSSTHAAQMSAVSFVPLKALTGRVDSGTEKPGLVAPESPVRKSPSEYKLEGRSVSCLKPIEGTLDIALLSGPQASKTELPSPESAQSPSPSGDVRASVPPVLPSSSGKKNDTTSARELSPSSLKMNKSYLLEPWFLPPSRGLQNSPAVSLPDPEFKRDRKGPHPTARSPGTVMESNPQQREGSSPKHQDHTTDPKLLTCLGQNLHSPDLARPRCPLPPEASPSREKPGLRESSERGPPTARSERSAARADTCREPSMELCFPETAKTSDNSKNLLSVGRTHPDFYTQTQAMEKAWAPGGKTNHKDGPGEARPPPRDNSSLHSAGIPCEKELGKVRRGVEPKPEALLARRSLQPPGIESEKSEKLSSFPSLQKDGAKEPERKEQPLQRHPSSIPPPPLTAKDLSSPAARQHCSSPSHASGREPGAKPSTAEPSSSPQDPPKPVAAHSESSSHKPRPGPDPGPPKTKHPDRSLSSQKPSVGATKGKEPATQSLGGSSREGKGHSKSGPDVFPATPGSQNKASDGIGQGEGGPSVPLHTDRAPLDAKPQPTSGGRPLEVLEKPVHLPRPGHPGPSEPADQKLSAVGEKQTLSPKHPKPSTVKDCPTLCKQTDNRQTDKSPSQPAANTDRRAEGKKCTEALYAPAEGDKLEAGLSFVHSENRLKGAERPAAGVGKGFPEARGKGPGPQKPPTEADKPNGMKRSPSATGQSSFRSTALPEKSLSCSSSFPETRAGVREASAASSDTSSAKAAGGMLELPAPSNRDHRKAQPAGEGRTHMTKSDSLPSFRVSTLPLESHHPDPNTMGGASHRDRALSVTATVGETKGKDPAPAQPPPARKQNVGRDVTKPSPAPNTDRPISLSNEKDFVVRQRRGKESLRSSPHKKAL

SEQ ID NO: 24146 - protein, 42 aa, Artificial Sequence
  Synthetic polypeptide
INLENVNSRNGQTLQRKEEAHGFSHPWWIGRRRRNLLWMGRS

SEQ ID NO: 24147 - protein, 42 aa, Artificial Sequence; identical to SEQ ID NO: 24146
  Synthetic polypeptide

SEQ ID NO: 24148 - protein, 42 aa, Artificial Sequence; identical to SEQ ID NO: 24146
  Synthetic polypeptide

SEQ ID NO: 24149 - protein, 42 aa, Artificial Sequence; identical to SEQ ID NO: 24146
  Synthetic polypeptide

SEQ ID NO: 24150 - protein, 42 aa, Artificial Sequence; identical to SEQ ID NO: 24146
  Synthetic polypeptide

SEQ ID NO: 24151 - protein, 42 aa, Artificial Sequence; identical to SEQ ID NO: 24146
  Synthetic polypeptide

SEQ ID NO: 24152 - protein, 42 aa, Artificial Sequence; identical to SEQ ID NO: 24146
  Synthetic polypeptide

SEQ ID NO: 24153 - protein, 42 aa, Artificial Sequence; identical to SEQ ID NO: 24146
  Synthetic polypeptide

SEQ ID NO: 24154 - protein, 42 aa, Artificial Sequence; identical to SEQ ID NO: 24146
  Synthetic polypeptide

SEQ ID NO: 24155 - protein, 42 aa, Artificial Sequence; identical to SEQ ID NO: 24146
  Synthetic polypeptide

SEQ ID NO: 24156 - protein, 42 aa, Artificial Sequence; identical to SEQ ID NO: 24146
  Synthetic polypeptide

SEQ ID NO: 24157 - protein, 2445 aa, Artificial Sequence
  Synthetic polypeptide
KCKFQKWANSSKERRGPWFLSPLVDWQEEEESAMDGKELSLPRRGSFCRTSNRKSLIGNGQSPALPRPHSPLSAHAGNSPQDSPRNFSPSASAHFSFARRTDGRRWSLASLPSSGYGTNTPSSTVSSSCSSQEKLHQLPYQPTPDELHFLSKHFCTTESIATENRCRNTPMRPRSRSLSPGRSPACCDHEIIMMNHVYKERFPKATAQMEERLKEIITSYSPDNVLPLADGVLSFTHHQIIELARDCLDKSHQGLITSRYFLELQHKLDKLLQEAHDRSESGELAFIKQLVRKILIVIARPARLLECLEFDPEEFYYLLEAAEGHAKEGQGIKTDIPRYIISQLGLNKDPLEEMAHLGNYDSGTAETPETDESVSSSNASLKLRRKPRESDFETIKLISNGAYGAVYFVRHKESRQRFAMKKINKQNLILRNQIQQAFVERDILTFAENPFVVSMYCSFETRRHLCMVMEYVEGGDCATLMKNMGPLPVDMARMYFAETVLALEYLHNYGIVHRDLKPDNLLVTSMGHIKLTDFGLSKVGLMSMTTNLYEGHIEKDAREFLDKQVCGTPEYIAPEVILRQGYGKPVDWWAMGIILYEFLVGCVPFFGDTPEELFGQVISDEINWPEKDEAPPPDAQDLITLLLRQNPLERLGTGGAYEVKQHRFFRSLDWNSLLRQKAEFIPQLESEDDTSYFDTRSEKYHHMETEEEDDTNDEDFNVEIRQFSSCSHRFSKVFSSIDRITQNSAEEKEDSVDKTKSTTLPSTETLSWSSEYSEMQQLSTSNSSDTESNRHKLSSGLLPKLAISTEGEQDEAASCPGDPHEEPGKPALPPEECAQEEPEVTTPASTISSSTLSVGSFSEHLDQINGRSECVDSTDNSSKPSSEPASHMARQRLESTEKKKISGKVTKSLSASALSLMIPGDMFAVSPLGSPMSPHSLSSDPSSSRDSSPSRDSSAASASPHQPIVIHSSGKNYGFTIRAIRVYVGDSDIYTVHHIVWNVEEGSPACQAGLKAGDLITHINGEPVHGLVHTEVIELLLKSGNKVSITTTPFENTSIKTGPARRNSYKSRMVRRSKKSKKKESLERRRSLFKKLAKQPSPLLHTSRSFSCLNRSLSSGESLPGSPTHSLSPRSPTPSYRSTPDFPSGTNSSQSSSPSSSAPNSPAGSGHIRPSTLHGLAPKLGGQRYRSGRRKSAGNIPLSPLARTPSPTPQPTSPQRSPSPLLGHSLGNSKIAQAFPSKMHSPPTIVRHIVRPKSAEPPRSPLLKRVQSEEKLSPSYGSDKKHLCSRKHSLEVTQEEVQREQSQREAPLQSLDENVCDVPPLSRARPVEQGCLKRPVSRKVGRQESVDDLDRDKLKAKVVVKKADGFPEKQESHQKSHGPGSDLENFALFKLEEREKKVYPKAVERSSTFENKASMQEAPPLGSLLKDALHKQASVRASEGAMSDGRVPAEHRQGGGDFRRAPAPGTLQDGLCHSLDRGISGKGEGTEKSSQAKELLRCEKLDSKLANIDYLRKKMSLEDKEDNLCPVLKPKMTAGSHECLPGNPVRPTGGQQEPPPASESRAFVSSTHAAQMSAVSFVPLKALTGRVDSGTEKPGLVAPESPVRKSPSEYKLEGRSVSCLKPIEGTLDIALLSGPQASKTELPSPESAQSPSPSGDVRASVPPVLPSSSGKKNDTTSARELSPSSLKMNKSYLLEPWFLPPSRGLQNSPAVSLPDPEFKRDRKGPHPTARSPGTVMESNPQQREGSSPKHQDHTTDPKLLTCLGQNLHSPDLARPRCPLPPEASPSREKPGLRESSERGPPTARSERSAARADTCREPSMELCFPETAKTSDNSKNLLSVGRTHPDFYTQTQAMEKAWAPGGKTNHKDGPGEARPPPRDNSSLHSAGIPCEKELGKVRRGVEPKPEALLARRSLQPPGIESEKSEKLSSFPSLQKDGAKEPERKEQPLQRHPSSIPPPPLTAKDLSSPAARQHCSSPSHASGREPGAKPSTAEPSSSPQDPPKPVAAHSESSSHKPRPGPDPGPPKTKHPDRSLSSQKPSVGATKGKEPATQSLGGSSREGKGHSKSGPDVFPATPGSQNKASDGIGQGEGGPSVPLHTDRAPLDAKPQPTSGGRPLEVLEKPVHLPRPGHPGPSEPADQKLSAVGEKQTLSPKHPKPSTVKDCPTLCKQTDNRQTDKSPSQPAANTDRRAEGKKCTEALYAPAEGDKLEAGLSFVHSENRLKGAERPAAGVGKGFPEARGKGPGPQKPPTEADKPNGMKRSPSATGQSSFRSTALPEKSLSCSSSFPETRAGVREASAASSDTSSAKAAGGMLELPAPSNRDHRKAQPAGEGRTHMTKSDSLPSFRVSTLPLESHHPDPNTMGGASHRDRALSVTATVGETKGKDPAPAQPPPARKQNVGRDVTKPSPAPNTDRPISLSNEKDFVVRQRRGKESLRSSPHKKAL

SEQ ID NO: 24158 - protein, 70 aa, Artificial Sequence
  Synthetic polypeptide
IPEMGKLFKGKKRPMVSLTPGGLAGGGGICYGWEGAESPQKRKFDRFPEVELLGQTPCVSKCWENITPWM

SEQ ID NO: 24159 - protein, 72 aa, Artificial Sequence
  Synthetic polypeptide
KCKFQKWANSSKERRGPWFLSPLVDWQEEEESAMDGKELSLPRRGSLIDSQKWNCLVKRPVCPNAGRTSPLG

SEQ ID NO: 24160 - protein, 58 aa, Artificial Sequence
  Synthetic polypeptide
IPEMGKLFKGKKRPMVSLTPGGLAGGGGICYGWEGAESPQKRKFPCVSKCWENITPWM

SEQ ID NO: 24161 - protein, 60 aa, Artificial Sequence
  Synthetic polypeptide
KCKFQKWANSSKERRGPWFLSPLVDWQEEEESAMDGKELSLPRRGSFPVCPNAGRTSPLG

SEQ ID NO: 24162 - protein, 46 aa, Artificial Sequence
  Synthetic polypeptide
IPEMGKLFKGKKRPMVSLTPGGLAGGGGICYGWEGAESPQKRKFQL

SEQ ID NO: 24163 - protein, 48 aa, Artificial Sequence
  Synthetic polypeptide
KCKFQKWANSSKERRGPWFLSPLVDWQEEEESAMDGKELSLPRRGSFN

SEQ ID NO: 24164 - protein, 48 aa, Artificial Sequence
  Synthetic polypeptide
IPEMGKLFKGKKRPMVSLTPGGLAGGGGICYGWEGAESPQKRKFVQKQ

SEQ ID NO: 24165 - protein, 48 aa, Artificial Sequence; identical to SEQ ID NO: 24164
  Synthetic polypeptide

SEQ ID NO: 24166 - protein, 72 aa, Artificial Sequence
  Synthetic polypeptide
KCKFQKWANSSKERRGPWFLSPLVDWQEEEESAMDGKELSLPRRGSLCRSSDCDWVIDKRSERNCFLGKMLL

SEQ ID NO: 24167 - protein, 72 aa, Artificial Sequence; identical to SEQ ID NO: 24166
  Synthetic polypeptide

SEQ ID NO: 24168 - protein, 69 aa, Artificial Sequence
  Synthetic polypeptide
IPEMGKLFKGKKRPMVSLTPGGLAGGGGICYGWEGAESPQKRKFDRFPEVELLGQTEPESNPIQPRQSL

SEQ ID NO: 24169 - protein, 95 aa, Artificial Sequence
  Synthetic polypeptide
KCKFQKWANSSKERRGPWFLSPLVDWQEEEESAMDGKELSLPRRGSLIDSQKWNCLVKRSLSPTPSSPGSPCSPLLAFHFWSPVCPNAGRTSPLG

SEQ ID NO: 24170 - protein, 87 aa, Artificial Sequence
  Synthetic polypeptide
IPEMGKLFKGKKRPMVSLTPGGLAGGGGICYGWEGAESPQKRKFDRFPEVELLGQTLPNKQPEKLNRQWAVTSIASTTLTSLCSCRK

SEQ ID NO: 24171 - protein, 87 aa, Artificial Sequence; identical to SEQ ID NO: 24170
  Synthetic polypeptide

SEQ ID NO: 24172 - protein, 373 aa, Artificial Sequence
  Synthetic polypeptide
KCKFQKWANSSKERRGPWFLSPLVDWQEEEESAMDGKELSLPRRGSLIDSQKWNCLVKRCRTSNRKSLIGNGQSPALPRPHSPLSAHAGNSPQDSPRNFSPSASAHFSFARRTDGRRWSLASLPSSGYGTNTPSSTVSSSCSSQEKLHQLPYQPTPDELHFLSKHFCTTESIATENRCRNTPMRPRSRSLSPGRSPACCDHEIIMMNHVYKERFPKATAQMEERLKEIITSYSPDNVLPLADGVLSFTHHQIIELARDCLDKSHQGLITSRYFLELQHKLDKLLQEAHDRSESGELAFIKQLVRKILIVIARPARLLECLEFDPEEFYYLLEAAEGHAKEGQGIKTDIPRYIISQLGLNKDPLEGESLGCSYL

SEQ ID NO: 24173 - protein, 2457 aa, Artificial Sequence
  Synthetic polypeptide
KCKFQKWANSSKERRGPWFLSPLVDWQEEEESAMDGKELSLPRRGSLIDSQKWNCLVKRCRTSNRKSLIGNGQSPALPRPHSPLSAHAGNSPQDSPRNFSPSASAHFSFARRTDGRRWSLASLPSSGYGTNTPSSTVSSSCSSQEKLHQLPYQPTPDELHFLSKHFCTTESIATENRCRNTPMRPRSRSLSPGRSPACCDHEIIMMNHVYKERFPKATAQMEERLKEIITSYSPDNVLPLADGVLSFTHHQIIELARDCLDKSHQGLITSRYFLELQHKLDKLLQEAHDRSESGELAFIKQLVRKILIVIARPARLLECLEFDPEEFYYLLEAAEGHAKEGQGIKTDIPRYIISQLGLNKDPLEEMAHLGNYDSGTAETPETDESVSSSNASLKLRRKPRESDFETIKLISNGAYGAVYFVRHKESRQRFAMKKINKQNLILRNQIQQAFVERDILTFAENPFVVSMYCSFETRRHLCMVMEYVEGGDCATLMKNMGPLPVDMARMYFAETVLALEYLHNYGIVHRDLKPDNLLVTSMGHIKLTDFGLSKVGLMSMTTNLYEGHIEKDAREFLDKQVCGTPEYIAPEVILRQGYGKPVDWWAMGIILYEFLVGCVPFFGDTPEELFGQVISDEINWPEKDEAPPPDAQDLITLLLRQNPLERLGTGGAYEVKQHRFFRSLDWNSLLRQKAEFIPQLESEDDTSYFDTRSEKYHHMETEEEDDTNDEDFNVEIRQFSSCSHRFSKVFSSIDRITQNSAEEKEDSVDKTKSTTLPSTETLSWSSEYSEMQQLSTSNSSDTESNRHKLSSGLLPKLAISTEGEQDEAASCPGDPHEEPGKPALPPEECAQEEPEVTTPASTISSSTLSVGSFSEHLDQINGRSECVDSTDNSSKPSSEPASHMARQRLESTEKKKISGKVTKSLSASALSLMIPGDMFAVSPLGSPMSPHSLSSDPSSSRDSSPSRDSSAASASPHQPIVIHSSGKNYGFTIRAIRVYVGDSDIYTVHHIVWNVEEGSPACQAGLKAGDLITHINGEPVHGLVHTEVIELLLKSGNKVSITTTPFENTSIKTGPARRNSYKSRMVRRSKKSKKKESLERRRSLFKKLAKQPSPLLHTSRSFSCLNRSLSSGESLPGSPTHSLSPRSPTPSYRSTPDFPSGTNSSQSSSPSSSAPNSPAGSGHIRPSTLHGLAPKLGGQRYRSGRRKSAGNIPLSPLARTPSPTPQPTSPQRSPSPLLGHSLGNSKIAQAFPSKMHSPPTIVRHIVRPKSAEPPRSPLLKRVQSEEKLSPSYGSDKKHLCSRKHSLEVTQEEVQREQSQREAPLQSLDENVCDVPPLSRARPVEQGCLKRPVSRKVGRQESVDDLDRDKLKAKVVVKKADGFPEKQESHQKSHGPGSDLENFALFKLEEREKKVYPKAVERSSTFENKASMQEAPPLGSLLKDALHKQASVRASEGAMSDGRVPAEHRQGGGDFRRAPAPGTLQDGLCHSLDRGISGKGEGTEKSSQAKELLRCEKLDSKLANIDYLRKKMSLEDKEDNLCPVLKPKMTAGSHECLPGNPVRPTGGQQEPPPASESRAFVSSTHAAQMSAVSFVPLKALTGRVDSGTEKPGLVAPESPVRKSPSEYKLEGRSVSCLKPIEGTLDIALLSGPQASKTELPSPESAQSPSPSGDVRASVPPVLPSSSGKKNDTTSARELSPSSLKMNKSYLLEPWFLPPSRGLQNSPAVSLPDPEFKRDRKGPHPTARSPGTVMESNPQQREGSSPKHQDHTTDPKLLTCLGQNLHSPDLARPRCPLPPEASPSREKPGLRESSERGPPTARSERSAARADTCREPSMELCFPETAKTSDNSKNLLSVGRTHPDFYTQTQAMEKAWAPGGKTNHKDGPGEARPPPRDNSSLHSAGIPCEKELGKVRRGVEPKPEALLARRSLQPPGIESEKSEKLSSFPSLQKDGAKEPERKEQPLQRHPSSIPPPPLTAKDLSSPAARQHCSSPSHASGREPGAKPSTAEPSSSPQDPPKPVAAHSESSSHKPRPGPDPGPPKTKHPDRSLSSQKPSVGATKGKEPATQSLGGSSREGKGHSKSGPDVFPATPGSQNKASDGIGQGEGGPSVPLHTDRAPLDAKPQPTSGGRPLEVLEKPVHLPRPGHPGPSEPADQKLSAVGEKQTLSPKHPKPSTVKDCPTLCKQTDNRQTDKSPSQPAANTDRRAEGKKCTEALYAPAEGDKLEAGLSFVHSENRLKGAERPAAGVGKGFPEARGKGPGPQKPPTEADKPNGMKRSPSATGQSSFRSTALPEKSLSCSSSFPETRAGVREASAASSDTSSAKAAGGMLELPAPSNRDHRKAQPAGEGRTHMTKSDSLPSFRVSTLPLESHHPDPNTMGGASHRDRALSVTATVGETKGKDPAPAQPPPARKQNVGRDVTKPSPAPNTDRPISLSNEKDFVVRQRRGKESLRSSPHKKAL

SEQ ID NO: 24174 - protein, 73 aa, Artificial Sequence
  Synthetic polypeptide
IPEMGKLFKGKKRPMVSLTPGGLAGGGGICYGWEGAESPQKRKFDRFPEVELLGQTSHSQEPESNPIQPRQSL

SEQ ID NO: 24175 - protein, 87 aa, Artificial Sequence
  Synthetic polypeptide
KCKFQKWANSSKERRGPWFLSPLVDWQEEEESAMDGKELSLPRRGSLIDSQKWNCLVKRLTPRSLSPTPSSPGSPCSPLLAFHFWRE

SEQ ID NO: 24176 - protein, 11 aa, Artificial Sequence
  Synthetic polypeptide
GQVHQGLEKPH

SEQ ID NO: 24177 - protein, 11 aa, Artificial Sequence
  Synthetic polypeptide
GQVHQGLEKPH

SEQ ID NO: 24178 - protein, 24 aa, Artificial Sequence
  Synthetic polypeptide
ARYTRGWKNHTRQRTCVKIRTEIH

SEQ ID NO: 24179 - protein, 24 aa, Artificial Sequence
  Synthetic polypeptide
ARYTRGWKNHTRQRTCVKIRTEIH

SEQ ID NO: 24180 - protein, 164 aa, Artificial Sequence
  Synthetic polypeptide
PGTPGVGKTTLGKELASKSGLKYINVGDLAREEQLYDGYDEEYDCPILDEDRVVDELDNQMREGGVIVDYHGCDFFPERWFHIVFVLRTDTNVLYERLETRGYNEKKLTDNIQCEIFQVLYEEATASYKEEIVHQLPSNKPEELENNVDQILKWIEQWIKDHNS

SEQ ID NO: 24181 - protein, 164 aa, Artificial Sequence; identical to SEQ ID NO: 24180
  Synthetic polypeptide

SEQ ID NO: 24182 - protein, 358 aa, Artificial Sequence
  Synthetic polypeptide
PVNIAVVMGSCTAGGAYVPAMADENIIVRKQGTIFLAGPPLVKAATGEEVSAEDLGGADLHCRKSGVSDHWALDDHHALHLTRKVVRNLNYQKKLDVTIEPSEEPLFPADELYGIVGANLKRSFDVREVIARIVDGSRFTEFKAFYGDTLVTGFARIFGYPVGIVGNNGVLFSESAKKGTHFVQLCCQRNIPLLFLQNITGFMVGREYEAEGIAKDGAKMVAAVACAQVPKITLIIGGSYGAGNYGMCGRAYSPRFLYIWPNARISVMGGEQAANVLATITKDQRAREGKQFSSADEAALKEPIIKKFEEEGNPYYSSARVWDDGIIDPADTRLVLGLSFSAALNAPIEKTDFGIFRM

SEQ ID NO: 24183 - protein, 62 aa, Artificial Sequence
  Synthetic polypeptide
EGGAFPLRGDRSSSPQDLCRLALCIFSSGCSSVSFMISFLTSKYRSGHGLLHRRRSLCACHG

SEQ ID NO: 24184 - protein, 62 aa, Artificial Sequence; identical to SEQ ID NO: 24183
  Synthetic polypeptide

SEQ ID NO: 24185 - protein, 158 aa, Artificial Sequence
  Synthetic polypeptide
PVNIAVVMGSCTAGGAYVPAMADENIIVRKQGTIFLAGPPLVKAATGEEVSAEDLGGADLHCRKSGVSDHWALDDHHALHLTRKVVRNLNYQKKLDVTIEPSEEPLFPADELYGIVGANLKRSFDVREVIARIVDGSRFTEFKAFYGDTLVTGIKVKN

SEQ ID NO: 24186 - protein, 124 aa, Artificial Sequence
  Synthetic polypeptide
PVNVKAATGEEVSAEDLGGADLHCRKSGVSDHWALDDHHALHLTRKVVRNLNYQKKLDVTIEPSEEPLFPADELYGIVGANLKRSFDVREVIARIVDGSRFTEFKAFYGDTLVTGIKPLEKHKT

SEQ ID NO: 24187 - protein, 44 aa, Artificial Sequence
  Synthetic polypeptide
EGGAFPLRGDRSSSPQDLCRLALCIFSSGCSSVSFMISFLTSKC

SEQ ID NO: 24188 - protein, 44 aa, Artificial Sequence; identical to SEQ ID NO: 24187
  Synthetic polypeptide

SEQ ID NO: 24189 - protein, 44 aa, Artificial Sequence; identical to SEQ ID NO: 24187
  Synthetic polypeptide

SEQ ID NO: 24190 - protein, 44 aa, Artificial Sequence; identical to SEQ ID NO: 24187
  Synthetic polypeptide

SEQ ID NO: 24191 - protein, 44 aa, Artificial Sequence; identical to SEQ ID NO: 24187
  Synthetic polypeptide

SEQ ID NO: 24192 - protein, 320 aa, Artificial Sequence
  Synthetic polypeptide
PVNVKAATGEEVSAEDLGGADLHCRKSGVSDHWALDDHHALHLTRKVVRNLNYQKKLDVTIEPSEEPLFPADELYGIVGANLKRSFDVREVIARIVDGSRFTEFKAFYGDTLVTGFARIFGYPVGIVGNNGVLFSESAKKGTHFVQLCCQRNIPLLFLQNITGFMVGREYEAEGIAKDGAKMVAAVACAQVPKITLIIGGSYGAGNYGMCGRAYSPRFLYIWPNARISVMGGEQAANVLATITKDQRAREGKQFSSADEAALKEPIIKKFEEEGNPYYSSARVWDDGIIDPADTRLVLGLSFSAALNAPIEKTDFGIFRM

SEQ ID NO: 24193 - protein, 320 aa, Artificial Sequence; identical to SEQ ID NO: 24192
  Synthetic polypeptide

SEQ ID NO: 24194 - protein, 120 aa, Artificial Sequence
  Synthetic polypeptide
PVNVKAATGEEVSAEDLGGADLHCRKSGVSDHWALDDHHALHLTRKVVRNLNYQKKLDVTIEPSEEPLFPADELYGIVGANLKRSFDVREVIARIVDGSRFTEFKAFYGDTLVTGIKVKN

SEQ ID NO: 24195 - protein, 268 aa, Artificial Sequence
  Synthetic polypeptide
PVNVKAATGEEVSAEDLGGADLHCRKSGVSDHWALDDHHALHLTRKVVRNLNYQKKLDVTIEPSEEPLFPADELYGIVGANLKRSFDVREKFFMKYFLRLDLNSYNSTWQHGFARIFGYPVGIVGNNGVLFSESAKKGTHFVQLCCQRNIPLLFLQNITGFMVGREYEAEGIAKDGAKMVAAVACAQVPKITLIIGGSYGAGNYGMCGRAYSPRFLYIWPNARISVMGGEQAANVLATITKDQRAREGKQFSSADEAALKEPIIKKFE

SEQ ID NO: 24196 - protein, 33 aa, Artificial Sequence
  Synthetic polypeptide
DSIACYGLLKRQLGKKYLLRILEVLIFIAESLE

SEQ ID NO: 24197 - protein, 33 aa, Artificial Sequence; identical to SEQ ID NO: 24196
  Synthetic polypeptide

SEQ ID NO: 24198 - protein, 33 aa, Artificial Sequence; identical to SEQ ID NO: 24196
  Synthetic polypeptide

SEQ ID NO: 24199 - protein, 33 aa, Artificial Sequence; identical to SEQ ID NO: 24196
  Synthetic polypeptide

SEQ ID NO: 24200 - protein, 33 aa, Artificial Sequence; identical to SEQ ID NO: 24196
  Synthetic polypeptide

SEQ ID NO: 24201 - protein, 20 aa, Artificial Sequence
  Synthetic polypeptide
GLSSWKRVGSNETPLLAMDC

SEQ ID NO: 24202 - protein, 20 aa, Artificial Sequence
  Synthetic polypeptide
GLSSWKRVGSNETPLLAMDC

SEQ ID NO: 24203 - protein, 20 aa, Artificial Sequence
  Synthetic polypeptide
GLSSWKRVGSNETPLLAMDC

SEQ ID NO: 24204 - protein, 20 aa, Artificial Sequence
  Synthetic polypeptide
GLSSWKRVGSNETPLLAMDC

SEQ ID NO: 24205 - protein, 20 aa, Artificial Sequence
  Synthetic polypeptide
GLSSWKRVGSNETPLLAMDC

SEQ ID NO: 24206 - protein, 140 aa, Artificial Sequence
  Synthetic polypeptide
VFQAGNVWAQMRLHCLLWTVKAATGEEVSAEDLGGADLHCRKSGVSDHWALDDHHALHLTRKVVRNLNYQKKLDVTIEPSEEPLFPADELYGIVGANLKRSFDVREVIARIVDGSRFTEFKAFYGDTLVTGIKPLEKHKT

SEQ ID NO: 24207 - protein, 336 aa, Artificial Sequence
  Synthetic polypeptide
VFQAGNVWAQMRLHCLLWTVKAATGEEVSAEDLGGADLHCRKSGVSDHWALDDHHALHLTRKVVRNLNYQKKLDVTIEPSEEPLFPADELYGIVGANLKRSFDVREVIARIVDGSRFTEFKAFYGDTLVTGFARIFGYPVGIVGNNGVLFSESAKKGTHFVQLCCQRNIPLLFLQNITGFMVGREYEAEGIAKDGAKMVAAVACAQVPKITLIIGGSYGAGNYGMCGRAYSPRFLYIWPNARISVMGGEQAANVLATITKDQRAREGKQFSSADEAALKEPIIKKFEEEGNPYYSSARVWDDGIIDPADTRLVLGLSFSAALNAPIEKTDFGIFRM

SEQ ID NO: 24208 - protein, 336 aa, Artificial Sequence; identical to SEQ ID NO: 24207
  Synthetic polypeptide

SEQ ID NO: 24209 - protein, 136 aa, Artificial Sequence
  Synthetic polypeptide
VFQAGNVWAQMRLHCLLWTVKAATGEEVSAEDLGGADLHCRKSGVSDHWALDDHHALHLTRKVVRNLNYQKKLDVTIEPSEEPLFPADELYGIVGANLKRSFDVREVIARIVDGSRFTEFKAFYGDTLVTGIKVKN

SEQ ID NO: 24210 - protein, 284 aa, Artificial Sequence
  Synthetic polypeptide
VFQAGNVWAQMRLHCLLWTVKAATGEEVSAEDLGGADLHCRKSGVSDHWALDDHHALHLTRKVVRNLNYQKKLDVTIEPSEEPLFPADELYGIVGANLKRSFDVREKFFMKYFLRLDLNSYNSTWQHGFARIFGYPVGIVGNNGVLFSESAKKGTHFVQLCCQRNIPLLFLQNITGFMVGREYEAEGIAKDGAKMVAAVACAQVPKITLIIGGSYGAGNYGMCGRAYSPRFLYIWPNARISVMGGEQAANVLATITKDQRAREGKQFSSADEAALKEPIIKKFE

SEQ ID NO: 24211 - protein, 107 aa, Artificial Sequence
  Synthetic polypeptide
ESPRFLYIWPNARISVMGGEQAANVLATITKDQRAREGKQFSSADEAALKEPIIKKFEEEGNPYYSSARVWDDGIIDPADTRLVLGLSFSAALNAPIEKTDFGIFRM

SEQ ID NO: 24212 - protein, 107 aa, Artificial Sequence; identical to SEQ ID NO: 24211
  Synthetic polypeptide

SEQ ID NO: 24213 - protein, 48 aa, Artificial Sequence
  Synthetic polypeptide
KKSTMGVKKYLKWLIMKMPHIKICAVQLKSGSEKAQDFSTFGQMLVSQ

SEQ ID NO: 24214 - protein, 48 aa, Artificial Sequence; identical to SEQ ID NO: 24213
  Synthetic polypeptide

SEQ ID NO: 24215 - protein, 48 aa, Artificial Sequence; identical to SEQ ID NO: 24213
  Synthetic polypeptide

SEQ ID NO: 24216 - protein, 48 aa, Artificial Sequence
  Synthetic polypeptide
SLALRKPKISLHLAKCSYLSDGRRAGSQCVGHDNKGPKSPGRKAVLQC

SEQ ID NO: 24217 - protein, 48 aa, Artificial Sequence; identical to SEQ ID NO: 24216
  Synthetic polypeptide

SEQ ID NO: 24218 - protein, 48 aa, Artificial Sequence; identical to SEQ ID NO: 24216
  Synthetic polypeptide

SEQ ID NO: 24219 - protein, 58 aa, Artificial Sequence
  Synthetic polypeptide
ESPRFLYIWPNARISVMGGEQAANVLATITKDQRAREGKQFSSADEAALKEPIIKKFE

SEQ ID NO: 24220 - protein, 702 aa, Artificial Sequence
  Synthetic polypeptide
PARSHAVACVNQFIISRTQALMLHIDSFIENLFALAGDEEPEVRKNVCRALVMLLEVRMDRLLPHMHNIVEYMLQRTQDQDENVALEACEFWLTLAEQPICKDVLVRHLPKLIPVLVNGMKYSDIDIILLKGDVEEDETIPDSEQDIRPRFHRSRTVAQQHDEDGIEEEDDDDDEIDDDDTISDWNLRKCSAAALDVLANVYRDELLPHILPLLKELLFHHEWVVKESGILVLGAIAEGCMQGMIPYLPELIPHLIQCLSDKKALVRSITCWTLSRYAHWVVSQPPDTYLKPLMTELLKRILDSNKRVQEAACSAFATLEEEACTELVPYLAYILDTLVFAFSKYQHKNLLILYDAIGTLADSVGHHLNKPEYIQMLMPPLIQKWNMLKDEDKDLFPLLECLSSVATALQSGFLPYCEPVYQRCVNLVQKTLAQAMLNNAQPDQYEAPDKDFMIVALDLLSGLAEGLGGNIEQLVARSNILTLMYQCMQDKMPEVRQSSFALLGDLTKACFQHVKPCIADFMPILGTNLNPEFISVCNNATWAIGEISIQMGIEMQPYIPMVLHQLVEIINRPNTPKTLLENTAITIGRLGYVCPQEVAPMLQQFIRPWCTSLRNIRDNEEKDSAFRGICTMISVNPSGVIQDFIFFCDAVASWINPKDDLRDMFCKILHGFKNQVGDENWRRFSDQFPLPLKERLAAFYGV

SEQ ID NO: 24221 - protein, 702 aa, Artificial Sequence; identical to SEQ ID NO: 24220
  Synthetic polypeptide

SEQ ID NO: 24222 - protein, 702 aa, Artificial Sequence; identical to SEQ ID NO: 24220
  Synthetic polypeptide

SEQ ID NO: 24223 - protein, 702 aa, Artificial Sequence; identical to SEQ ID NO: 24220
  Synthetic polypeptide

SEQ ID NO: 24224 - protein, 35 aa, Artificial Sequence
  Synthetic polypeptide
VVSKLCPMEPNLAHDLQGLTLLHVSISLSSVGLKL

SEQ ID NO: 24225 - protein, 35 aa, Artificial Sequence; identical to SEQ ID NO: 24224
  Synthetic polypeptide

SEQ ID NO: 24226 - protein, 35 aa, Artificial Sequence; identical to SEQ ID NO: 24224
  Synthetic polypeptide

SEQ ID NO: 24227 - protein, 35 aa, Artificial Sequence; identical to SEQ ID NO: 24224
  Synthetic polypeptide

SEQ ID NO: 24228 - protein, 35 aa, Artificial Sequence; identical to SEQ ID NO: 24224
  Synthetic polypeptide

SEQ ID NO: 24229 - protein, 35 aa, Artificial Sequence; identical to SEQ ID NO: 24224
  Synthetic polypeptide

SEQ ID NO: 24230 - protein, 18 aa, Artificial Sequence
  Synthetic polypeptide
PMTCKVSRCCMCQSVYHQ

SEQ ID NO: 24231 - protein, 18 aa, Artificial Sequence
  Synthetic polypeptide
PMTCKVSRCCMCQSVYHQ

SEQ ID NO: 24232 - protein, 18 aa, Artificial Sequence
  Synthetic polypeptide
PMTCKVSRCCMCQSVYHQ

SEQ ID NO: 24233 - protein, 18 aa, Artificial Sequence
  Synthetic polypeptide
PMTCKVSRCCMCQSVYHQ

SEQ ID NO: 24234 - protein, 18 aa, Artificial Sequence
  Synthetic polypeptide
PMTCKVSRCCMCQSVYHQ

SEQ ID NO: 24235 - protein, 18 aa, Artificial Sequence
  Synthetic polypeptide
PMTCKVSRCCMCQSVYHQ

SEQ ID NO: 24236 - protein, 21 aa, Artificial Sequence
  Synthetic polypeptide
PARSHAVACVNQFIISRTQAL

SEQ ID NO: 24237 - protein, 21 aa, Artificial Sequence
  Synthetic polypeptide
PARSHAVACVNQFIISRTQAL

SEQ ID NO: 24238 - protein, 407 aa, Artificial Sequence
  Synthetic polypeptide
GASLPGRPSSEMWGAPLPHRPVWDVRSASARPRPRLGGTSRSSKGRSLIGKVDGTSHVTGKGVTVETVFSVDEFSASVLTGKLTTVFLPIVYTIVFVVGLPSNGMALWVFLFRTKKKHPAVIYMANLALADLLSVIWFPLKIAYHIHGNNWIYGEALCNVLIGFFYGNMYCSILFMTCLSVQRYWVIVNPMGHSRKKANIAIGISLAIWLLILLVTIPLYVVKQTIFIPALNITTCHDVLPEQLLVGDMFNYFLSLAIGVFLFPAFLTASAYVLMIRMLRSSAMDENSEKKRKRAIKLIVTVLAMYLICFTPSNLLLVVHYFLIKSQGQSHVYALYIVALCLSTLNSCIDPFVYYFVSHDFRDHAKNALLCRSVRTVKQMQVSLTSKKHSRKSSSYSSSSTTVKTSY

SEQ ID NO: 24239 - protein, 57 aa, Artificial Sequence
  Synthetic polypeptide
GAPLPGRDPVWEEPVDPLKEEALLVRLMAHPTSLEKELQLKQSFLWMSFLHLSSLEN

SEQ ID NO: 24240 - protein, 29 aa, Artificial Sequence
  Synthetic polypeptide
DVGSAFAPPPCLGCEERLCQAATPSGRNQ

SEQ ID NO: 24241 - protein, 108 aa, Artificial Sequence
  Synthetic polypeptide
GASLPGRPSSEMWGAPLPHRPVWDVRSASARPRPRLGGEERLCPAAPSEKGGDPPPGNRPVSEEPVDPLKEEALLVRLMAHPTSLEKELQLKQSFLWMSFLHLSSLEN

SEQ ID NO: 24242 - protein, 40 aa, Artificial Sequence
  Synthetic polypeptide
GAPLPGRDPVWEVRSVSAQPPRLRREETLRPATAPSQKNQ

SEQ ID NO: 24243 - protein, 384 aa, Artificial Sequence
  Synthetic polypeptide
EGRRPSARQPPRLRRTSRSSKGRSLIGKVDGTSHVTGKGVTVETVFSVDEFSASVLTGKLTTVFLPIVYTIVFVVGLPSNGMALWVFLFRTKKKHPAVIYMANLALADLLSVIWFPLKIAYHIHGNNWIYGEALCNVLIGFFYGNMYCSILFMTCLSVQRYWVIVNPMGHSRKKANIAIGISLAIWLLILLVTIPLYVVKQTIFIPALNITTCHDVLPEQLLVGDMFNYFLSLAIGVFLFPAFLTASAYVLMIRMLRSSAMDENSEKKRKRAIKLIVTVLAMYLICFTPSNLLLVVHYFLIKSQGQSHVYALYIVALCLSTLNSCIDPFVYYFVSHDFRDHAKNALLCRSVRTVKQMQVSLTSKKHSRKSSSYSSSSTTVKTSY

SEQ ID NO: 24244 - protein, 375 aa, Artificial Sequence
  Synthetic polypeptide
PPRLGGTSRSSKGRSLIGKVDGTSHVTGKGVTVETVFSVDEFSASVLTGKLTTVFLPIVYTIVFVVGLPSNGMALWVFLFRTKKKHPAVIYMANLALADLLSVIWFPLKIAYHIHGNNWIYGEALCNVLIGFFYGNMYCSILFMTCLSVQRYWVIVNPMGHSRKKANIAIGISLAIWLLILLVTIPLYVVKQTIFIPALNITTCHDVLPEQLLVGDMFNYFLSLAIGVFLFPAFLTASAYVLMIRMLRSSAMDENSEKKRKRAIKLIVTVLAMYLICFTPSNLLLVVHYFLIKSQGQSHVYALYIVALCLSTLNSCIDPFVYYFVSHDFRDHAKNALLCRSVRTVKQMQVSLTSKKHSRKSSSYSSSSTTVKTSY

SEQ ID NO: 24245 - protein, 119 aa, Artificial Sequence
  Synthetic polypeptide
GALPPGSHPVWDVRSVSARQPPRPGGRWGSAPTRPAAPSGREVGGDQPPARPAAPSGRKVGGPAPRPASRPVWEEPVDPLKEEALLVRLMAHPTSLEKELQLKQSFLWMSFLHLSSLEN

SEQ ID NO: 24246 - protein, 63 aa, Artificial Sequence
  Synthetic polypeptide
GASPPGSHPVREGGGGQPPPGQPPRPGGRWGGISPLPGQPPRPGGRWGGQPPARLAAPSGRNQ

SEQ ID NO: 24247 - protein, 961 aa, Artificial Sequence
  Synthetic polypeptide
TCVASPLSLSSSCSSCVGRACFAFAFHHDLFDLLPSSSQRLNPGALLPVLTDPALNDLYVISTFKLQTKSSATIFGLYSSTDNSKYFEFTVMGRLNKAILRYLKNDGKVHLVVFNNLQLADGRRHRILLRLSNLQRGAGSLELYLDCIQVDSVHNLPRAFAGPSQKPETIELRTFQRKPQDFLEELKLVVRGSLFQVASLQDCFLQQSEPLAATGTGDFNRQFLGQMTQLNQLLGEVKDLLRQQVKETSFLRNTIAECQACGPLKFQSPTPSTVVPPAPPAPPTRPPRRCDSNPCFRGVQCTDSRDGFQCGPCPEGYTGNGITCIDVDECKYHPCYPGVHCINLSPGFRCDACPVGFTGPMVQGVGISFAKSNKQVCTDIDECRNGACVPNSICVNTLGSYRCGPCKPGYTGDQIRGCKAERNCRNPELNPCSVNAQCIEERQGDVTCVCGVGWAGDGYICGKDVDIDSYPDEELPCSARNCKKDNCKYVPNSGQEDADRDGIGDACDEDADGDGILNEQDNCVLIHNVDQRNSDKDIFGDACDNCLSVLNNDQKDTDGDGRGDACDDDMDGDGIKNILDNCPKFPNRDQRDKDGDGVGDACDSCPDVSNPNQSDVDNDLVGDSCDTNQDSDGDGHQDSTDNCPTVINSAQLDTDKDGIGDECDDDDDNDGIPDLVPPGPDNCRLVPNPAQEDSNSDGVGDICESDFDQDQVIDRIDVCPENAEVTLTDFRAYQTVVLDPEGDAQIDPNWVVLNQGMEIVQTMNSDPGLAVGYTAFNGVDFEGTFHVNTQTDDDYAGFIFGYQDSSSFYVVMWKQTEQTYWQATPFRAVAEPGIQLKAVKSKTGPGEHLRNSLWHTGDTSDQVRLLWKDSRNVGWKDKVSYRWFLQHRPQVGYIRVRFYEGSELVADSGVTIDTTMRGGRLGVFCFSQENIIWSNLKYRCNDTIPEDFQEFQTQNFDRFDN

SEQ ID NO: 24248 - protein, 67 aa, Artificial Sequence
  Synthetic polypeptide
WEVIGSRRDSTLTVLIIMSSHESWLFEHVSHLPFLSLPPAPAVWDVPALPSPSTMISLTFSHLPVRG

SEQ ID NO: 24249 - protein, 332 aa, Artificial Sequence
  Synthetic polypeptide
CSDGDGHQDSTDNCPTVINSAQLDTDKDGIGDECDDDDDNDGIPDLVPPGPDNCRLVPNPAQEDSNSDGVGDICESDFDQDQVIDRIDVCPENAEVTLTDFRAYQTVVLDPEGDAQIDPNWVVLNQGMEIVQTMNSDPGLAVGYTAFNGVDFEGTFHVNTQTDDDYAGFIFGYQDSSSFYVVMWKQTEQTYWQATPFRAVAEPGIQLKAVKSKTGPGEHLRNSLWHTGDTSDQVRLLWKDSRNVGWKDKVSYRWFLQHRPQVGYIRVRFYEGSELVADSGVTIDTTMRGGRLGVFCFSQENIIWSNLKYRCNDTIPEDFQEFQTQNFDRFDN

SEQ ID NO: 24250 - protein, 332 aa, Artificial Sequence; identical to SEQ ID NO: 24249
  Synthetic polypeptide

SEQ ID NO: 24251 - protein, 129 aa, Artificial Sequence
  Synthetic polypeptide
TYFPVSSHLNFFICKEEINKCIAQVMVKNQDNVVMEMGTRTAQTTAPPSLTVPSWTPIRMELVTSVMMMMTMMVSQTWCPLDQTTAGWSPTQPRRIATATEWETSVSLTLTRTRSSIGSTSAQRTQRSP

SEQ ID NO: 24252 - protein, 129 aa, Artificial Sequence; identical to SEQ ID NO: 24251
  Synthetic polypeptide

SEQ ID NO: 24253 - protein, 29 aa, Artificial Sequence
  Synthetic polypeptide
RLKEIKACNLEPGTVSINGIIMIRHFSSG

SEQ ID NO: 24254 - protein, 29 aa, Artificial Sequence
  Synthetic polypeptide
RLKEIKACNLEPGTVSINGIIMIRHFSSG

SEQ ID NO: 24255 - protein, 29 aa, Artificial Sequence
  Synthetic polypeptide
RLKEIKACNLEPGTVSINGIIMIRHFSSG

SEQ ID NO: 24256 - protein, 9 aa, Artificial Sequence
  Synthetic polypeptide
SLAQSALMA

SEQ ID NO: 24257 - protein, 9 aa, Artificial Sequence
  Synthetic polypeptide
SLAQSALMA

SEQ ID NO: 24258 - protein, 9 aa, Artificial Sequence
  Synthetic polypeptide
SLAQSALMA

SEQ ID NO: 24259 - protein, 8 aa, Artificial Sequence
  Synthetic polypeptide
GLSSHEEL

SEQ ID NO: 24260 - protein, 8 aa, Artificial Sequence
  Synthetic polypeptide
GLSSHEEL

SEQ ID NO: 24261 - protein, 532 aa, Artificial Sequence
  Synthetic polypeptide
RGAFHHDCKFPEASPAMRNSEKHAGVSCVTASVDDIQFEETARVGQVITIKAKVTRAFSTSMEISIKVMVQDMLTGIEKLVSVAFSTFVAKPVGKEKIHLKPVTLLTEQDHVEHNLAAERRKVRLQHEDTFNNLMKESSKFDDLIFDEEEGAVSTRGTSVQSIELVLPPHANHHGNTFGGQIMAWMETVATISASRLCWAHPFLKSVDMFKFRGPSTVGDRLVFTAIVNNTFQTCVEVGVRVEAFDCQEWAEGRGRHINSAFLIYNAADDKENLITFPRIQPISKDDFRRYRGAIARKRIRLGRKYVISHKEEVPLCIHWDISKQASLSDSNVEALKKLAAKRGWEVTSTVEKIKIYTLEEHDVLSVWVEKHVGSPAHLAYRLLSDFTKRPLWDPHFVSCEVIDWVSEDDQLYHITCPILNDDKPKDLVVLVSRRKPLKDGNTYTVAVKSVILPSVPPSPQYIRSEIICAGFLIHAIDSNSCIVSYFNHMSASILPYFAGNLGGWSKSIEETAASCIQFLENPPDDGFVSTF

SEQ ID NO: 24262 - protein, 30 aa, Artificial Sequence
  Synthetic polypeptide
GTLRNMLEFPALQPQWMTYSLRRQLELDKL

SEQ ID NO: 24263 - protein, 30 aa, Artificial Sequence; identical to SEQ ID NO: 24262
  Synthetic polypeptide

SEQ ID NO: 24264 - protein, 144 aa, Artificial Sequence
  Synthetic polypeptide
RGAFHHDCKFPEASPAMRNSEKHAGVSCVTASVDDIQFEETARVGQVITIKAKVTRAFSTSMEISIKVMVQDMLTGIEKLVSVAFSTFVAKPVGKEKIHLKPVTLLTEQDHVEHNLAAERRKVRLQHEDTFNNLMKESSKFDGQ

SEQ ID NO: 24265 - protein, 46 aa, Artificial Sequence
  Synthetic polypeptide
MNGTNWKLQKQALLYISNVWLKWKVPRKGMKTRVHLHLEPRPGTPG

SEQ ID NO: 24266 - protein, 46 aa, Artificial Sequence; identical to SEQ ID NO: 24265
  Synthetic polypeptide

SEQ ID NO: 24267 - protein, 28 aa, Artificial Sequence
  Synthetic polypeptide
MEQTGNSRNKPFFTFLMFGLNGRCQGRG

SEQ ID NO: 24268 - protein, 28 aa, Artificial Sequence
  Synthetic polypeptide
MEQTGNSRNKPFFTFLMFGLNGRCQGRG

SEQ ID NO: 24269 - protein, 76 aa, Artificial Sequence [sequence omitted]

SEQ ID NO: 24270 - protein, 76 aa, Artificial Sequence [sequence omitted]

SEQ ID NO: 24271 - protein, 28 aa, Artificial Sequence
  Synthetic polypeptide
DPEERIQSCCIWNSDLENCGITENLTER

SEQ ID NO: 24272 - protein, 28 aa, Artificial Sequence
  Synthetic polypeptide
DPEERIQSCCIWNSDLENCGITENLTER

SEQ ID NO: 24273 - protein, 28 aa, Artificial Sequence
  Synthetic polypeptide
DPEERIQSCCIWNSDLENCGITENLTER

SEQ ID NO: 24274 - protein, 28 aa, Artificial Sequence
  Synthetic polypeptide
DPEERIQSCCIWNSDLENCGITENLTER

SEQ ID NO: 24275 - protein, 28 aa, Artificial Sequence
  Synthetic polypeptide
DPEERIQSCCIWNSDLENCGITENLTER

SEQ ID NO: 24276 - protein, 8 aa, Artificial Sequence
  Synthetic polypeptide
RTVVSRKT

SEQ ID NO: 24277 - protein, 8 aa, Artificial Sequence
  Synthetic polypeptide
RTVVSRKT

SEQ ID NO: 24278 - protein, 8 aa, Artificial Sequence
  Synthetic polypeptide
RTVVSRKT

SEQ ID NO: 24279 - protein, 8 aa, Artificial Sequence
  Synthetic polypeptide
RTVVSRKT

SEQ ID NO: 24280 - protein, 8 aa, Artificial Sequence
  Synthetic polypeptide
RTVVSRKT

SEQ ID NO: 24281 - protein, 871 aa, Artificial Sequence
  Synthetic polypeptide
PRELWYHGKLDRTIAEERLRQAGKSGSYLIRESDRRPGSFVLSFLSQMNVVNHFRIIAMCGDYYIGGRRFSSLSDLIGYYSHVSCLLKGEKLLYPVAPPEPVEDRRRVRAILPYTKVPDTDEISFLKGDMFIVHNELEDGWMWVTNLRTDEQGLIVEDLVEEVGREEDPHEGKIWFHGKISKQEAYNLLMTVGQVCSFLVRPSDNTPGDYSLYFRTNENIQRFKICPTPNNQFMMGGRYYNSIGDIIDHYRKEQIVEGYYLKEPVPMQDQEQVLNDTVDGKEIYNTIRRKTKDAFYKNIVKKGYLLKKGKGKRWKNLYFILEGSDAQLIYFESEKRATKPKGLIDLSVCSVYVVHDSLFGRPNCFQIVVQHFSEEHYIFYFAGETPEQAEDWMKGLQAFCNLRKSSPGTSNKRLRQVSSLVLHIEEAHKLPVKHFTNPYCNIYLNSVQVAKTHAREGQNPVWSEEFVFDDLPPDINRFEITLSNKTKKSKDPDILFMRCQLSRLQKGHATDEWFLLSSHIPLKGIEPGSLRVRARYSMEKIMPEEEYSEFKELILQKELHVVYALSHVCGQDRTLLASILLRIFLHEKLESLLLCTLNDREISMEDEATTLFRATTLASTLMEQYMKATATQFVHHALKDSILKIMESKQSCELSPSKLEKNEDVNTNLTHLLNILSELVEKIFMASEILPPTLRYIYGCLQKSVQHKWPTNTTMRTRVVSGFVFLRLICPAILNPRMFNIISDSPSPIAARTLILVAKSVQNLANLVEFGAKEPYMEGVNPFIKSNKHRMIMFLDELGNVPELPDTTEHSRTDLSRDLAALHEICVAHSDELRTLSNERGAQQHVLKKLLAITELLQQKQNQYTKTNDVR

SEQ ID NO: 24282 - protein, 871 aa, Artificial Sequence; identical to SEQ ID NO: 24281
  Synthetic polypeptide

SEQ ID NO: 24283 - protein, 871 aa, Artificial Sequence; identical to SEQ ID NO: 24281
  Synthetic polypeptide

SEQ ID NO: 24284 - protein, 871 aa, Artificial Sequence; identical to SEQ ID NO: 24281
  Synthetic polypeptide

SEQ ID NO: 24285 - protein, 363 aa, Artificial Sequence
  Synthetic polypeptide
PRELWYHGKLDRTIAEERLRQAGKSGSYLIRESDRRPGSFVLSFLSQMNVVNHFRIIAMCGDYYIGGRRFSSLSDLIGYYSHVSCLLKGEKLLYPVAPPEPVEDRRRVRAILPYTKVPDTDEISFLKGDMFIVHNELEDGWMWVTNLRTDEQGLIVEDLVEEVGREEDPHEGKIWFHGKISKQEAYNLLMTVGQVCSFLVRPSDNTPGDYSLYFRTNENIQRFKICPTPNNQFMMGGRYYNSIGDIIDHYRKEQIVEGYYLKEPVPMQDQEQVLNDTVDGKEIYNTIRRKTKDAFYKNIVKKGYLLKKGKGKRWKNLYFILEGSDAQLIYFESEKRATKPKGLIDLSVCSVYVVHDSLFGRCS

SEQ ID NO: 24286 - protein, 44 aa, Artificial Sequence
  Synthetic polypeptide
AEVRFCFWRLHTQVPNSLRRAVQLWLLSHITCIFASLAGCSFSL

SEQ ID NO: 24287 - protein, 44 aa, Artificial Sequence; identical to SEQ ID NO: 24286
  Synthetic polypeptide

SEQ ID NO: 24288 - protein, 27 aa, Artificial Sequence
  Synthetic polypeptide
AAENSKKRTELRSDSVSGVCIRKSPTR

SEQ ID NO: 24289 - protein, 27 aa, Artificial Sequence
  Synthetic polypeptide
AAENSKKRTELRSDSVSGVCIRKSPTR

SEQ ID NO: 24290 - protein, 356 aa, Artificial Sequence
  Synthetic polypeptide
GQILFLASAYASPQLAEESCSAMAAVTHYLYLCQFSWMLIQSVNFWYVLVMNDEHTERRYLLFFLLSWGLPAFVVILLIVILKGIYHQSMSQIYGLIHGDLCFIPNVYAALFTAALVPLTCLVVVFVVFIHAYQVKPQWKAYDDVFRGRTNAAEIPLILYLFALISVTWLWGGLHMAYRHFWMLVLFVIFNSLQGLYVFMVYFILHNQMCCPMKASYTVEMNGHPGPSTAFFTPGSGMPPAGGEISKSTQNLIGAMEEVPPDWERASFQQGSQASPDLKPSPQNGATFPSSGGYGQGSLIADEESQEFDDLIFALKTGAGLSVSDNESGQGSQEGGTLTDSQIVELRRIPIADTHL

SEQ ID NO: 24291 - protein, 356 aa, Artificial Sequence; identical to SEQ ID NO: 24290
  Synthetic polypeptide

SEQ ID NO: 24292 - protein, 306 aa, Artificial Sequence
  Synthetic polypeptide
GRRAGARRGNCPIDQHHRNQCQYCRLKKCLKVGMRREAVQRGRMPPTQPNPGQYALTNGDPLNGHCYLSGYISLLLRAEPYPTSRYGSQCMQPNNIMGIENICELAARLLFSAVEWARNIPFFPDLQITDQVSLLRLTWSELFVLNAAQCSMPLHVAPLLAAAGLHASPMSADRVVAFMDHIRIFQEQVEKLKALHVDSAEYSCLKAIVLFTSDACGLSDAAHIESLQEKSQCALEEYVRSQYPNQPSRFGKLLLRLPSLRTVSSSVIEQLFFVRLVGKTPIETLIRDMLLSGSSFNWPYMSIQCS

SEQ ID NO: 24293 - protein, 33 aa, Artificial Sequence
  Synthetic polypeptide
AGGRAPGAGTVPSTSTTATSANTAASRSASKWA

SEQ ID NO: 24294 - protein, 277 aa, Artificial Sequence
  Synthetic polypeptide
PAGGRPARELSHRPAPPQPVPILPPQEVPQSGHEAGSGSARKNASNPAQSRPVRTHQRGPPQRPLLPVRLHLAAAARRALPHVALRQPVHAAQQHYGHREHLRAGRAPALQRRRVGPQHPLLPGSADHRPGVPATPHLERAVRAQRGPVLYAAARGAVAGRRRPACLAHVCRPRRGLHGPHPHLPGAGGEAQGATRRLSRVQLPQSHRAVHVRRLWPVGCGPHREPAGEVAVRTGGVREEPVPQPAQPFWQTAAATALAAHRVLLRHRAALLRPFGR

SEQ ID NO: 24295 - protein, 32 aa, Artificial Sequence
  Synthetic polypeptide
MELASGQDSSSTLLISEYFRESELCQKSLNGR

SEQ ID NO: 24296 - protein, 213 aa, Artificial Sequence
  Synthetic polypeptide
LAARTPVPLCLLANTSESQSCARSLLMADRMQIVVILSEFFNTTWQEANCANCLTNNSEELSNSTVYFLNLFNHTLTCFEHNLQGNAHSLLQTKNYSEVCKNCREAYKTLSSLYSEMQKMNELENKAEPGTHLCIDVEDAMNITRKLWSRTFNCSVPCSDTVPVIAVSVFILFLPVVFYLSSFLHSEQKKRKLILPKRLKSSTSFANIQENSN

SEQ ID NO: 24297 - protein, 61 aa, Artificial Sequence
  Synthetic polypeptide
HSHRITNPLANCACERSRLHTPYENLKPNDLSLSLITPRWDCLVAKTSSGIPLILLYDNGF

SEQ ID NO: 24298 - protein, 465 aa, Artificial Sequence
  Synthetic polypeptide
FYFTIMDSELMHSIVGSYHKPPERVFVPSFTQNEPSQNCHPANLEVTSPKILHSPNSQALILALKTLQEKIHRLELERTQAEDNLNILSREAAQYKKALENETNERNLAHQELIKQKKDISIQLSSAQSRCTLLEKQLEYTKRMVLNVEREKNMILEQQAQLQREKEQDQMKLYAKLEKLDVLEKECFRLTTTQKTAEDKIKHLEEKLKEEEHQRKLFQDKASELQTGLEISKIIMSSVSNLKHSKEKKKSSKKTKCIKRRPPWQICSKFGALPFVAEKMRQHRDPHILQKPFNVTETRCLPKPSRTTSWCKAIPPDSEKSISICDNLSELLMAMQDELDQMSMEHQELLKQMKETESHSVCDDIECELECLLKKMEIKGEQISKLKKHQDSVCKLQQKVQNSKMSEASGIQQEDSYPKGSKNIKNSPRKCLTDTNLFQKNSSFHPIRVHNLQMKLRRDDIMWEQ

SEQ ID NO: 24299 - protein, 19 aa, Artificial Sequence
  Synthetic polypeptide
MGLSSCKNKLRDPTDSTLR

SEQ ID NO: 24300 - protein, 12 aa, Artificial Sequence
  Synthetic polypeptide
NGDNNDLSGTYF

SEQ ID NO: 24301 - protein, 22 aa, Artificial Sequence
  Synthetic polypeptide
IQTAFNSCVSCFLICKMETIMI

SEQ ID NO: 24302 - protein, 25 aa, Artificial Sequence
  Synthetic polypeptide
ISQHTQNQENLNISKEKTADTNLKI

SEQ ID NO: 24303 - protein, 333 aa, Artificial Sequence
  Synthetic polypeptide
CNMSKYPGCHPKLVNILKTRKILTSQRKRQQTPTSRSEWDILLKDVQCSIISVTKTDKQEAYVLSESSMFVSKRRFILKTCGTTLLLKALVPLLKLARDYSGFDSIQSFFYSRKNFMKPSHQGYPHRNFQEEIEFLNAIFPNGAAYCMGRMNSDCWYLYTLDFPESRVISQPDQTLEILMSELDPAVMDQFYMKDGVTAKDVTRESGIRDLIPGSVIDATMFNPCGYSMNGMKSDGTYWTIHITPEPEFSYVSFETNLSQTSYDDLIRKVVEVFKPGKFVTTLFVNQSSKCRTVLASPQKIEGFKRLDCQSAMFNDYNFVFTSFAKKQQQQQS

SEQ ID NO: 24304 - protein, 19 aa, Artificial Sequence
  Synthetic polypeptide
HLKGKDSRHQPQDLSGTYF

SEQ ID NO: 24305 - protein, 41 aa, Artificial Sequence
  Synthetic polypeptide
AVVPSSLCTLPMESYLPAAAPLHTSLHWSFWDTISRSALDW

SEQ ID NO: 24306 - protein, 41 aa, Artificial Sequence; identical to SEQ ID NO: 24305
  Synthetic polypeptide

SEQ ID NO: 24307 - protein, 41 aa, Artificial Sequence; identical to SEQ ID NO: 24305
  Synthetic polypeptide

SEQ ID NO: 24308 - protein, 73 aa, Artificial Sequence
  Synthetic polypeptide
ELGCTAGGELWFHRASVPYLWNHICLRLLLCIPAFIGHFGTLFQEAPWTGEWHCHCWQQCLHNPAAFALKGSD

SEQ ID NO: 24309 - protein, 73 aa, Artificial Sequence; identical to SEQ ID NO: 24308
  Synthetic polypeptide

SEQ ID NO: 24310 - protein, 73 aa, Artificial Sequence; identical to SEQ ID NO: 24308
  Synthetic polypeptide

SEQ ID NO: 24311 - protein, 380 aa, Artificial Sequence
  Synthetic polypeptide
GSPTPVPQTGTGPWPVRNWAAQQEVSCGSIEPLYLTYGIIFACGCSFAYQPSLVILGHYFKKRLGLVNGIVTAGSSVFTILLPLLLRVLIDSVGLFYTLRVLCIFMFVLFLAGFTYRPLATSTKDKESGGSGSSLFSRKKFSPPKKIFNFAIFKVTAYAVWAVGIPLALFGYFVPYVHLMKHVNERFQDEKNKEVVLMCIGVTSGVGRLLFGRIADYVPGVKKVYLQVLSFFFIGLMSMMIPLCSIFGALIAVCLIMGLFDGCFISIMAPIAFELVGAQDVSQAIGFLLGFMSIPMTVGPPIAGLLRDKLGSYDVAFYLAGVPPLIGGAVLCFIPWIHSKKQREISKTTGKEKMEKMLENQNSLLSSSSGMFKKESDSII

SEQ ID NO: 24312 - protein, 185 aa, Artificial Sequence
  Synthetic polypeptide
GSPTPVPQTGTGPWPVRNWAAQQEVSCGSIEPLYLTYGIIFACGCSFAYQPSLVILGHYFKKRLGLVNGIVTAGSSVFTILLPLLLRVLIDSVGLFYTLRVLCIFMFVLFLAGFTYRPLATSTKDKESGGSGSSLFSRKKFSPPKKIFNFAIFKVTAYAVWAVGIPLALFGYFVPYVHLVSMLLH

SEQ ID NO: 24313 - protein, 190 aa, Artificial Sequence
  Synthetic polypeptide
GSPTPVPQTGTGPWPVRNWAAQQEVSCGSIEPLYLTYGIIFACGCSFAYQPSLVILGHYFKKRLGLVNGIVTAGSSVFTILLPLLLRVLIDSVGLFYTLRVLCIFMFVLFLAGFTYRPLATSTKDKESGGSGSSLFSRKKFSPPKKIFNFAIFKVTAYAVWAVGIPLALFGYFVPYVHLAKFSFVILKYE

SEQ ID NO: 24314 - protein, 15 aa, Artificial Sequence
  Synthetic polypeptide
MSAESTQLIILPSLQ

SEQ ID NO: 24315 - protein, 15 aa, Artificial Sequence
  Synthetic polypeptide
MSAESTQLIILPSLQ

SEQ ID NO: 24316 - protein, 15 aa, Artificial Sequence
  Synthetic polypeptide
MSAESTQLIILPSLQ

SEQ ID NO: 24317 - protein, 15 aa, Artificial Sequence
  Synthetic polypeptide
MSAESTQLIILPSLQ

SEQ ID NO: 24318 - protein, 32 aa, Artificial Sequence
  Synthetic polypeptide
SPWNCRFECQQSQPSSSFFQAFSKKRCTTKNA

SEQ ID NO: 24319 - protein, 32 aa, Artificial Sequence; identical to SEQ ID NO: 24318
  Synthetic polypeptide

SEQ ID NO: 24320 - protein, 32 aa, Artificial Sequence; identical to SEQ ID NO: 24318
  Synthetic polypeptide

SEQ ID NO: 24321 - protein, 32 aa, Artificial Sequence; identical to SEQ ID NO: 24318
  Synthetic polypeptide

SEQ ID NO: 24322 - protein, 488 aa, Artificial Sequence
  Synthetic polypeptide
RRGWLSGLSIRFEIPRVPGTAGLNVSRVNPAHHSSKPSVRKGVLPRMLEEILKTRFMVKQSMKAYKQDRALSRMLDARQLGLKLIANVTFGYTSANFSGRMPCIEVGDSIVHKARETLERAIKLVNDTKKWGARVVYGDTDSMFVLLKGATKEQSFKIGQEIAEAVTATNPKPVKLKFEKVYLPCVLQTKKRYVGYMYETLDQKDPVFDAKGIETVRRDSCPAVSKILERSLKLLFETRDISLIKQYVQRQCMKLLEGKASIQDFIFAKEYRGSFSYKPGACVPALELTRKMLTYDRRSEPQVGERVPYVIIYGTPGVPLIQLVRRPVEVLQDPTLRLNATYYITKQILPPLARIFSLIGIDVFSWYHELPRIHKATSSSRSEPEGRKGTISQYFTTLHCPVCDDLTQHGICSKCRSQPQHVAVILNQEIRELERQQEQLVKICKNCTGCFDRHIPCVSLNCPVLFKLSRVNRELSKAPYLRQLLDQF

SEQ ID NO: 24323 - protein, 488 aa, Artificial Sequence; identical to SEQ ID NO: 24322
  Synthetic polypeptide

SEQ ID NO: 24324 - protein, 488 aa, Artificial Sequence; identical to SEQ ID NO: 24322
  Synthetic polypeptide

SEQ ID NO: 24325 - protein, 488 aa, Artificial Sequence; identical to SEQ ID NO: 24322
  Synthetic polypeptide

SEQ ID NO: 24326 - protein, 11 aa, Artificial Sequence
  Synthetic polypeptide
SHHELCARINA

SEQ ID NO: 24327 - protein, 11 aa, Artificial Sequence
  Synthetic polypeptide
SHHELCARINA

SEQ ID NO: 24328 - protein, 11 aa, Artificial Sequence
  Synthetic polypeptide
SHHELCARINA

SEQ ID NO: 24329 - protein, 11 aa, Artificial Sequence
  Synthetic polypeptide
SHHELCARINA

SEQ ID NO: 24330 - protein, 11 aa, Artificial Sequence
  Synthetic polypeptide
SHHELCARINA

SEQ ID NO: 24331 - protein, 11 aa, Artificial Sequence
  Synthetic polypeptide
SHHELCARINA

SEQ ID NO: 24332 - protein, 11 aa, Artificial Sequence
  Synthetic polypeptide
SHHELCARINA

SEQ ID NO: 24333 - protein, 11 aa, Artificial Sequence
  Synthetic polypeptide
SHHELCARINA

SEQ ID NO: 24334 - protein, 37 aa, Artificial Sequence
  Synthetic polypeptide
ATMNCVPGLMHEQPGGAGAGGARLQDALPAGLPHLSA

SEQ ID NO: 24335 - protein, 37 aa, Artificial Sequence; identical to SEQ ID NO: 24334
  Synthetic polypeptide

SEQ ID NO: 24336 - protein, 37 aa, Artificial Sequence; identical to SEQ ID NO: 24334
  Synthetic polypeptide

SEQ ID NO: 24337 - protein, 37 aa, Artificial Sequence; identical to SEQ ID NO: 24334
  Synthetic polypeptide

SEQ ID NO: 24338 - protein, 37 aa, Artificial Sequence; identical to SEQ ID NO: 24334
  Synthetic polypeptide

SEQ ID NO: 24339 - protein, 37 aa, Artificial Sequence; identical to SEQ ID NO: 24334
  Synthetic polypeptide

SEQ ID NO: 24340 - protein, 37 aa, Artificial Sequence; identical to SEQ ID NO: 24334
  Synthetic polypeptide

SEQ ID NO: 24341 - protein, 37 aa, Artificial Sequence; identical to SEQ ID NO: 24334
  Synthetic polypeptide

SEQ ID NO: 24342 - protein, 57 aa, Artificial Sequence
  Synthetic polypeptide
ISLTRSNGFIKGSFPAQVLSCLPPCKMCLSPSAMIVRPLQPSGTVILEIIIMDRVIP

SEQ ID NO: 24343 - protein, 57 aa, Artificial Sequence; identical to SEQ ID NO: 24342
  Synthetic polypeptide

SEQ ID NO: 24344 - protein, 57 aa, Artificial Sequence; identical to SEQ ID NO: 24342
  Synthetic polypeptide

SEQ ID NO: 24345 - protein, 57 aa, Artificial Sequence; identical to SEQ ID NO: 24342
  Synthetic polypeptide

SEQ ID NO: 24346 - protein, 8 aa, Artificial Sequence
  Synthetic polypeptide
GLSSQVER

SEQ ID NO: 24347 - protein, 8 aa, Artificial Sequence
  Synthetic polypeptide
GLSSQVER

SEQ ID NO: 24348 - protein, 8 aa, Artificial Sequence
  Synthetic polypeptide
GLSSQVER

SEQ ID NO: 24349 - protein, 8 aa, Artificial Sequence
  Synthetic polypeptide
GLSSQVER

SEQ ID NO: 24350 - protein, 489 aa, Artificial Sequence
  Synthetic polypeptide
DVPFTFGHDCEASPAKWNGDIGNYYYGQGHPMKPHRIRMTHNLLLNYGLYRKMEIYRPHKATAEEMTKYHSDEYIKFLRSIRPDNMSEYSKQMQRFNVGEDCPVFDGLFEFCQLSTGGSVAGAVKLNRQQTDMAVNWAGGLHHAKKSEASGFCYVNDIVLAILELLKYHQRVLYIDIDIHHGDGVEEAFYTTDRVMTVSFHKYGEYFPGTGDLRDIGAGKGKYYAVNFPMRDGIDDESYGQIFKPIISKVMEMYQPSAVVLQCGADSLSGDRLGCFNLTVKGHAKCVEVVKTFNLPLLMLGGGGYTIRNVARCWTYETAVALDCEIPNELPYNDYFEYFGPDFKLHISPSNMTNQNTPEYMEKIKQRLFENLRMLPHAPGVQMQAIPEDAVHEDSGDEDGEDPDKRISIRASDKRIACDEEFSDSEDEGEGGRRNVADHKKGAKKARIEEDKKETEDKKTDVKEEDKSKDNSGEKTDTKGTKSEQLSNP

SEQ ID NO: 24351 - protein, 489 aa, Artificial Sequence; identical to SEQ ID NO: 24350
  Synthetic polypeptide

SEQ ID NO: 24352 - protein, 172 aa, Artificial Sequence
  Synthetic polypeptide
DVPFTFGHDCEASPAKWNGDIGNYYYGQGHPMKPHRIRMTHNLLLNYGLYRKMEIYRPHKATAEEMTKYHSDEYIKFLRSIRPDNMSEYSKQMQRFNVGEDCPVFDGLFEFCQLSTGGSVAGAVKLNRQQTDMAVNWAGGLHHAKKSEASGFCYVNDIVLAILELLKYVNLY

SEQ ID NO: 24353 - protein, 103 aa, Artificial Sequence
  Synthetic polypeptide
DVPFTFGHDCEASPAKWNGDIGNYYYGQGHPMKPHRIRMTHNLLLNYGLYRKMEIYRPHKATAEEMTKYHSDEYIKFLRSIRPDNMSEYSKQMQRFNVGEDCP

SEQ ID NO: 24354 - protein, 48 aa, Artificial Sequence
  Synthetic polypeptide
DLMVLKRGSFPAQTLFLPAAIRVRCDLVLLAFRHDCEVSPATWNWPAA

SEQ ID NO: 24355 - protein, 48 aa, Artificial Sequence; identical to SEQ ID NO: 24354
  Synthetic polypeptide

SEQ ID NO: 24356 - protein, 2321 aa, Artificial Sequence
  Synthetic polypeptide
DVTWSSLPSAMIVRSPQPRGTGQQLDLGTPHNLSEPCIQGCHFWNSVDQKNCALKCNDTYATVCERESCEVGCSSAEGAYEEEVLENADLPTAPFASSIGSHNMTLRWKSANFSGVKYIIQWKYAQLLGSWTYTKTVSRPSYVVKPLHPFTEYIFRVVWIFTAQLQLYSPPSPSYRTHPHGVPETAPLIRNIESSSPDTVEVSWDPPQFPGGPILGYNLRLISKNQKLDAGTQRTSFQFYSTLPNTIYRFSIAAVNEVGEGPEAESSITTSSSAVQQEEQWLFLSRKTSLRKRSLKHLVDEAHCLRLDAIYHNITGISVDVHQQIVYFSEGTLIWAKKAANMSDVSDLRIFYRGSGLISSISIDWLYQRMYFIMDELVCVCDLENCSNIEEITPPSISAPQKIVADSYNGYVFYLLRDGIYRADLPVPSGRCAEAVRIVESCTLKDFAIKPQAKRIIYFNDTAQVFMSTFLDGSASHLILPRIPFADVKSFACENNDFLVTDGKVIFQQDALSFNEFIVGCDLSHIEEFGFGNLVIFGSSSQLHPLPGRPQELSVLFGSHQALVQWKPPALAIGASPSAWQNWTYEVKVSTQDPPEVTHIFLNISGTMLNVPELQSAMKYKVSVRASSPKRPGPWSEPSVGTTLVPASEPPFIMAVKEDGLWSKPLNSFGPGEFLSSDIGNVSDMDWYNNSLYYSDTKGDVFVWLLNGTDISENYHLPSIAGAGALAFEWLGHFLYWAGKTYVIQRQSVLTGHTDIVTHVKLLVNDMVVDSVGGYLYWTTLYSVESTRLNGESSLVLQTQPWFSGKKVIALTLDLSDGLLYWLVQDSQCIHLYTAVLRGQSTGDTTITEFAAWSTSEISQNALMYYSGRLFWINGFRIITTQEIGQKTSVSVLEPARFNQFTIIQTSLKPLPGNFSFTPKVIPDSVQESSFRIEGNASSFQILWNGPPAVDWGVVFYSVEFSAHSKFLASEQHSLPVFTVEGLEPYALFNLSVTPYTYWGKGPKTSLSLRAPETVPSAPENPRIFILPSGKCCNKNEVVVEFRWNKPKHENGVLTKFEIFYNISNQSITNKTCEDWIAVNVTPSVMSFQLEGMSPRCFIAFQVRAFTSKGPGPYADVVKSTTSEINPFPHLITLLGNKIVFLDMDQNQVVWTFSAERVISAVCYTADNEMGYYAEGDSLFLLHLHNRSSSELFQDSLVFDITVITIDWISRHLYFALKESQNGMQVFDVDLEHKVKYPREVKIHNRNSTIISFSVYPLLSRLYWTEVSNFGYQMFYYSIISHTLHRILQPTATNQQNKRNQCSCNVTEFELSGAMAIDTSNLEKPLIYFAKAQEIWAMDLEGCQCWRVITVPAMLGKTLVSLTVDGDLIYWIITAKDSTQIYQAKKGNGAIVSQVKALRSRHILAYSSVMQPFPDKAFLSLASDTVEPTILNATNTSLTIRLPLAKTNLTWYGITSPTPTYLVYYAEVNDRKNSSDLKYRILEFQDSIALIEDLQPFSTYMIQIAVKNYYSDPLEHLPPGKEIWGKTKNGVPEAVQLINTTVRSDTSLIISWRESHKPNGPKESVRYQLAISHLALIPETPLRQSEFPNGRLTLLVTRLSGGNIYVLKVLACHSEEMWCTESHPVTVEMFNTPEKPYSLVPENTSLQFNWKAPLNVNLIRFWVELQKWKYNEFYHVKTSCSQGPAYVCNITNLQPYTSYNVRVVVVYKTGENSTSLPESFKTKAGVPNKPGIPKLLEGSKNSIQWEKAEDNGCRITYYILEIRKSTSNNLQNQNLRWKMTFNGSCSSVCTWKSKNLKGIFQFRVVAANNLGFGEYSGISENIILVGDDFWIPETSFILTIIVGIFLVVTIPLTFVWHRRLKNQKSAKEGVTVLINEDKELAELRGLAAGVGLANACYAIHTLPTQEEIENLPAFPREKLTLRLLLGSGAFGEVYEGTAVDILGVGSGEIKVAVKTLKKGSTDQEKIEFLKEAHLMSKFNHPNILKQLGVCLLNEPQYIILELMEGGDLLTYLRKARMATFYGPLLTLVDLVDLCVDISKGCVYLERMHFIHRDLAARNCLVSVKDYTSPRIVKIGDFGLARDIYKNDYYRKRGEGLLPVRWMAPESLMDGIFTTQSDVWSFGILIWEILTLGHQPYPAHSNLDVLNYVQTGGRLEPPRNCPDDLWNLMTQCWAQEPDQRPTFHRIQDQLQLFRNFFLNSIYKSRDEANNSGVINESFEGEDGDVICLNSDDIMPVALMETKNREGLNYMVLATECGQGEEKSEGPLGSQESESCGLRKEEKEPHADKDFCQEKQVAYCPSGKPEGLNYACLTHSGYGDGSD

SEQ ID NO: 24357 - protein, 19 aa, Artificial Sequence
  Synthetic polypeptide
GLPSHVELASSLTLAHHII

SEQ ID NO: 24358 - protein, 19 aa, Artificial Sequence
  Synthetic polypeptide
GLPSHVELASSLTLAHHII

SEQ ID NO: 24359 - protein, 2327 aa, Artificial Sequence
  Synthetic polypeptide
DVTWSSLPSAMIVRSPQPRGTGQQLDLGTPHNLSEPCIQGCHFWNSVDQKNCALKCRESCEVGCSSAEGAYEEEVLENADLPTAPFASSIGSHNMTLRWKSANFSGVKYIIQWKYAQLLGSWTYTKTVSRPSYVVKPLHPFTEYIFRVVWIFTAQLQLYSPPSPSYRTHPHGVPETAPLIRNIESSSPDTVEVSWDPPQFPGGPILGYNLRLISKNQKLDAGTQRTSFQFYSTLPNTIYRFSIAAVNEVGEGPEAESSITTSSSAVQQEEQWLFLSRKTSLRKRSLKHLVDEAHCLRLDAIYHNITGISVDVHQQIVYFSEGTLIWAKKAANMSDVSDLRIFYRGSGLISSISIDWLYQRMYFIMDELVCVCDLENCSNIEEITPPSISAPQKIVADSYNGYVFYLLRDGIYRADLPVPSGRCAEAVRIVESCTLKDFAIKPQAKRIIYFNDTAQVFMSTFLDGSASHLILPRIPFADVKSFACENNDFLVTDGKVIFQQDALSFNEFIVGCDLSHIEEFGFGNLVIFGSSSQLHPLPGRPQELSVLFGSHQALVQWKPPALAIGANVILISDIIELFELGPSAWQNWTYEVKVSTQDPPEVTHIFLNISGTMLNVPELQSAMKYKVSVRASSPKRPGPWSEPSVGTTLVPASEPPFIMAVKEDGLWSKPLNSFGPGEFLSSDIGNVSDMDWYNNSLYYSDTKGDVFVWLLNGTDISENYHLPSIAGAGALAFEWLGHFLYWAGKTYVIQRQSVLTGHTDIVTHVKLLVNDMVVDSVGGYLYWTTLYSVESTRLNGESSLVLQTQPWFSGKKVIALTLDLSDGLLYWLVQDSQCIHLYTAVLRGQSTGDTTITEFAAWSTSEISQNALMYYSGRLFWINGFRIITTQEIGQKTSVSVLEPARFNQFTIIQTSLKPLPGNFSFTPKVIPDSVQESSFRIEGNASSFQILWNGPPAVDWGVVFYSVEFSAHSKFLASEQHSLPVFTVEGLEPYALFNLSVTPYTYWGKGPKTSLSLRAPETVPSAPENPRIFILPSGKCCNKNEVVVEFRWNKPKHENGVLTKFEIFYNISNQSITNKTCEDWIAVNVTPSVMSFQLEGMSPRCFIAFQVRAFTSKGPGPYADVVKSTTSEINPFPHLITLLGNKIVFLDMDQNQVVWTFSAERVISAVCYTADNEMGYYAEGDSLFLLHLHNRSSSELFQDSLVFDITVITIDWISRHLYFALKESQNGMQVFDVDLEHKVKYPREVKIHNRNSTIISFSVYPLLSRLYWTEVSNFGYQMFYYSIISHTLHRILQPTATNQQNKRNQCSCNVTEFELSGAMAIDTSNLEKPLIYFAKAQEIWAMDLEGCQCWRVITVPAMLAGKTLVSLTVDGDLIYWIITAKDSTQIYQAKKGNGAIVSQVKALRSRHILAYSSVMQPFPDKAFLSLASDTVEPTILNATNTSLTIRLPLAKTNLTWYGITSPTPTYLVYYAEVNDRKNSSDLKYRILEFQDSIALIEDLQPFSTYMIQIAVKNYYSDPLEHLPPGKEIWGKTKNGVPEAVQLINTTVRSDTSLIISWRESHKPNGPKESVRYQLAISHLALIPETPLRQSEFPNGRLTLLVTRLSGGNIYVLKVLACHSEEMWCTESHPVTVEMFNTPEKPYSLVPENTSLQFNWKAPLNVNLIRFWVELQKWKYNEFYHVKTSCSQGPAYVCNITNLQPYTSYNVRVVVVYKTGENSTSLPESFKTKAGVPNKPGIPKLLEGSKNSIQWEKAEDNGCRITYYILEIRKSTSNNLQNQNLRWKMTFNGSCSSVCTWKSKNLKGIFQFRVVAANNLGFGEYSGISENIILVGDDFWIPETSFILTIIVGIFLVVTIPLTFVWHRRLKNQKSAKEGVTVLINEDKELAELRGLAAGVGLANACYAIHTLPTQEEIENLPAFPREKLTLRLLLGSGAFGEVYEGTAVDILGVGSGEIKVAVKTLKKGSTDQEKIEFLKEAHLMSKFNHPNILKQLGVCLLNEPQYIILELMEGGDLLTYLRKARMATFYGPLLTLVDLVDLCVDISKGCVYLERMHFIHRDLAARNCLVSVKDYTSPRIVKIGDFGLARDIYKNDYYRKRGEGLLPVRWMAPESLMDGIFTTQSDVWSFGILIWEILTLGHQPYPAHSNLDVLNYVQTGGRLEPPRNCPDDLWNLMTQCWAQEPDQRPTFHRIQDQLQLFRNFFLNSIYKSRDEANNSGVINESFEGEDGDVICLNSDDIMPVALMETKNREGLNYMVLATECGQGEEKSEGPLGSQESESCGLRKEEKEPHADKDFCQEKQVAYCPSGKPEGLNYACLTHSGYGDGSD

SEQ ID NO: 24360 - protein, 134 aa, Artificial Sequence
  Synthetic polypeptide
KLRQQLIAYQPKMVQDQTDSQPNSTRGVGFATRQVGNVTKPTVIISQEGDKVVIRTLSTFKNTEISFQLGEEFDETTADDRNCKSVVSLDGDKLVHIQKWDGKETNFVREIKDGKMVMTLTFGDVVAVRHYEKA

SEQ ID NO: 24361 - protein, 30 aa, Artificial Sequence
  Synthetic polypeptide
PTNQKWSRTRRIHSQILPEAWALPLGRWEM

SEQ ID NO: 24362 - protein, 30 aa, Artificial Sequence; identical to SEQ ID NO: 24361
  Synthetic polypeptide

SEQ ID NO: 24363 - protein, 31 aa, Artificial Sequence
  Synthetic polypeptide
IEATINSLPTKNGPGPDGFTAKFYQRRGLCH

SEQ ID NO: 24364 - protein, 31 aa, Artificial Sequence; identical to SEQ ID NO: 24363
  Synthetic polypeptide

SEQ ID NO: 24365 - protein, 168 aa, Artificial Sequence
  Synthetic polypeptide
KLRQQLIAYQPKMVQDQTDSQPNSTRGVGFATRQVGNVTKPTVIISQEGDKVVIRTLSTFKNTEISFQLGEEFDETTADDRNCKSVVSLDGDKLVHIQKWDGKETNFVREIKDGKMVMVSNDNSPFFLVFFSSPHTSHLLPSSSLLLPFFLLPSFFNNTSLARFFNYM

SEQ ID NO: 24366 - protein, 17 aa, Artificial Sequence
  Synthetic polypeptide
MDKENVAWALPLGRWEM

SEQ ID NO: 24367 - protein, 17 aa, Artificial Sequence
  Synthetic polypeptide
MDKENVAWALPLGRWEM

SEQ ID NO: 24368 - protein, 24 aa, Artificial Sequence
  Synthetic polypeptide
TRFGINLCSSMDEWIKKMWRGLCH

SEQ ID NO: 24369 - protein, 24 aa, Artificial Sequence
  Synthetic polypeptide
TRFGINLCSSMDEWIKKMWRGLCH

SEQ ID NO: 24370 - protein, 111 aa, Artificial Sequence
  Synthetic polypeptide
RKCGVGFATRQVGNVTKPTVIISQEGDKVVIRTLSTFKNTEISFQLGEEFDETTADDRNCKSVVSLDGDKLVHIQKWDGKETNFVREIKDGKMVMTLTFGDVVAVRHYEKA

SEQ ID NO: 24371 - protein, 145 aa, Artificial Sequence
  Synthetic polypeptide
RKCGVGFATRQVGNVTKPTVIISQEGDKVVIRTLSTFKNTEISFQLGEEFDETTADDRNCKSVVSLDGDKLVHIQKWDGKETNFVREIKDGKMVMVSNDNSPFFLVFFSSPHTSHLLPSSSLLLPFFLLPSFFNNTSLARFFNYM

SEQ ID NO: 24372 - protein, 118 aa, Artificial Sequence
  Synthetic polypeptide
IFADSIFHSSGVGFATRQVGNVTKPTVIISQEGDKVVIRTLSTFKNTEISFQLGEEFDETTADDRNCKSVVSLDGDKLVHIQKWDGKETNFVREIKDGKMVMTLTFGDVVAVRHYEKA

SEQ ID NO: 24373 - protein, 23 aa, Artificial Sequence
  Synthetic polypeptide
FRYLQIPFFTHQAWALPLGRWEM

SEQ ID NO: 24374 - protein, 23 aa, Artificial Sequence
  Synthetic polypeptide
FRYLQIPFFTHQAWALPLGRWEM

SEQ ID NO: 24375 - protein, 17 aa, Artificial Sequence
  Synthetic polypeptide
LDICRFHFSLIRRGLCH

SEQ ID NO: 24376 - protein, 17 aa, Artificial Sequence
  Synthetic polypeptide
LDICRFHFSLIRRGLCH

SEQ ID NO: 24377 - protein, 152 aa, Artificial Sequence
  Synthetic polypeptide
IFADSIFHSSGVGFATRQVGNVTKPTVIISQEGDKVVIRTLSTFKNTEISFQLGEEFDETTADDRNCKSVVSLDGDKLVHIQKWDGKETNFVREIKDGKMVMVSNDNSPFFLVFFSSPHTSHLLPSSSLLLPFFLLPSFFNNTSLARFFNYM

SEQ ID NO: 24378 - protein, 62 aa, Artificial Sequence
  Synthetic polypeptide
IGKCIYNHNCDRQQKWICAQIPRKSAEEDSHRRHSDDVQLPCSLASGHCPDNHVVSCCHRYV

SEQ ID NO: 24379 - protein, 62 aa, Artificial Sequence; identical to SEQ ID NO: 24378
  Synthetic polypeptide

SEQ ID NO: 24380 - protein, 62 aa, Artificial Sequence; identical to SEQ ID NO: 24378
  Synthetic polypeptide

SEQ ID NO: 24381 - protein, 62 aa, Artificial Sequence; identical to SEQ ID NO: 24378
  Synthetic polypeptide

SEQ ID NO: 24382 - protein, 770 aa, Artificial Sequence
  Synthetic polypeptide
MVPRLRSGDLPWEINPLSSCSLLREKDPLTTSGPQTDQPKEHLTNFKSGNASTTTTVIDSKNGSVPKSPGKVLKRTVTEDIVTTFSSPAAWLLVIALIITWSAVAIVMFDLVDYKNFSASSIAKIGSDPLKLVRDAMEETTDWIYGFFSLLSDIISSEDEEDDDGDEDTDKGEIDEPPLRKKEIHKDKTEKQEKPERKIQTKVTHKEKEKGKEKVREKEKPEKKATHKEKIEKKEKPETKTLAKEQKKAKTAEKSEEKTKKEVKGGKQEKVKQTAAKVKEVQKTPSKPKEKEDKEKAAVSKHEQKDQYAFCRYMIDIFVHGDLKPGQSPAIPPPLPTEQASRPTPASPALEEKEGEKKKAEKKVTSETKKKEKEDIKKKSEKETAIDVEKKEPGKASETKQGTVKIAAQAAAKKDEKKEDSKKTKKPAEVEQPKGKKQEKKEKHVEPAKSPKKEHSVPSDKQVKAKTERAKEEIGAVSIKKAVPGKKEEKTTKTVEQEIRKEKSGKTSSILKDKEPIKGKEEKVPASLKEKEPETKKDEKMSKAGKEVKPKPPQLQGKKEEKPEPQIKKEAKPAISEKVQIHKQDIVKPEKTVSHGKPEEKVLKQVKAVTIEKTAKPKPTKKAEHREREPPSIKTDKPKPTPKGTSEVTESGKKKTEISEKESKEKADMKHLREEKVSTRKESLQLHNVTKAEKPARVSKDVEDVPASKKAKEGTEDVSPTKQKSPISFFQCVYLDGYNGYGFQFPFTPADRPGESSGQANSPGQKQQGQ

SEQ ID NO: 24383 - protein, 56 aa, Artificial Sequence
  Synthetic polypeptide
WCRDSDQGTSLGRSIPCPPVLCSVRKIHLRPQVLRPTSPRNISPILNREMHLQPQL

SEQ ID NO: 24384 - protein, 56 aa, Artificial Sequence; identical to SEQ ID NO: 24383
  Synthetic polypeptide

SEQ ID NO: 24385 - protein, 56 aa, Artificial Sequence; identical to SEQ ID NO: 24383
  Synthetic polypeptide

SEQ ID NO: 24386 - protein, 56 aa, Artificial Sequence; identical to SEQ ID NO: 24383
  Synthetic polypeptide

SEQ ID NO: 24387 - protein, 762 aa, Artificial Sequence
  Synthetic polypeptide
MVPRLRSGDLPWEINPLSSCSLLREKDPLTTSGPQTDQPKEHLTNFKSGNASTTTTVIDSKNGSVPKSPGKVLKRTVTEDIVTTFSSPAAWLLVIALIITWSAVAIVMFDLVDYKNFSASSIAKIGSDPLKLVRDAMEETTDWIYGFFSLLSDIISSEDEEDDDGDEDTDKGEIDEPPLRKKEIHKDKTEKQEKPERKIQTKVTHKEKEKGKEKVREKEKPEKKATHKEKIEKKEKPETKTLAKEQKKAKTAEKSEEKTKKEVKGGKQEKVKQTAAKVKEVQKTPSKPKEKEDKEKAAVSKHEQKDQYAFCRYMIDIFVHGDLKPGQSPAIPPPLPTEQASRPTPASPALEEKEGEKKKAEKKVTSETKKKEKEDIKKKSEKETAIDVEKKEPGKASETKQGTVKIAAQAAAKKDEKKEDSKKTKKPAEVEQPKGKKQEKKEKHVEPAKSPKKEHSVPSDKQVKAKTERAKEEIGAVSIKKAVPGKKEEKTTKTVEQEIRKEKSGKTSSILKDKEPIKGKEEKVPASLKEKEPETKKDEKMSKAGKEVKPKPPQLQGKKEEKPEPQIKKEAKPAISEKVQIHKQDIVKPEKTVSHGKPEEKVLKQVKAVTIEKTAKPKPTKKAEHREREPPSIKTDKPKPTPKGTSEVTESGKKKTEISEKESKEKADMKHLREEKVSTRKESLQLHNVTKEDVEDVPASKKAKEGTEDVSPTKQKSPISFFQCVYLDGYNGYGFQFPFTPADRPGESSGQANSPGQKQQGQ

SEQ ID NO: 24388 - protein, 338 aa, Artificial Sequence
  Synthetic polypeptide
MVPRLRSGDLPWEINPLSSCSLLREKDPLTTSGPQTDQPKEHLTNFKSGNASTTTTVIDSKNGSVPKSPGKVLKRTVTEDIVTTFSSPAAWLLVIALIITWSAVAIVMFDLVDYKNFSASSIAKIGSDPLKLVRDAMEETTDWIYGFFSLLSDIISSEDEEDDDGDEDTDKGEIDEPPLRKKEIHKDKTEKQEKPERKIQTKVTHKEKEKGKEKVREKEKPEKKATHKEKIEKKEKPETKTLAKEQKKAKTAEKSEEKTKKEVKGGKQEKVKQTAAKVKEVQKTPSKPKEKEDKEKAAVSKHEQKGQSPAIPPPLPTEQASRPTPASPALEGKYFFFS

SEQ ID NO: 24389 - protein, 208 aa, Artificial Sequence
  Synthetic polypeptide
MVPRLRSGDLPWEINPLSSCSLLREKDPLTTSGPQTDQPKEHLTNFKSGNASTTTTVIDSKNGSVPKSPGKVLKRTVTEDIVTTFSSPAAWLLVIALIITWSAVAIVMFDLVDYKNFSASSIAKIGSDPLKLVRDAMEETTDWIYGFFSLLSDIISSEDEEDDDGDEDTDKGEIDEPPLRKKEIHKDKTEKQEKPERKIQTKEVGHSS

SEQ ID NO: 24390 - protein, 154 aa, Artificial Sequence
  Synthetic polypeptide
SQDGQIGTAPVYSSQHERRRRWVISAFPSEYAVWLVLWVTWNVFVICFYLEAGDLSKETDLILTFNISMHRSWWMENGPGCTVTSVTPAPDWAPEDHRYITVSGCLLEYQYIEVAHSSLQIVLAVSVGSQPLLLVPLGLFYFCANSVHTNGICG

SEQ ID NO: 24391 - protein, 11 aa, Artificial Sequence
  Synthetic polypeptide
FLHFHLSMLSG

SEQ ID NO: 24392 - protein, 11 aa, Artificial Sequence
  Synthetic polypeptide
FLHFHLSMLSG

SEQ ID NO: 24393 - protein, 11 aa, Artificial Sequence
  Synthetic polypeptide
FLHFHLSMLSG

SEQ ID NO: 24394 - protein, 11 aa, Artificial Sequence
  Synthetic polypeptide
FLHFHLSMLSG

SEQ ID NO: 24395 - protein, 174 aa, Artificial Sequence
  Synthetic polypeptide
SQDGQIGTAPVYSSQHERRRRWVISAFPSEYAVWLVLWVTWNVFVICFYLEAGDLSKETDLILTFNISMHRSWWMENGPGCTVTSVTPAPDWAPEDHRYITVSGCLLEYQYIEVAHSSLQIVLALAGFIYACYVVKCITEEEDSFDFIGGFDSYGYQGPQKTSHLQLQPMYMSK

SEQ ID NO: 24396 - protein, 105 aa, Artificial Sequence
  Synthetic polypeptide
SQDGQIGTAPVYSSQHERRRRWVISAFPSEYAVWLVLWVTWNVFVICFYLEAGDLSKLAGFIYACYVVKCITEEEDSFDFIGGFDSYGYQGPQKTSHLQLQPMYM

SEQ ID NO: 24397 - protein, 172 aa, Artificial Sequence
  Synthetic polypeptide
SQDGQIGTAPVYSSQHERRRRWVISAFPSEYAVWLVLWVTWNVFVICFYLEAGDLSKETDLILTFNISMHRSWWMENGPGCTVTSVTPAPDWAPEDHRYITVSGCLLEYQYIEVAHSSLQIVLALAGFIYACYVVKCITEEEDSFDFIGGFDSYGYQGPQKTSHLQLQPMYM

SEQ ID NO: 24398 - protein, 23 aa, Artificial Sequence
  Synthetic polypeptide
STYRTHLCSLIYWSSWGLWFVGD

SEQ ID NO: 24399 - protein, 23 aa, Artificial Sequence
  Synthetic polypeptide
STYRTHLCSLIYWSSWGLWFVGD

SEQ ID NO: 24400 - protein, 23 aa, Artificial Sequence
  Synthetic polypeptide
STYRTHLCSLIYWSSWGLWFVGD

SEQ ID NO: 24401 - protein, 23 aa, Artificial Sequence
  Synthetic polypeptide
STYRTHLCSLIYWSSWGLWFVGD

SEQ ID NO: 24402 - protein, 23 aa, Artificial Sequence
  Synthetic polypeptide
STYRTHLCSLIYWSSWGLWFVGD

SEQ ID NO: 24403 - protein, 23 aa, Artificial Sequence
  Synthetic polypeptide
STYRTHLCSLIYWSSWGLWFVGD

SEQ ID NO: 24404 - protein, 211 aa, Artificial Sequence
  Synthetic polypeptide
SIGAAGDCGLLETEPLQGTDEDAVASADFSSMLSEEEKEELKAELVQLEDEITTLRQVLSAKERHLVEIKQKLGMNLMNELKQNFSKSWHDMQTTTAYKKTHETLSHAGQKATAAFSNVGTAISKKFGDMRSHSIGYSIRHSISMPAMRNSPTFKSFEERVETTVTSLKTKVGGTNPNGGSFEEVLSSTAHASAQSLAGGSRRTKEEELQC

SEQ ID NO: 24405 - protein, 47 aa, Artificial Sequence
  Synthetic polypeptide
SFQRPSGALSDQVKYLQDPFVFTDLLEQLGIVVCWRLNRCKEQTKMQ

SEQ ID NO: 24406 - protein, 47 aa, Artificial Sequence; identical to SEQ ID NO: 24405
  Synthetic polypeptide

SEQ ID NO: 24407 - protein, 47 aa, Artificial Sequence; identical to SEQ ID NO: 24405
  Synthetic polypeptide

SEQ ID NO: 24408 - protein, 47 aa, Artificial Sequence; identical to SEQ ID NO: 24405
  Synthetic polypeptide

SEQ ID NO: 24409 - protein, 47 aa, Artificial Sequence; identical to SEQ ID NO: 24405
  Synthetic polypeptide

SEQ ID NO: 24410 - protein, 47 aa, Artificial Sequence; identical to SEQ ID NO: 24405
  Synthetic polypeptide

SEQ ID NO: 24411 - protein, 206 aa, Artificial Sequence
  Synthetic polypeptide
SIGAAGDCGLLETEPLQGTDEDAVASADFSSMLSEEEKEELKAELVQLEDEITTLRQVLSAKERHLVEIKQKLGMNLMNELKQNFSKSWHDMQTTTAYKKTHETLSHAGQKATAAFSNVGTAISKKFGDMSYSIRHSISMPAMRNSPTFKSFEERVETTVTSLKTKVGGTNPNGGSFEEVLSSTAHASAQSLAGGSRRTKEEELQC

SEQ ID NO: 24412 - protein, 146 aa, Artificial Sequence
  Synthetic polypeptide
SIGAAGDCGLLETEPLQGTDEDAVASADFSSMLSEEEKEELKAELVQLEDEITTLRQVLSAKERHLVEIKQKLGMNLMNELKQNFSKSWHDMQTTTAYKKTHETLSHAGQKATAAFSNVGTAISKKFGDMSYSIRHSISMPAMRRK

SEQ ID NO: 24413 - protein, 133 aa, Artificial Sequence
  Synthetic polypeptide
SIGAAGDCGLLETEPLQGTDEDAVASADFSSMLSEEEKEELKAELVQLEDEITTLRQVLSAKERHLVEIKQKLGMNLMNELKQNFSKSWHDMQTTTAYKKTHETLSHAGQKATAAFSNVGTAISKKFGDMRRK

SEQ ID NO: 24414 - protein, 193 aa, Artificial Sequence
  Synthetic polypeptide
SIGAAGDCGLLETEPLQGTDEDAVASADFSSMLSEEEKEELKAELVQLEDEITTLRQVLSAKERHLVEIKQKLGMNLMNELKQNFSKSWHDMQTTTAYKKTHETLSHAGQKATAAFSNVGTAISKKFGDMRNSPTFKSFEERVETTVTSLKTKVGGTNPNGGSFEEVLSSTAHASAQSLAGGSRRTKEEELQC

SEQ ID NO: 24415 - protein, 168 aa, Artificial Sequence
  Synthetic polypeptide
SIGAAGDCGLLETEPLQGTDEDAVASADFSSMLSEEEKEELKAELVQLEDEITTLRQVLSAKERHLVEIKQKLGMNLMNELKQNFSKSWHDMQTTTAYKKTHETLSHAGQKATAAFSNVGTAISKKFGDMSYSIRHSISMPAMRNSPTFKSFEERVETTVTSLKVQMK

SEQ ID NO: 24416 - protein, 9 aa, Artificial Sequence
  Synthetic polypeptide
KQQQQKNQK

SEQ ID NO: 24417 - protein, 9 aa, Artificial Sequence
  Synthetic polypeptide
KQQQQKNQK

SEQ ID NO: 24418 - protein, 9 aa, Artificial Sequence
  Synthetic polypeptide
KQQQQKNQK

SEQ ID NO: 24419 - protein, 9 aa, Artificial Sequence
  Synthetic polypeptide
KQQQQKNQK

SEQ ID NO: 24420 - protein, 9 aa, Artificial Sequence
  Synthetic polypeptide
KQQQQKNQK

SEQ ID NO: 24421 - protein, 9 aa, Artificial Sequence
  Synthetic polypeptide
KQQQQKNQK

SEQ ID NO: 24422 - protein, 9 aa, Artificial Sequence
  Synthetic polypeptide
KQQQQKNQK

SEQ ID NO: 24423 - protein, 39 aa, Artificial Sequence
  Synthetic polypeptide
SGSKRPAFHQGSNSLDLSRSRSFCMEHGPSTLLLTFLRE

SEQ ID NO: 24424 - protein, 16 aa, Artificial Sequence
  Synthetic polypeptide
VGAVPFAWNMDHLLCC

SEQ ID NO: 24425 - protein, 106 aa, Artificial Sequence
  Synthetic polypeptide
EPFLLHGTWTIYFAADVPQGVIRVQAPHLSKVSMAIQLTEELKASDVLARFLSQESGVAQTLKKGEVFLYEIGGNIGERCLDDDTYMKDLYQLNPNAEWVIKSKPL

SEQ ID NO: 24426 - protein, 5 aa, Artificial Sequence
  Synthetic polypeptide
DPVSL

SEQ ID NO: 24427 - protein, 5 aa, Artificial Sequence
  Synthetic polypeptide
DPVSL

SEQ ID NO: 24428 - protein, 5 aa, Artificial Sequence
  Synthetic polypeptide
DPVSL

SEQ ID NO: 24429 - protein, 5 aa, Artificial Sequence
  Synthetic polypeptide
DPVSL

SEQ ID NO: 24430 - protein, 5 aa, Artificial Sequence
  Synthetic polypeptide
DPVSL

SEQ ID NO: 24431 - protein, 5 aa, Artificial Sequence
  Synthetic polypeptide
DPVSL

SEQ ID NO: 24432 - protein, 43 aa, Artificial Sequence
  Synthetic polypeptide
GMSPGQDPKIRSAFSAKREHYSMDECNWFDHHCPTRAILDCSS

SEQ ID NO: 24433 - protein, 43 aa, Artificial Sequence; identical to SEQ ID NO: 24432
  Synthetic polypeptide

SEQ ID NO: 24434 - protein, 43 aa, Artificial Sequence; identical to SEQ ID NO: 24432
  Synthetic polypeptide

SEQ ID NO: 24435 - protein, 43 aa, Artificial Sequence; identical to SEQ ID NO: 24432
  Synthetic polypeptide

SEQ ID NO: 24436 - protein, 43 aa, Artificial Sequence; identical to SEQ ID NO: 24432
  Synthetic polypeptide

SEQ ID NO: 24437 - protein, 43 aa, Artificial Sequence; identical to SEQ ID NO: 24432
  Synthetic polypeptide

SEQ ID NO: 24438 - protein, 235 aa, Artificial Sequence
  Synthetic polypeptide
ALDRILRSGQPLVPRENITAWMNAIGLIITALPEPYWIVLHDRIVSVISSPSLTSETEWVGYPFRLFDFTACHQSYSEMSCSYTLALAHAVWHHSSIGQLSLIPKFLTEVLLPIVKTEFQLLYVYHLVGPFLQRFQQERTRCMIEIGVAFYDMLLNVDQCSTHLNYMDPICDFLYHMKYMFTGDSVKEQVEKIICNLKPALKLRLRFITHISKMEPAAVPPQAMNSGSPAPQSNQ

SEQ ID NO: 24439 - protein, 244 aa, Artificial Sequence
  Synthetic polypeptide
ALDRILRSGQPLVPRENITAWMNAIGLIITALPEPYWIVLHDRIVSVISSPSLTSETEWVGYPFRLFDFTACHQSYSEMSCSYTLALAHAVWHHSSIGQLSLIPKFLTEVLLPIVKTEFQLLYVYHLVGPFLQRFQQERTRCMIEIGVAFYDMLLNVDQCSTHLNYMDPICDFLYHMKYMFTGDSVKEQVEKIICNLKPALKLRLRFITHISKMEPAAVPPQAMNSGSPAPQSNQVPVSLPVTQ

SEQ ID NO: 24440 - protein, 244 aa, Artificial Sequence; identical to SEQ ID NO: 24439
  Synthetic polypeptide

SEQ ID NO: 24441 - protein, 244 aa, Artificial Sequence; identical to SEQ ID NO: 24439
  Synthetic polypeptide

SEQ ID NO: 24442 - protein, 240 aa, Artificial Sequence
  Synthetic polypeptide
ALDRILRSGQPLVPRENITAWMNAIGLIITALPEPYWIVLHDRIVSVISSPSLTSETEWVGYPFRLFDFTACHQSYSEMSCSYTLALAHAVWHHSSIGQLSLIPKFLTEVLLPIVKTEFQLLYVYHLVGPFLQRFQQERTRCMIEIGVAFYDMLLNVDQCSTHLNYMDPICDFLYHMKYMFTGDSVKEQVEKIICNLKPALKLRLRFITHISKMEPAAVPPQAMNSGSPAPQSNQVDTLT

SEQ ID NO: 24443 - protein, 244 aa, Artificial Sequence
  Synthetic polypeptide
ALDRILRSGQPLVPRENITAWMNAIGLIITALPEPYWIVLHDRIVSVISSPSLTSETEWVGYPFRLFDFTACHQSYSEMSCSYTLALAHAVWHHSSIGQLSLIPKFLTEVLLPIVKTEFQLLYVYHLVGPFLQRFQQERTRCMIEIGVAFYDMLLNVDQCSTHLNYMDPICDFLYHMKYMFTGDSVKEQVKKIICNLKPALKLRLRFITHISKMEPAAVPPQAMNSGSPAPQSNQVPVSLPVTQ

SEQ ID NO: 24444 - protein, 19 aa, Artificial Sequence
  Synthetic polypeptide
GPSTKTRESCLHTTSPMPR

SEQ ID NO: 24445 - protein, 19 aa, Artificial Sequence
  Synthetic polypeptide
GPSTKTRESCLHTTSPMPR

SEQ ID NO: 24446 - protein, 19 aa, Artificial Sequence
  Synthetic polypeptide
GPSTKTRESCLHTTSPMPR

SEQ ID NO: 24447 - protein, 19 aa, Artificial Sequence
  Synthetic polypeptide
GPSTKTRESCLHTTSPMPR

SEQ ID NO: 24448 - protein, 19 aa, Artificial Sequence
  Synthetic polypeptide
GPSTKTRESCLHTTSPMPR

SEQ ID NO: 24449 - protein, 19 aa, Artificial Sequence
  Synthetic polypeptide
GPSTKTRESCLHTTSPMPR

SEQ ID NO: 24450 - protein, 19 aa, Artificial Sequence
  Synthetic polypeptide
GPSTKTRESCLHTTSPMPR

SEQ ID NO: 24451 - protein, 19 aa, Artificial Sequence
  Synthetic polypeptide
GPSTKTRESCLHTTSPMPR

SEQ ID NO: 24452 - protein, 19 aa, Artificial Sequence
  Synthetic polypeptide
GPSTKTRESCLHTTSPMPR

SEQ ID NO: 24453 - protein, 19 aa, Artificial Sequence
  Synthetic polypeptide
GPSTKTRESCLHTTSPMPR

SEQ ID NO: 24454 - protein, 19 aa, Artificial Sequence
  Synthetic polypeptide
GPSTKTRESCLHTTSPMPR

SEQ ID NO: 24455 - protein, 19 aa, Artificial Sequence
  Synthetic polypeptide
GPSTKTRESCLHTTSPMPR

SEQ ID NO: 24456 - protein, 19 aa, Artificial Sequence
  Synthetic polypeptide
GPSTKTRESCLHTTSPMPR

SEQ ID NO: 24457 - protein, 19 aa, Artificial Sequence
  Synthetic polypeptide
GPSTKTRESCLHTTSPMPR

SEQ ID NO: 24458 - protein, 19 aa, Artificial Sequence
  Synthetic polypeptide
GPSTKTRESCLHTTSPMPR

SEQ ID NO: 24459 - protein, 19 aa, Artificial Sequence
  Synthetic polypeptide
GPSTKTRESCLHTTSPMPR

SEQ ID NO: 24460 - protein, 19 aa, Artificial Sequence
  Synthetic polypeptide
GPSTKTRESCLHTTSPMPR

SEQ ID NO: 24461 - protein, 36 aa, Artificial Sequence
  Synthetic polypeptide
EEFNGLLVVLRCRGQVQRLGNLASTPRVPCQGDDVS

SEQ ID NO: 24462 - protein, 36 aa, Artificial Sequence; identical to SEQ ID NO: 24461
  Synthetic polypeptide

SEQ ID NO: 24463 - protein, 36 aa, Artificial Sequence; identical to SEQ ID NO: 24461
  Synthetic polypeptide

SEQ ID NO: 24464 - protein, 36 aa, Artificial Sequence; identical to SEQ ID NO: 24461
  Synthetic polypeptide

SEQ ID NO: 24465 - protein, 36 aa, Artificial Sequence; identical to SEQ ID NO: 24461
  Synthetic polypeptide

SEQ ID NO: 24466 - protein, 36 aa, Artificial Sequence; identical to SEQ ID NO: 24461
  Synthetic polypeptide

SEQ ID NO: 24467 - protein, 36 aa, Artificial Sequence; identical to SEQ ID NO: 24461
  Synthetic polypeptide

SEQ ID NO: 24468 - protein, 36 aa, Artificial Sequence; identical to SEQ ID NO: 24461
  Synthetic polypeptide

SEQ ID NO: 24469 - protein, 36 aa, Artificial Sequence; identical to SEQ ID NO: 24461
  Synthetic polypeptide

SEQ ID NO: 24470 - protein, 36 aa, Artificial Sequence; identical to SEQ ID NO: 24461
  Synthetic polypeptide

SEQ ID NO: 24471 - protein, 36 aa, Artificial Sequence; identical to SEQ ID NO: 24461
  Synthetic polypeptide

SEQ ID NO: 24472 - protein, 36 aa, Artificial Sequence; identical to SEQ ID NO: 24461
  Synthetic polypeptide

SEQ ID NO: 24473 - protein, 36 aa, Artificial Sequence; identical to SEQ ID NO: 24461
  Synthetic polypeptide

SEQ ID NO: 24474 - protein, 36 aa, Artificial Sequence; identical to SEQ ID NO: 24461
  Synthetic polypeptide

SEQ ID NO: 24475 - protein, 36 aa, Artificial Sequence; identical to SEQ ID NO: 24461
  Synthetic polypeptide

SEQ ID NO: 24476 - protein, 36 aa, Artificial Sequence; identical to SEQ ID NO: 24461
  Synthetic polypeptide

SEQ ID NO: 24477 - protein, 36 aa, Artificial Sequence; identical to SEQ ID NO: 24461
  Synthetic polypeptide

SEQ ID NO: 24478 - protein, 74 aa, Artificial Sequence
  Synthetic polypeptide
FRGLPSHMELTRTSEEENQQTEKYWGKKNATWFCSAELLLPPAPPHGTFVYPPRCCSWRVPGDRFQALRDAACL

SEQ ID NO: 24479 - protein, 65 aa, Artificial Sequence
  Synthetic polypeptide
WVYQGFPLFCLPHFLLLPPCKKCFSPPPMIPRPPQPHGTNQDIRGRKSADRKILGKKKCHVVLFS

SEQ ID NO: 24480 - protein, 14 aa, Artificial Sequence
  Synthetic polypeptide
MRKENSFQTLFWRS

SEQ ID NO: 24481 - protein, 14 aa, Artificial Sequence
  Synthetic polypeptide
MRKENSFQTLFWRS

SEQ ID NO: 24482 - protein, 152 aa, Artificial Sequence
  Synthetic polypeptide
ELNEKRKLLPDTILEKLTTASQTNIKKSPGKVKEVNLQKKNEDCEKGNDSKKVKVQKVQSVSQNKSYLAVRLKDQDLRDSRQQAAQAFIHNSLYGPGTNRTTVNKFLSLANKRLPVKRAAVQFLNNAWGIQKKQNAKRFKRRWMVRKMKTKK

SEQ ID NO: 24483 - protein, 40 aa, Artificial Sequence
  Synthetic polypeptide
ELNEKRKLLPDTILEKLTTASQTNIKKSPGKVKEGMTILI

SEQ ID NO: 24484 - protein, 10 aa, Artificial Sequence
  Synthetic polypeptide
GNALKSAYTN

SEQ ID NO: 24485 - protein, 10 aa, Artificial Sequence
  Synthetic polypeptide
GNALKSAYTN

SEQ ID NO: 24486 - protein, 10 aa, Artificial Sequence
  Synthetic polypeptide
GNALKSAYTN

SEQ ID NO: 24487 - protein, 10 aa, Artificial Sequence
  Synthetic polypeptide
GNALKSAYTN

SEQ ID NO: 24488 - protein, 10 aa, Artificial Sequence
  Synthetic polypeptide
GNALKSAYTN

SEQ ID NO: 24489 - protein, 462 aa, Artificial Sequence
  Synthetic polypeptide
KVPTPTNVTIESYNMNPIVYWEYQIMPQVPVFTVEVKNYGVKNSEWIDACINISHHYCNISDHVGDPSNSLWVRVKARVGQKESAYAKSEEFAVCRDGKIGPPKLDIRKEEKQIMIDIFHPSVFVNGDEQEVDYDPETTCYIRVYNVYVRMNGSEIQYKILTQKEDDCDEIQCQLAIPVSSLNSQYCVSAEGVLHVWGVTTEKSKEVCITIFNSSIKGSLWIPVVAALLLFLVLSLVFICFYIKKINPLKEKSIILPKSLISVVRSATLETKPESKYVSLITSYQPFSLEKEVVCEEPLSPATVPGMHTEDNPGKVEHTEELSSITEVVTTEENIPDVVPGSHLTPIERESSSPLSSNQSEPGSIALNSYHSRNCSESDHSRNGFDTDSSCLESHSSLSDSEFPPNNKGEIKTEGQELITVIKAPTSFGYDKPHVLVDLLVDDSGKESLIGYRPTEDSKEFS

SEQ ID NO: 24490 - protein, 462 aa, Artificial Sequence; identical to SEQ ID NO: 24489
  Synthetic polypeptide

SEQ ID NO: 24491 - protein, 17 aa, Artificial Sequence
  Synthetic polypeptide
CIKKCLHQLMLQLNPIT

SEQ ID NO: 24492 - protein, 17 aa, Artificial Sequence
  Synthetic polypeptide
CIKKCLHQLMLQLNPIT

SEQ ID NO: 24493 - protein, 17 aa, Artificial Sequence
  Synthetic polypeptide
CIKKCLHQLMLQLNPIT

SEQ ID NO: 24494 - protein, 17 aa, Artificial Sequence
  Synthetic polypeptide
CIKKCLHQLMLQLNPIT

SEQ ID NO: 24495 - protein, 17 aa, Artificial Sequence
  Synthetic polypeptide
CIKKCLHQLMLQLNPIT

SEQ ID NO: 24496 - protein, 183 aa, Artificial Sequence
  Synthetic polypeptide
KVPTPTNVTIESYNMNPIVYWEYQIMPQVPVFTVEVKNYGVKARVGQKESAYAKSEEFAVCRDGKIGPPKLDIRKEEKQIMIDIFHPSVFVNGDEQEVDYDPETTCYIRVYNVYVRMNGSEIQYKILTQKEDDCDEIQCQLAIPVSSLNSQYCVSAEGVLHVWGVTTEKSKEVCITIFNSSIK

SEQ ID NO: 24497 - protein, 169 aa, Artificial Sequence
  Synthetic polypeptide
KVPTPTNVTIESYNMNPIVYWEYQIMPQVPVFTVEVKNYGVKNSEWIDACINISHHYCNISDHVGDPSNSLWVRVKARVGQKESAYAKSEEFAVCRDGKIGPPKLDIRKEEKQIMIDIFHPSVFVNGDEQEVDYDPETTCYIRVYNVYVRMNGSEIKRSCAFSLFSFFI

SEQ ID NO: 24498 - protein, 144 aa, Artificial Sequence
  Synthetic polypeptide
KVPTPTNVTIESYNMNPIVYWEYQIMPQVPVFTVEVKNYGVKNSEWIDACINISHHYCNISDHVGDPSNSLWVRVKARVGQKESAYAKSEEFAVCRDGKIGPPKLDIRKEEKQIMIDIFHPSVFVNGDEQEVDYDPETTCYIRV

SEQ ID NO: 24499 - protein, 127 aa, Artificial Sequence
  Synthetic polypeptide
LLPGGAWGRAAAAMLFCGFIILVICFILSFFALCGPQMLVFLRVIGGLLALAAVFQIISLVIYPVKYTQTFTLHANPAVTYIYNWAYGFGWAATIILIGCAFFFCCLPNYEDDLLGNAKPRYFYTSA

SEQ ID NO: 24500 - protein, 56 aa, Artificial Sequence
  Synthetic polypeptide
CCSKCRKPGQQNYLGGCWTSSVSCWPKDRNRHFNYFPEERGVEQRLPCSSVASSSW

SEQ ID NO: 24501 - protein, 41 aa, Artificial Sequence
  Synthetic polypeptide
AALSVANQDSRIIWVVVGRPVSHAGLRIGIGILTTSRRSVG

SEQ ID NO: 24502 - protein, 129 aa, Artificial Sequence
  Synthetic polypeptide
LPLILHYAWGRAAAAMLFCGFIILVICFILSFFALCGPQMLVFLRVIGGLLALAAVFQIISLVIYPVKYTQTFTLHANPAVTYIYNWAYGFGWAATIILIGCAFFFCCLPNYEDDLLGNAKPRYFYTSA

SEQ ID NO: 24503 - protein, 21 aa, Artificial Sequence
  Synthetic polypeptide
FYIMRGVEQRLPCSSVASSSW

SEQ ID NO: 24504 - protein, 9 aa, Artificial Sequence
  Synthetic polypeptide
PTDSTLCVG

SEQ ID NO: 24505 - protein, 19 aa, Artificial Sequence
  Synthetic polypeptide
SPVMLFYFLEKSFRIQKKF

SEQ ID NO: 24506 - protein, 19 aa, Artificial Sequence
  Synthetic polypeptide
SPVMLFYFLEKSFRIQKKF

SEQ ID NO: 24507 - protein, 19 aa, Artificial Sequence
  Synthetic polypeptide
SPVMLFYFLEKSFRIQKKF

SEQ ID NO: 24508 - protein, 911 aa, Artificial Sequence
  Synthetic polypeptide
SRHAVLFSREVIQNSKEVLSLLQEKNPAFKPVLAIIQAGDDNLMQEINQNLAEEAGLNITHICLPPDSSEAEIIDEILKINEDTRVHGLALQISENLFSNKVLNALKPEKDVDGVTDINLGKLVRGDAHECFVSPVAKAVIELLEKSGVNLDGKKILVVGAHGSLEAALQCLFQRKGSMTMSIQWKTRQLQSKLHEADIVVLGSPKPEEIPLTWIQPGTTVLNCSHDFLSGKVGCGSPRIHFGGLIEEDDVILLAAALRIQNMVSSGRRWLREQQHRRWRLHCLKLQPLSPVPSDIEISRGQTPKAVDVLAKEIGLLADEIEIYGKSKAKVRLSVLERLKDQADGKYVLVAGITPTPLGEGKSTVTIGLVQALTAHLNVNSFACLRQPSQGPTFGVKGGAAGGGYAQVIPMEEFNLHLTGDIHAITAANNLLAAAIDTRILHENTQTDKALYNRLVPLVNGVREFSEIQLARLKKLGINKTDPSTLTEEEVSKFARLDIDPSTITWQRVLDTNDRFLRKITIGQGNTEKGHYRQAQFDIAVASEIMAVLALTDSLADMKARLGRMVVASDKSGQPVTADDLGVTGALTVLMKDAIKPNLMQTLEGTPVFVHAGPFANIAHGNSSVLADKIALKLVGEEGFVVTEAGFGADIGMEKFFNIKCRASGLVPNVVVLVATVRALKMHGGGPSVTAGVPLKKEYTEENIQLVADGCCNLQKQIQITQLFGVPVVVALNVFKTDTRAEIDLVCELAKRAGAFDAVPCYHWSVGGKGSVDLARAVREAASKRSRFQFLYDVQVPIVDKIRTIAQAVYGAKDIELSPEAQAKIDRYTQQGFGNLPICMAKTHLSLSHQPDKKGVPRDFILPISDVRASIGAGFIYPLVGTMSTMPGLPTRPCFYDIDLDTETEQVKGLF

SEQ ID NO: 24509 - protein, 208 aa, Artificial Sequence
  Synthetic polypeptide
SRHAVLFSREVIQNSKEVLSLLQEKNPAFKPVLAIIQAGDDNLMQEINQNLAEEAGLNITHICLPPDSSEAEIIDEILKINEDTRVHGLALQISENLFSNKVLNALKPEKDVDGVTDINLGKLVRGDAHECFVSPVAKAVIELLEKSGVNLDGKKILVVGAHGSLEAALQCLFQRKGSMTMSIQWKTRQLQSKTESRSVTRLECRRVI

SEQ ID NO: 24510 - protein, 305 aa, Artificial Sequence
  Synthetic polypeptide
SRHAVLFSREVIQNSKEVLSLLQEKNPAFKPVLAIIQAGDDNLMQEINQNLAEEAGLNITHICLPPDSSEAEIIDEILKINEDTRVHGLALQISENLFSNKVLNALKPEKDVDGVTDINLGKLVRGDAHECFVSPVAKAVIELLEKSVGVNLDGKKILVVGAHGSLEAALQCLFQRKGSMTMSIQWKTRQLQSKLHEADIVVLGSPKPEEIPLTWIQPGTTVLNCSHDFLSGKVGCGSPRIHFGGLIEEDDVILLAAALRIQNMVSSGRRWLREQQHRRWRLHCLKLQPLSPVPSDIEISRGQTP

SEQ ID NO: 24511 - protein, 14 aa, Artificial Sequence
  Synthetic polypeptide
KTWKNLQRSYQNKS

SEQ ID NO: 24512 - protein, 14 aa, Artificial Sequence
  Synthetic polypeptide
KTWKNLQRSYQNKS

SEQ ID NO: 24513 - protein, 32 aa, Artificial Sequence
  Synthetic polypeptide
GRTRTEFIYRQYDLVCRRPGRIYKEATRISHE

SEQ ID NO: 24514 - protein, 32 aa, Artificial Sequence; identical to SEQ ID NO: 24513
  Synthetic polypeptide

SEQ ID NO: 24515 - protein, 5 aa, Artificial Sequence
  Synthetic polypeptide
GCGTV

SEQ ID NO: 24516 - protein, 5 aa, Artificial Sequence
  Synthetic polypeptide
GCGTV

SEQ ID NO: 24517 - protein, 5 aa, Artificial Sequence
  Synthetic polypeptide
GCGTV

SEQ ID NO: 24518 - protein, 20 aa, Artificial Sequence
  Synthetic polypeptide
AQEFEAAAPYKLEFRLPDYS

SEQ ID NO: 24519 - protein, 20 aa, Artificial Sequence
  Synthetic polypeptide
AQEFEAAAPYKLEFRLPDYS

SEQ ID NO: 24520 - protein, 20 aa, Artificial Sequence
  Synthetic polypeptide
AQEFEAAAPYKLEFRLPDYS

SEQ ID NO: 24521 - protein, 107 aa, Artificial Sequence
  Synthetic polypeptide
AQEAEAGRSLEPRSLRLRHRINLSSDFLITPDFYWDRENLEGLYDKTCQFLSIGRRVKVMNEKLQHCMELTDLMRNHLNEKRALRLEWMIVILITIEVMFELGRVFF

SEQ ID NO: 24522 - protein, 107 aa, Artificial Sequence; identical to SEQ ID NO: 24521
  Synthetic polypeptide

SEQ ID NO: 24523 - protein, 39 aa, Artificial Sequence
  Synthetic polypeptide
AQEAEAGRSLEPRSLRLRHRINLSSDFLITPDFYWDREN

SEQ ID NO: 24524 - protein, 40 aa, Artificial Sequence
  Synthetic polypeptide
GVHDQPGQHSETSSLQNINKNLARCSKYFGDGCGKFCKRR

SEQ ID NO: 24525 - protein, 40 aa, Artificial Sequence; identical to SEQ ID NO: 24524
  Synthetic polypeptide

SEQ ID NO: 24526 - protein, 246 aa, Artificial Sequence
  Synthetic polypeptide
PDAANILVMGVENSAKEGDPGTIFFFREGAAVFWNVKDKTMKHVMKVLEKHEIQPYEIALVHWENEELNYIKIEGQSKLHRGEIKLNSELDLDDAILEKFAFSNALCLSVKLAIWEASLDKFIESIQSIPEALKAGKKVKLSHEEVMQKIGELFALRHRINLSSDFLITPDFYWDRENLEGLYDKTCQFLSIGRRVKVMNEKLQHCMELTDLMRNHLNEKRALRLEWMIVILITIEVMFELGRVFF

SEQ ID NO: 24527 - protein, 19 aa, Artificial Sequence
  Synthetic polypeptide
DLISTKHKQKLSQMQQIFW

SEQ ID NO: 24528 - protein, 19 aa, Artificial Sequence
  Synthetic polypeptide
DLISTKHKQKLSQMQQIFW

SEQ ID NO: 24529 - protein, 178 aa, Artificial Sequence
  Synthetic polypeptide
PDAANILVMGVENSAKEGDPGTIFFFREGAAVFWNVKDKTMKHVMKVLEKHEIQPYEIALVHWENEELNYIKIEGQSKLHRGEIKLNSELDLDDAILEKFAFSNALCLSVKLAIWEASLDKFIESIQSIPEALKAGKKVKLSHEEVMQKIGELFALRHRINLSSDFLITPDFYWDREN

SEQ ID NO: 24530 - protein, 48 aa, Artificial Sequence
  Synthetic polypeptide
LAGRRQPSFGCLNTVHQSITLMYLKNQKSKISMGHRNPSLLYVLTCNN

SEQ ID NO: 24531 - protein, 48 aa, Artificial Sequence; identical to SEQ ID NO: 24530
  Synthetic polypeptide

SEQ ID NO: 24532 - protein, 8 aa, Artificial Sequence
  Synthetic polypeptide
ILSTNRLL

SEQ ID NO: 24533 - protein, 8 aa, Artificial Sequence
  Synthetic polypeptide
ILSTNRLL

SEQ ID NO: 24534 - protein, 326 aa, Artificial Sequence
  Synthetic polypeptide
LTGWKEAAIIWMFKYCPPIDYFDVFKESKEQNFYGSQESIIALCTHLQQLIRTIEDLDENQLKDEFFKLLQISLWGNKCDLSLSGGESSSQNTNVLNSLEDLKPFILLNDMEHLWSLLSNCKKTREKASATRVYIVLDNSGFELVTDLILADFLLSSELATEVHFYGKTIPWFVSDTTIHDFNWLIEQVKHSNHKWMSKCGADWEEYIKMGKWVYHNHIFWTLPHEYCAMPQVAPDLYAELQKAHLILFKGDLNYRKLTGDRKWEFSVPFHQALNGFHPAPLCTIRTLKAEIQVGLQPGQGEQLLASEPSWWTTGKYGIFQYDGPL

SEQ ID NO: 24535 - protein, 326 aa, Artificial Sequence; identical to SEQ ID NO: 24534
  Synthetic polypeptide

SEQ ID NO: 24536 - protein, 32 aa, Artificial Sequence
  Synthetic polypeptide
SVFVYHCIFREYTLDTKRPKRRENVETQAPER

SEQ ID NO: 24537 - protein, 32 aa, Artificial Sequence; identical to SEQ ID NO: 24536
  Synthetic polypeptide

SEQ ID NO: 24538 - protein, 32 aa, Artificial Sequence; identical to SEQ ID NO: 24536
  Synthetic polypeptide

SEQ ID NO: 24539 - protein, 32 aa, Artificial Sequence; identical to SEQ ID NO: 24536
  Synthetic polypeptide

SEQ ID NO: 24540 - protein, 32 aa, Artificial Sequence; identical to SEQ ID NO: 24536
  Synthetic polypeptide

SEQ ID NO: 24541 - protein, 357 aa, Artificial Sequence
  Synthetic polypeptide
HDLSLFTTASSVNIHWIRKDRRGGRMLKHKRQRDDGEGRGEVGSAGDMRAANLWPSPLMIKRSKKNSLALSLTADQMVSALLDAEPPILYSEYDPTRPFSEASMMGLLTNLADRELVHMINWAKRVPGFVDLTLHDQVHLLECAWLEILMIGLVWRSMEHPGKLLFAPNLLLDRNQGKCVEGMVEIFDMLLATSSRFRMMNLQGEEFVCLKSIILLNSGVYTFLSSTLKSLEEKDHIHRVLDKITDTLIHLMAKAGLTLQQQHQRLAQLLLILSHIRHMSNKGMEHLYSMKCKNVVPLYDLLLEMLDAHRLHAPTSRGGASVEETDQSHLATAGSTSSHSLQKYYITGEAEGFPATV

SEQ ID NO: 24542 - protein, 357 aa, Artificial Sequence; identical to SEQ ID NO: 24541
  Synthetic polypeptide

SEQ ID NO: 24543 - protein, 357 aa, Artificial Sequence; identical to SEQ ID NO: 24541
  Synthetic polypeptide

SEQ ID NO: 24544 - protein, 357 aa, Artificial Sequence; identical to SEQ ID NO: 24541
  Synthetic polypeptide

SEQ ID NO: 24545 - protein, 14 aa, Artificial Sequence
  Synthetic polypeptide
IYIGYEKTEEEGEC

SEQ ID NO: 24546 - protein, 14 aa, Artificial Sequence
  Synthetic polypeptide
IYIGYEKTEEEGEC

SEQ ID NO: 24547 - protein, 14 aa, Artificial Sequence
  Synthetic polypeptide
IYIGYEKTEEEGEC

SEQ ID NO: 24548 - protein, 14 aa, Artificial Sequence
  Synthetic polypeptide
IYIGYEKTEEEGEC

SEQ ID NO: 24549 - protein, 14 aa, Artificial Sequence
  Synthetic polypeptide
IYIGYEKTEEEGEC

SEQ ID NO: 24550 - protein, 245 aa, Artificial Sequence
  Synthetic polypeptide
HDLSLFTTASSVNIHWIRKDRRGGRMLKHKRQRDDGEGRGEVGSAGDMRAANLWPSPLMIKRSKKNSLALSLTADQMVSALLDAEPPILYSEYDPTRPFSEASMMGLLTNLADRELVHMINWAKRVPGFVDLTLHDQVHLLECAWLEILMIGLVWRSMEHPGKLLFAPNLLLDRNQGKCVEGMVEIFDMLLATSSRFRMMNLQGEEFVCLKSIILLNSGISHVEAKKRILNLHPKIFGNKWFPRV

SEQ ID NO: 24551 - protein, 68 aa, Artificial Sequence
  Synthetic polypeptide
NSLLNNLWSKEEIKGWALTARIPGTTGRCTRGCQNGARQSARCSACCWWRSPAACWPCCSTRRRGGKQ

SEQ ID NO: 24552 - protein, 13 aa, Artificial Sequence
  Synthetic polypeptide
IIYGPKKKSKGGL

SEQ ID NO: 24553 - protein, 219 aa, Artificial Sequence
  Synthetic polypeptide
SMVQRRNQRVGFDSENPGDDGQMHKGLSERSQAVGAVLSLLLVALTCCLLALLLYKKERRETVISKLTTCCRRSSNVSYKYSKVNKEEETDENETEWLMEEIQLPPPRQGKEGQENGHITTKSVKALSSLHGDDQDSEDEVLTIPEVKVHSGRGAGAESSHPVRNAQSNALQEREDDRVGLVRGEKARKGKSSSAQQKTVSSTKLVSFHDDSDEDLLHI

SEQ ID NO: 24554 - protein, 41 aa, Artificial Sequence
  Synthetic polypeptide
WVYQGSPLLLLSHFLLLSLLKKSLSPPTMIVRTPQPCGTSW

SEQ ID NO: 24555 - protein, 41 aa, Artificial Sequence; identical to SEQ ID NO: 24554
  Synthetic polypeptide

SEQ ID NO: 24556 - protein, 41 aa, Artificial Sequence; identical to SEQ ID NO: 24554
  Synthetic polypeptide

SEQ ID NO: 24557 - protein, 41 aa, Artificial Sequence; identical to SEQ ID NO: 24554
  Synthetic polypeptide

SEQ ID NO: 24558 - protein, 46 aa, Artificial Sequence
  Synthetic polypeptide
ELLSHVELAGDAAGVVVGHGMHHLHGPARLPQVWEGKCHRGSQPQV

SEQ ID NO: 24559 - protein, 46 aa, Artificial Sequence; identical to SEQ ID NO: 24558
  Synthetic polypeptide

SEQ ID NO: 24560 - protein, 46 aa, Artificial Sequence; identical to SEQ ID NO: 24558
  Synthetic polypeptide

SEQ ID NO: 24561 - protein, 46 aa, Artificial Sequence; identical to SEQ ID NO: 24558
  Synthetic polypeptide

SEQ ID NO: 24562 - protein, 6 aa, Artificial Sequence
  Synthetic polypeptide
WSNPRN

SEQ ID NO: 24563 - protein, 6 aa, Artificial Sequence
  Synthetic polypeptide
WSNPRN

SEQ ID NO: 24564 - protein, 6 aa, Artificial Sequence
  Synthetic polypeptide
WSNPRN

SEQ ID NO: 24565 - protein, 6 aa, Artificial Sequence
  Synthetic polypeptide
WSNPRN

SEQ ID NO: 24566 - protein, 6 aa, Artificial Sequence
  Synthetic polypeptide
WSNPRN

SEQ ID NO: 24567 - protein, 6 aa, Artificial Sequence
  Synthetic polypeptide
WSNPRN

SEQ ID NO: 24568 - protein, 6 aa, Artificial Sequence
  Synthetic polypeptide
WSNPRN

SEQ ID NO: 24569 - protein, 285 aa, Artificial Sequence
  Synthetic polypeptide
NFSDHQWLSGQIQEISRVRKDMYNDTLNGSTEKRSAELPDAVGPIVQLQEKLYVPVKEYPDFNFVGRILGPRGLTAKQLEAETGCKIMVRGKGSMRDKKKEEQNRGKPNWEHLNEDLHVLITVEDAQNRAEIKLKRAVEEVKKLLVPAAEGEDSLKKMQLMELAILNGTYRDANIKSPALAFSLAATAQAAPRIITGPAPVLPPAALRTPTPAGPTIMPLIRQIQTAVMPNGTPHPTAAIVPPGPEAGLIYTPYEYPYTLAPATSILEYPIEPSGVLGMAFPTKG

SEQ ID NO: 24570 - protein, 285 aa, Artificial Sequence; identical to SEQ ID NO: 24569
  Synthetic polypeptide

SEQ ID NO: 24571 - protein, 32 aa, Artificial Sequence
  Synthetic polypeptide
YPLSLETSLITSGLVVKSKKLAEYGKTCTMTH

SEQ ID NO: 24572 - protein, 32 aa, Artificial Sequence; identical to SEQ ID NO: 24571
  Synthetic polypeptide

SEQ ID NO: 24573 - protein, 32 aa, Artificial Sequence; identical to SEQ ID NO: 24571
  Synthetic polypeptide

SEQ ID NO: 24574 - protein, 32 aa, Artificial Sequence; identical to SEQ ID NO: 24571
  Synthetic polypeptide

SEQ ID NO: 24575 - protein, 32 aa, Artificial Sequence; identical to SEQ ID NO: 24571
  Synthetic polypeptide

SEQ ID NO: 24576 - protein, 32 aa, Artificial Sequence; identical to SEQ ID NO: 24571
  Synthetic polypeptide

SEQ ID NO: 24577 - protein, 32 aa, Artificial Sequence; identical to SEQ ID NO: 24571
  Synthetic polypeptide

SEQ ID NO: 24578 - protein, 291 aa, Artificial Sequence
  Synthetic polypeptide
NFSDHQWLSGQIQEISRVRKDMYNDTLNGSTEKRSAELPDAVGPIVQLQEKLYVPVKEYPDFNFVGRILGPRGLTAKQLEAETGCKIMVRGKGSMRDKKKEEQNRGKPNWEHLNEDLHVLITVEDAQNRAEIKLKRAVEEVKKLLVPAAEGEDSLKKMQLMELAILNGTYRDANIKSPALAFSLAATAQAAPRIITGPAPVLPPAALRTPTPAGPTIMPLIRQIQTAVMPNGTPHPTAAIVPPGPEAGLIYTPYEYPYTLAPATSILEYPIEPSGVLEWIEMPVMPDISAH

SEQ ID NO: 24579 - protein, 285 aa, Artificial Sequence
  Synthetic polypeptide
NFSDHQWLSGQIQEISRVRKDMYNDTLNGSTEKRSAELPDAVGPIVQLQEKLYVPVKEYPDFNFVGRILGPRGLTAKQLEAETGCKIMVRGKGSMRDKKKEEQNRGKPNWEHLNEDLHVLITVEDAQNRAEIKLKRAVEEVKKLLVPAAEGEDSLKKMQLMELAILNGTYRDANIKSPALAFSLAATAQAAPRIITGPAPVLPPAALRTPTPAGPTIMPLIRQIQTAVMPNGTPHPTAAIVPPGPEAGLIYTPYEYPYTLAPATSILEYPIEPSGVLGKFFSPWG

SEQ ID NO: 24580 - protein, 307 aa, Artificial Sequence
  Synthetic polypeptide
NFSDHQWLSGQIQEISRVRKDMYNDTLNGSTEKRSAELPDAVGPIVQLQEKLYVPVKEYPDFNFVGRILGPRGLTAKQLEAETGCKIMVRGKGSMRDKKKEEQNRGKPNWEHLNEDLHVLITVEDAQNRAEIKLKRAVEEVKKLLVPAAEGEDSLKKMQLMELAILNGTYRDANIKSPALAFSLAATAQAAPRIITGPAPVLPPAALRTPTPAGPTIMPLIRQIQTAVMPNGTPHPTAAIVPPGPEAGLIYTPYEYPYTLAPATSILEYPIEPSGVLGAVATKVRRHDMRVHPYQRIVTADRAATGN

SEQ ID NO: 24581 - protein, 299 aa, Artificial Sequence
  Synthetic polypeptide
NFSDHQWLSGQIQEISRVRKDMYNDTLNGSTEKRSAELPDAVGPIVQLQEKLYVPVKEYPDFNFVGRILGPRGLTAKQLEAETGCKIMVRGKGSMRDKKKEEQNRGKPNWEHLNEDLHVLITVEDAQNRAEIKLKRAVEEVKKLLVPAAEGEDSLKKMQLMELAILNGTYRDANIKSPTAQAAPRIITGPAPVLPPAALRTPTPAGPTIMPLIRQIQTAVMPNGTPHPTAAIVPPGPEAGLIYTPYEYPYTLAPATSILEYPIEPSGVLGAVATKVRRHDMRVHPYQRIVTADRAATGN

SEQ ID NO: 24582 - protein, 283 aa, Artificial Sequence
  Synthetic polypeptide
NFSDHQWLSGQIQEISRVRKDMYNDTLNGSTEKRSAELPDAVGPIVQLQEKLYVPVKEYPDFNFVGRILGPRGLTAKQLEAETGCKIMVRGKGSMRDKKKEEQNRGKPNWEHLNEDLHVLITVEDAQNRAEIKLKRAVEEVKKLLVPAAEGEDSLKKMQLMELAILNGTYRDANIKSPTAQAAPRIITGPAPVLPPAALRTPTPAGPTIMPLIRQIQTAVMPNGTPHPTAAIVPPGPEAGLIYTPYEYPYTLAPATSILEYPIEPSGVLEWIEMPVMPDISAH

SEQ ID NO: 24583 - protein, 194 aa, Artificial Sequence
  Synthetic polypeptide
SRNSNSQPHRVGFRRNQLSDNHEWKKLIMVQHWPETVCEKIQNDCRDPPDYWTIHGLWPDKSEGCNRSWPFNLEEIKDLLPEMRAYWPDVIHSFPNRSRFWKHEWEKHGTCAAQVDALNSQKKYFGRSLELYRELDLNSVLLKLGIKPSINYYQTTEEDLNLDVEPTTEDTAEEVTIHVLLHSALFGEIGPRRW

SEQ ID NO: 24584 - protein, 246 aa, Artificial Sequence
  Synthetic polypeptide
SRNSNSQPHRVGFRRNQLSDNHEWKKLIMVQHWPETVCEKIQNDCRDPPDYWTIHGLWPDKSEGCNRSWPFNLEEIKDLLPEMRAYWPDVIHSFPNRSRFWKHEWEKHGTCAAQVDALNSQKKYFGRSLELYRELDLNSVLLKLGIKPSINYYQVADFKDALARVYGVIPKIQCLPPSQDEEVQTIGQIELCLTKQDQQLQNCTEPGEQPSPKQEVWLANGAAESRGLRVCEDGPVFYPPPKKTKH

SEQ ID NO: 24585 - protein, 246 aa, Artificial Sequence; identical to SEQ ID NO: 24584
  Synthetic polypeptide

SEQ ID NO: 24586 - protein, 111 aa, Artificial Sequence
  Synthetic polypeptide
SRNSNSQPHRVGFRRNQLSDNHEWKKLIMVQHWPETVCEKIQNDCRDPPDYWTIHGLWPDKSEGCNRSWPFNLEEIKKNWMEITDSSLPSPSTLPIINIFYSVLHLLQLMN

SEQ ID NO: 24587 - protein, 61 aa, Artificial Sequence
  Synthetic polypeptide
SRNSNSQPHRVGFRRNQLSDNHEWKKLIMVQHWPETVCEKIQNDCRDPPDYWTIHGLWQAR

SEQ ID NO: 24588 - protein, 243 aa, Artificial Sequence
  Synthetic polypeptide
SRNSNSQPHRVGFRRNQLSDNHEWKKLIMVQHWPETVCEKIQNDCRDPPDYWTIHGLWPDKSEGCNRSWPFNLEEIKDLLPEMRAYWPDVIHSFPNRSRFWKHEWEKHGTCAAQVDALNSQKKYFGRSLELYRELDLNSVLLKLGIKPSINYYQVADFKDALARVYGVIPKIQCLPPSQDEEVQTIGQIELCLTKQDQQLQNCTEPGEQPSPKQEVWLANGAAESRGLRVCEDGPVFYPPPKK

SEQ ID NO: 24589 - protein, 316 aa, Artificial Sequence
  Synthetic polypeptide
GSIWKAVRISGFTGSVNEKLPQREGTGKTVSLQIFSVLNSDDAAAPALETQPQGDEEDIASRYPTLWTEQVKSRQNKTNKNSVSSCDQEHQSALEEAKQPKNDNVVIPECAHGGLYKPVQCHPSTGYCWCVLVDTGRPIPGTSTRYEQPKCDNTARAHPAKARDLYKGRQLQGCPGAKKHEFLTSVLDALSTDMVHAASDPSSSSGRLSEPDPSHTLEERVVHWYFKLLDKNSSGDIGKKEIKPFKRFLRKKSKPKKCVKKFVEYCDVNNDKSISVQELMGCLGVAKEDGKADTKKRHTPRGHAESTSNRQPRKQG

SEQ ID NO: 24590 - protein, 8 aa, Artificial Sequence
  Synthetic polypeptide
GLVASQVP

SEQ ID NO: 24591 - protein, 8 aa, Artificial Sequence
  Synthetic polypeptide
GLVASQVP

SEQ ID NO: 24592 - protein, 7 aa, Artificial Sequence
  Synthetic polypeptide
WLHRFRK

SEQ ID NO: 24593 - protein, 7 aa, Artificial Sequence
  Synthetic polypeptide
WLHRFRK

SEQ ID NO: 24594 - protein, 305 aa, Artificial Sequence
  Synthetic polypeptide
GSIWKAVRISGFTGSVNEKLPQREGTGKTDDAAAPALETQPQGDEEDIASRYPTLWTEQVKSRQNKTNKNSVSSCDQEHQSALEEAKQPKNDNVVIPECAHGGLYKPVQCHPSTGYCWCVLVDTGRPIPGTSTRYEQPKCDNTARAHPAKARDLYKGRQLQGCPGAKKHEFLTSVLDALSTDMVHAASDPSSSSGRLSEPDPSHTLEERVVHWYFKLLDKNSSGDIGKKEIKPFKRFLRKKSKPKKCVKKFVEYCDVNNDKSISVQELMGCLGVAKEDGKADTKKRHTPRGHAESTSNRQPRKQG

SEQ ID NO: 24595 - protein, 24 aa, Artificial Sequence
  Synthetic polypeptide
VEVRAVVFEDLHLNPKAITSQNWN

SEQ ID NO: 24596 - protein, 24 aa, Artificial Sequence
  Synthetic polypeptide
VEVRAVVFEDLHLNPKAITSQNWN

SEQ ID NO: 24597 - protein, 24 aa, Artificial Sequence
  Synthetic polypeptide
VEVRAVVFEDLHLNPKAITSQNWN

SEQ ID NO: 24598 - protein, 24 aa, Artificial Sequence
  Synthetic polypeptide
VEVRAVVFEDLHLNPKAITSQNWN

SEQ ID NO: 24599 - protein, 24 aa, Artificial Sequence
  Synthetic polypeptide
VEVRAVVFEDLHLNPKAITSQNWN

SEQ ID NO: 24600 - protein, 24 aa, Artificial Sequence
  Synthetic polypeptide
VEVRAVVFEDLHLNPKAITSQNWN

SEQ ID NO: 24601 - protein, 31 aa, Artificial Sequence
  Synthetic polypeptide
IPRPSLPRTGTEHQVRGGDGRESNGPAPSSF

SEQ ID NO: 24602 - protein, 31 aa, Artificial Sequence; identical to SEQ ID NO: 24601
  Synthetic polypeptide

SEQ ID NO: 24603 - protein, 31 aa, Artificial Sequence; identical to SEQ ID NO: 24601
  Synthetic polypeptide

SEQ ID NO: 24604 - protein, 31 aa, Artificial Sequence; identical to SEQ ID NO: 24601
  Synthetic polypeptide

SEQ ID NO: 24605 - protein, 31 aa, Artificial Sequence; identical to SEQ ID NO: 24601
  Synthetic polypeptide

SEQ ID NO: 24606 - protein, 31 aa, Artificial Sequence; identical to SEQ ID NO: 24601
  Synthetic polypeptide

SEQ ID NO: 24607 - protein, 1743 aa, Artificial Sequence
  Synthetic polypeptide
RPAFKSQGHHFPELELNTKCVVEMEGNQTVLHPPPSNTKQGERKPPKVFAFDYCFWSMDESNTTKYAGQEVVFKCLGEGILEKAFQGYNACIFAYGQTGSGKSFSMMGHAEQLGLIPRLCCALFKRISLEQNESQTFKVEVSYMEIYNEKVRDLLDPKGSRQSLKVREHKVLGPYVDGLSQLAVTSFEDIESLMSEGNKSRTVAATNMNEESSRSHAVFNIIITQTLYDLQSGNSGEKVSKVSLVDLAGSERVSKTGAAGERLKEGSNINKSLTTLGLVISSLADQAAGKGKSKFVPYRDSVLTWLLKDNLGGNSQTSMIATISPAADNYEETLSTLRYADRAKRIVNHAVVNEDPNAKVIRELREEVEKLREQLSQAEAMKAPELKEKLEESEKLIKELTVTWEEKLRKTEEIAQERQRQLESMGISLEMSGIKVGDDKCYLVNLNADPALNELLVYYLKDHTRVGADTSQDIQLFGIGIQPQHCEIDIASDGDVTLTPKENARSCVNGTLVCSTTQLWHGDRILWGNNHFFRINLPKRKRRDWLKDFEKETGPPEHDLDAASEASSEPDYNYEFAQMEVIMKTLNSNDPVQNVVQVLEKQYLEEKRSALEEQRLMYERELEQLRQQLSPDRQPQSSGPDRLAYSSQTAQQKVTQWAEERDELFRQSLAKLREQLVKANTLVREANFLAEEMSKLTDYQVTLQIPAANLSANRKRGAIVSEPAIQVRRKGKSTQVWTIEKLENKLIDMRDLYQEWKEKVPEAKRLYGKRGDPFYEAQENHNLIGVANVFLECLFCDVKLQYAVPIISQQGEVAGRLHVEVMRVTGAVPERVVEDDSSENSSESGSLEVVDSSGEIIHRVKKLTCRVKIKEATGLPLNLSNFVFCQYTFWDQCESTVAAPVVDPEVPSPQSKDAQYTVTFSHCKDYVVNVTEEFLEFISDGALAIEVWGHRCAGNGSSIWEVDSLHAKTRTLHDRWNEVTRRIEMWISILELNELGEYAAVELHQAKDVNTGGIFQLRQGHSRRVQVTVKPVQHSGTLPLMVEAILSVSIGCVTARSTKLQRGLDSYQEEDLNCVRERWSDALIKRREYLDEQIKKVSNKTEKTEDDVEREAQLVEQWVGLTEERNAVLVPAPGSGIPGAPADWIPPPGMETHIPVLFLDLNADDLSANEQLVGPHASGVNSILPKEHGSQFFYLPIIKHSDDEVSATASWDSSVHDSVHLNRVTPQNERIYLIVKTTVQLSHPAAMELVLRKRIAANIYNKQSFTQSLKRRISLKNIFYSCGVTYEIVSNIPKATEEIEDRETLALLAARSENEGTSDGETYIEKYTRGVLQVENILSLERLRQAVTVKEALSTKARHIRRSLSTPNVHNVSSSRPDLSGFDEDDKGWPENQLDMSDYSSSYQDVACYGTLPRDSPRRNKEGCTSETPHALTVSPFKAFSPQPPKFFKPLMPVKEEHKKRIALEARPLLSQEDSEEEENELEAINRKLISSQPYVPVEFADFSVYNASLENREWFSSKVDLSNSRVLEKEVSRSPTTSSITSGYFSHSASNATLSDMVVPSSDSSDQLAIQTKDADSTEHSTPSLVHDFRPSSNKELTEVEKGLVKDKIIVVPLKENSALAKGSPSSQSIPEKNSKSLCRTGSCSELDACPSKISQPARGFCPREVTVEHTTNILEDHSFTEFMGVSEGKDFDGLTDSSAGELSSRRSLPNKTGGKTVSDGLHHPSQLHSKLENDQGGTTSR

SEQ ID NO: 24608 - protein, 1799 aa, Artificial Sequence
  Synthetic polypeptide
RPAFKSQGHHFPELELNTKCVVEMEGNQTVLHPPPSNTKQGERKPPKVFAFDYCFWSMDESNTTKYAGQEVVFKCLGEGILEKAFQGYNACIFAYGQTGSGKSFSMMGHAEQLGLIPRLCCALFKRISLEQNESQTFKVEVSYMEIYNEKVRDLLDPKGSRQSLKVREHKVLGPYVDGLSQLAVTSFEDIESLMSEGNKSRTVAATNMNEESSRSHAVFNIIITQTLYDLQSGNSGEKVSKVSLVDLAGSERVSKTGAAGERLKEGSNINKSLTTLGLVISSLADQAAGKGKSKFVPYRDSVLTWLLKDNLGGNSQTSMIATISPAADNYEETLSTLRYADRAKRIVNHAVVNEDPNAKVIRELREEVEKLREQLSQAEAMKAPELKEKLEESEKLIKELTVTWEEKLRKTEEIAQERQRQLESMGISLEMSGIKVGDDKCYLVNLNADPALNELLVYYLKDHTRVGADTSQDIQLFGIGIQPQHCEIDIASDGDVTLTPKENARSCVNGTLVCSTTQLWHGDRILWGNNHFFRINLPKRKRRDWLKDFEKETGPPEHDLDAASEASSEPDYNYEFAQMEVIMKTLNSNDPVQNVVQVLEKQYLEEKRSALEEQRLMYERELEQLRQQLSPDRQPQSSGPDRLAYSSQTAQQKVTQWAEERDELFRQSLAKLREQLVKANTLVREANFLAEEMSKLTDYQVTLQIPAANLSANRKRGAIVSEPAIQVRRKGKSTQVWTIEKLENKLIDMRDLYQEWKEKVPEAKRLYGKRGDPFYEAQENHNLIGVANVFLECLFCDVKLQYAVPIISQQGEVAGRLHVEVMRVTGAVPERVVEDDSSENSSESGSLEVVDSSGEIIHRVKKLTCRVKIKEATGLPLNLSNFVFCQYTFWDQCESTVAAPVVDPEVPSPQSKDAQYTVTFSHCKDYVVNVTEEFLEFISDGALAIEVWGHRCAGNGSSIWEVDSLHAKTRTLHDRWNEVTRRIEMWISILELNELGEYAAVELHQAKDVNTGGIFQLRQGHSRRVQVTVKPVQHSGTLPLMVEAILSVSIGCVTARSTKLQRGLDSYQRDDEDGDDMDSYQEEDLNCVRERWSDALIKRREYLDEQIKKVSNKTEKTEDDVEREAQLVEQWVGLTEERNAVLVPAPGSGIPGAPADWIPPPGMETHIPVLFLDLNADDLSANEQLVGPHASGVNSILPKEHGSQFFYLPIIKHSDDEVSATASWDSSVHDSVHLNRVTPQNERIYLIVKTTVQLSHPAAMELVLRKRIAANIYNKQSFTQSLKRRISLKNIFYSCGVTYEIVSNIPKATEEIEDRETLALLAARSENEGTSDGETYIEKYTRGVLQVENILSLERLRQAVTVKEALSTKARHIRRSLSTPNVHNVSSSRPDLSGFDEDDKGWPENQLDMSDYSSSYQDVACYGTLPRDSPRRNKEGCTSETPHALTVSPFKAFSPQPPKFFKPLMPVKEEHKKRIALEARPLLSQESMPPPQAHNPGCIVPSGSNGSSMPVEHNSKREKKIDSEEEENELEAINRKLISSQPYVPVEFADFSVYNASLENREWFSSKVDLSNSRVLEKEVSRSPTTSSITSGYFSHSASNATLSDMVVPSSDSSDQLAIQTKDADSTEHSTPSLVHDFRPSSNKELTEVEKGLVKDKIIVVPLKENSALAKGSPSSQSIPEKNSKSLCRTGSCSELDACPSKISQPARGFCPREVTVEHTTNILEDHSFTEFMGVSEGKDFDGLTDSSAGELSSRRSLPNKTGGKTVSDGLHHPSQLHSKLENDQVIIPEAAFWVLCCQ

SEQ ID NO: 24609 - protein, 1751 aa, Artificial Sequence
  Synthetic polypeptide
RPAFKSQGHHFPELELNTKCVVEMEGNQTVLHPPPSNTKQGERKPPKVFAFDYCFWSMDESNTTKYAGQEVVFKCLGEGILEKAFQGYNACIFAYGQTGSGKSFSMMGHAEQLGLIPRLCCALFKRISLEQNESQTFKVEVSYMEIYNEKVRDLLDPKGSRQSLKVREHKVLGPYVDGLSQLAVTSFEDIESLMSEGNKSRTVAATNMNEESSRSHAVFNIIITQTLYDLQSGNSGEKVSKVSLVDLAGSERVSKTGAAGERLKEGSNINKSLTTLGLVISSLADQAAGKGKSKFVPYRDSVLTWLLKDNLGGNSQTSMIATISPAADNYEETLSTLRYADRAKRIVNHAVVNEDPNAKVIRELREEVEKLREQLSQAEAMKAPELKEKLEESEKLIKELTVTWEEKLRKTEEIAQERQRQLESMGISLEMSGIKVGDDKCYLVNLNADPALNELLVYYLKDHTRVGADTSQDIQLFGIGIQPQHCEIDIASDGDVTLTPKENARSCVNGTLVCSTTQLWHGDRILWGNNHFFRINLPKRKRRDWLKDFEKETGPPEHDLDAASEASSEPDYNYEFAQMEVIMKTLNSNDPVQNVVQVLEKQYLEEKRSALEEQRLMYERELEQLRQQLSPDRQPQSSGPDRLAYSSQTAQQKVTQWAEERDELFRQSLAKLREQLVKANTLVREANFLAEEMSKLTDYQVTLQIPAANLSANRKRGAIVSEPAIQVRRKGKSTQVWTIEKLENKLIDMRDLYQEWKEKVPEAKRLYGKRGDPFYEAQENHNLIGVANVFLECLFCDVKLQYAVPIISQQGEVAGRLHVEVMRVTGAVPERVVEDDSSENSSESGSLEVVDSSGEIIHRVKKLTCRVKIKEATGLPLNLSNFVFCQYTFWDQCESTVAAPVVDPEVPSPQSKDAQYTVTFSHCKDYVVNVTEEFLEFISDGALAIEVWGHRCAGNGSSIWEVDSLHAKTRTLHDRWNEVTRRIEMWISILELNELGEYAAVELHQAKDVNTGGIFQLRQGHSRRVQVTVKPVQHSGTLPLMVEAILSVSIGCVTARSTKLQRGLDSYQEEDLNCVRERWSDALIKRREYLDEQIKKVSNKTEKTEDDVEREAQLVEQWVGLTEERNAVLVPAPGSGIPGAPADWIPPPGMETHIPVLFLDLNADDLSANEQLVGPHASGVNSILPKEHGSQFFYLPIIKHSDDEVSATASWDSSVHDSVHLNRVTPQNERIYLIVKTTVQLSHPAAMELVLRKRIAANIYNKQSFTQSLKRRISLKNIFYSCGVTYEIVSNIPKATEEIEDRETLALLAARSENEGTSDGETYIEKYTRGVLQVENILSLERLRQAVTVKEALSTKARHIRRSLSTPNVHNVSSSRPDLSGFDEDDKGWPENQLDMSDYSSSYQDVACYGTLPRDSPRRNKEGCTSETPHALTVSPFKAFSPQPPKFFKPLMPVKEEHKKRIALEARPLLSQEDSEEEENELEAINRKLISSQPYVPVEFADFSVYNASLENREWFSSKVDLSNSRVLEKEVSRSPTTSSITSGYFSHSASNATLSDMVVPSSDSSDQLAIQTKDADSTEHSTPSLVHDFRPSSNKELTEVEKGLVKDKIIVVPLKENSALAKGSPSSQSIPEKNSKSLCRTGSCSELDACPSKISQPARGFCPREVTVEHTTNILEDHSFTEFMGVSEGKDFDGLTDSSAGELSSRRSLPNKTGGKTVSDGLHHPSQLHSKLENDQVIIPEAAFWVLCCQ

SEQ ID NO: 24610 - protein, 1764 aa, Artificial Sequence
  Synthetic polypeptide
RPAFKSQGHHFPELELNTKCVVEMEGNQTVLHPPPSNTKQGERKPPKVFAFDYCFWSMDESNTTKYAGQEVVFKCLGEGILEKAFQGYNACIFAYGQTGSGKSFSMMGHAEQLGLIPRLCCALFKRISLEQNESQTFKVEVSYMEIYNEKVRDLLDPKGSRQSLKVREHKVLGPYVDGLSQLAVTSFEDIESLMSEGNKSRTVAATNMNEESSRSHAVFNIIITQTLYDLQSGNSGEKVSKVSLVDLAGSERVSKTGAAGERLKEGSNINKSLTTLGLVISSLADQAAGKGKSKFVPYRDSVLTWLLKDNLGGNSQTSMIATISPAADNYEETLSTLRYADRAKRIVNHAVVNEDPNAKVIRELREEVEKLREQLSQAEAMKAPELKEKLEESEKLIKELTVTWEEKLRKTEEIAQERQRQLESMGISLEMSGIKVGDDKCYLVNLNADPALNELLVYYLKDHTRVGADTSQDIQLFGIGIQPQHCEIDIASDGDVTLTPKENARSCVNGTLVCSTTQLWHGDRILWGNNHFFRINLPKRKRRDWLKDFEKETGPPEHDLDAASEASSEPDYNYEFAQMEVIMKTLNSNDPVQNVVQVLEKQYLEEKRSALEEQRLMYERELEQLRQQLSPDRQPQSSGPDRLAYSSQTAQQKVTQWAEERDELFRQSLAKLREQLVKANTLVREANFLAEEMSKLTDYQVTLQIPAANLSANRKRGAIVSEPAIQVRRKGKSTQVWTIEKLENKLIDMRDLYQEWKEKVPEAKRLYGKRGDPFYEAQENHNLIGVANVFLECLFCDVKLQYAVPIISQQGEVAGRLHVEVMRVTGAVPERVVEDDSSENSSESGSLEVVDSSGEIIHRVKKLTCRVKIKEATGLPLNLSNFVFCQYTFWDQCESTVAAPVVDPEVPSPQSKDAQYTVTFSHCKDYVVNVTEEFLEFISDGALAIEVWGHRCAGNGSSIWEVDSLHAKTRTLHDRWNEVTRRIEMWISILELNELGEYAAVELHQAKDVNTGGIFQLRQGHSRRVQVTVKPVQHSGTLPLMVEAILSVSIGCVTARSTKLQRGLDSYQRDDEDGDDMDSYQEEDLNCVRERWSDALIKRREYLDEQIKKVSNKTEKTEDDVEREAQLVEQWVGLTEERNAVLVPAPGSGIPGAPADWIPPPGMETHIPVLFLDLNADDLSANEQLVGPHASGVNSILPKEHGSQFFYLPIIKHSDDEVSATASWDSSVHDSVHLNRVTPQNERIYLIVKTTVQLSHPAAMELVLRKRIAANIYNKQSFTQSLKRRISLKNIFYSCGVTYEIVSNIPKATEEIEDRETLALLAARSENEGTSDGETYIEKYTRGVLQVENILSLERLRQAVTVKEALSTKARHIRRSLSTPNVHNVSSSRPDLSGFDEDDKGWPENQLDMSDYSSSYQDVACYGTLPRDSPRRNKEGCTSETPHALTVSPFKAFSPQPPKFFKPLMPVKEEHKKRIALEARPLLSQEDSEEEENELEAINRKLISSQPYVPVEFADFSVYNASLENREWFSSKVDLSNSRVLEKEVSRSPTTSSITSGYFSHSASNATLSDMVVPSSDSSDQLAIQTKDADSTEHSTPSLVHDFRPSSNKELTEVEKGLVKDKIIVVPLKENSALAKGSPSSQSIPEKNSKSLCRTGSCSELDACPSKISQPARGFCPREVTVEHTTNILEDHSFTEFMGVSEGKDFDGLTDSSAGELSSRRSLPNKTGGKTVSDGLHHPSQLHSKLENDQVIIPEAAFWVLCCQ

SEQ ID NO: 24611 - protein, 1764 aa, Artificial Sequence
  Synthetic polypeptide
RPAFKSQGHHFPELELNTKCVVEMEGNQTVLHPPPSNTKQGERRPSQVFAFDYCFWSMDESNTTKYAGQEVVFKCLGEGILEKAFQGYNACIFAYGQTGSGKSFSMMGHAEQLGLIPRLCCALFKRISLEQNESQTFKVEVSYMEIYNEKVRDLLDPKGSRQSLKVREHKVLGPYVDGLSQLAVTSFEDIESLMSEGNKSRTVAATNMNEESSRSHAVFNIIITQTLYDLQSGNSGEKVSKVSLVDLAGSERVSKTGAAGERLKEGSNINKSLTTLGLVISSLADQAAGKGKSKFVPYRDSVLTWLLKDNLGGNSQTSMIATISPAADNYEETLSTLRYADRAKRIVNHAVVNEDPNAKVIRELREEVEKLREQLSQAEAMKAPELKEKLEESEKLIKELTVTWEEKLRKTEEIAQERQRQLESMGISLEMSGIKVGDDKCYLVNLNADPALNELLVYYLKDHTRVGADTSQDIQLFGIGIQPQHCEIDIASDGDVTLTPKENARSCVNGTLVCSTTQLWHGDRILWGNNHFFRINLPKRKRRDWLKDFEKETGPPEHDLDAASEASSEPDYNYEFAQMEVIMKTLNSNDPVQNVVQVLEKQYLEEKRSALEEQRLMYERELEQLRQQLSPDRQPQSSGPDRLAYSSQTAQQKVTQWAEERDELFRQSLAKLREQLVKANTLVREANFLAEEMSKLTDYQVTLQIPAANLSANRKRGAIVSEPAIQVRRKGKSTQVWTIEKLENKLIDMRDLYQEWKEKVPEAKRLYGKRGDPFYEAQENHNLIGVANVFLECLFCDVKLQYAVPIISQQGEVAGRLHVEVMRVTGAVPERVVEDDSSENSSESGSLEVVDSSGEIIHRVKKLTCRVKIKEATGLPLNLSNFVFCQYTFWDQCESTVAAPVVDPEVPSPQSKDAQYTVTFSHCKDYVVNVTEEFLEFISDGALAIEVWGHRCAGNGSSIWEVDSLHAKTRTLHDRWNEVTRRIEMWISILELNELGEYAAVELHQAKDVNTGGIFQLRQGHSRRVQVTVKPVQHSGTLPLMVEAILSVSIGCVTARSTKLQRGLDSYQRDDEDGDDMDSYQEEDLNCVRERWSDALIKRREYLDEQIKKVSNKTEKTEDDVEREAQLVEQWVGLTEERNAVLVPAPGSGIPGAPADWIPPPGMETHIPVLFLDLNADDLSANEQLVGPHASGVNSILPKEHGSQFFYLPIIKHSDDEVSATASWDSSVHDSVHLNRVTPQNERIYLIVKTTVQLSHPAAMELVLRKRIAANIYNKQSFTQSLKRRISLKNIFYSCGVTYEIVSNIPKATEEIEDRETLALLAARSENEGTSDGETYIEKYTRGVLQVENILSLERLRQAVTVKEALSTKARHIRRSLSTPNVHNVSSSRPDLSGFDEDDKGWPENQLDMSDYSSSYQDVACYGTLPRDSPRRNKEGCTSETPHALTVSPFKAFSPQPPKFFKPLMPVKEEHKKRIALEARPLLSQEDSEEEENELEAINRKLISSQPYVPVEFADFSVYNASLENREWFSSKVDLSNSRVLEKEVSRSPTTSSITSGYFSHSASNATLSDMVVPSSDSSDQLAIQTKDADSTEHSTPSLVHDFRPSSNKELTEVEKGLVKDKIIVVPLKENSALAKGSPSSQSIPEKNSKSLCRTGSCSELDACPSKISQPARGFCPREVTVEHTTNILEDHSFTEFMGVSEGKDFDGLTDSSAGELSSRRSLPNKTGGKTVSDGLHHPSQLHSKLENDQVIIPEAAFWVLCCQ

SEQ ID NO: 24612 - protein, 64 aa, Artificial Sequence
  Synthetic polypeptide
RPAFKSQGHHFPELELNTKCVVEMEGNQTVLHPPPSNTKQGERLVTVAHISNSSTLGGQGKRIT

SEQ ID NO: 24613 - protein, 463 aa, Artificial Sequence
  Synthetic polypeptide
GLPSHMELKAQEENKKIVLAGCVPQAQPRQDYLKGLSIIGVQQIDRVVEVVEETIKGHSVRLLGQKKDNGRRLGGARLDLPKIRKNPLIEIISINTGCLNACTYCKTKHARGNLASYPIDELVDRAKQSFQEGVCEIWLTSEDTGAYGRDIGTNLPTLLWKLVEVIPEGAMLRLGMTNPPYILEHLEEMAKILNHPRVYAFLHIPVQSASDSVLMEMKREYCVADFKRVVDFLKEKVPGITIATDIICGFPGETDQDFQETVKLVEEYKFPSLFINQFYPRPGTPAAKMEQVPAQVKKQRTKDLSRVFHSYSPYDHKIGERQQVLVTEESFDSKFYVAHNQFYEQVLVPKNPAFMGKMVEVDIYESGKHFMKGQPVSDAKVYTPSISKPLAKGEVSGLTKDFRNGLGNQLSSGSHTSAASQCDSASSRMVLPMPRLHQDCALRMSVGLALLGLLFAFFVKVYN

SEQ ID NO: 24614 - protein, 463 aa, Artificial Sequence; identical to SEQ ID NO: 24613
  Synthetic polypeptide

SEQ ID NO: 24615 - protein, 46 aa, Artificial Sequence
  Synthetic polypeptide
DVTYSSLPSAMTVRSPQPHGTKSSRGEQENRTGWMRSSSPASPGLP

SEQ ID NO: 24616 - protein, 46 aa, Artificial Sequence; identical to SEQ ID NO: 24615
  Synthetic polypeptide

SEQ ID NO: 24617 - protein, 46 aa, Artificial Sequence; identical to SEQ ID NO: 24615
  Synthetic polypeptide

SEQ ID NO: 24618 - protein, 442 aa, Artificial Sequence
  Synthetic polypeptide
GLPSHMELKAQEENKKIVLAGCVPQAQPRQDYLKGLSIIGVQQIDRVVEVVEETIKGHSVRLLGQKKDNGRRLGGARLDLPKIRKNPLIEIISINTGCLNACTYCKTKHARGNLASYPIDELVDRAKQSFQEGVCEIWLTSEDTGAYGRDIGTNLPTLLWKLVEVIPEGAMLRLGMTNPPYILEHLEEMAKILNHPRVYAFLHIPVQSASDSVLMEMKREYCVADFKRVVDFLKEKVPGITIATDIICGFPGETDQDFQETVKLVEEYKFPSLFINQFYPRPGTPAAKMEQVPAQVIGERQQVLVTEESFDSKFYVAHNQFYEQVLVPKNPAFMGKMVEVDIYESGKHFMKGQPVSDAKVYTPSISKPLAKGEVSGLTKDFRNGLGNQLSSGSHTSAASQCDSASSRMVLPMPRLHQDCALRMSVGLALLGLLFAFFVKVYN

SEQ ID NO: 24619 - protein, 20 aa, Artificial Sequence
  Synthetic polypeptide
GSQNRKMTLRDNEETWIIRF

SEQ ID NO: 24620 - protein, 20 aa, Artificial Sequence
  Synthetic polypeptide
GSQNRKMTLRDNEETWIIRF

SEQ ID NO: 24621 - protein, 20 aa, Artificial Sequence
  Synthetic polypeptide
GSQNRKMTLRDNEETWIIRF

SEQ ID NO: 24622 - protein, 15 aa, Artificial Sequence
  Synthetic polypeptide
LGFSAKEPCVHGEDG

SEQ ID NO: 24623 - protein, 15 aa, Artificial Sequence
  Synthetic polypeptide
LGFSAKEPCVHGEDG

SEQ ID NO: 24624 - protein, 15 aa, Artificial Sequence
  Synthetic polypeptide
LGFSAKEPCVHGEDG

SEQ ID NO: 24625 - protein, 369 aa, Artificial Sequence
  Synthetic polypeptide
TPSSSHSSRVKPVIHSRINVSARFRKPLQEPCTIFLIANGDLINPASRLLIPRKTLNQWDHVLQMVTEKITLRSGAVHRLYTLEGKLVESGAELENGQFYVAVGRDKFKKLPYSELLFDKSTMRRPFGQKASSLPPIVGSRKSKGSGNDRHSKSTVGSSDNSSPQPLKRKGKKEDVNSEKLTKLKQNVKLKNSQETIPNSDEGIFKAGAERSETRGAAEVQEDEDTQVEVPVDQRPAEIVDEEEDGEKANKDAEQKEDFSGMNGDLEEEGGREATDAPEQVEEILDHSEQQARPARVNGGTDEENGEELQQVNNELQLVLDKERKSQGAGSGQDEADVDPQRPPRPEVKITSPEENENNQQNKDYAAVA

SEQ ID NO: 24626 - protein, 17 aa, Artificial Sequence
  Synthetic polypeptide
FVSKFCTRLLAHPIPAG

SEQ ID NO: 24627 - protein, 12 aa, Artificial Sequence
  Synthetic polypeptide
LIPFQQGKTSNP

SEQ ID NO: 24628 - protein, 109 aa, Artificial Sequence
  Synthetic polypeptide
GRARLLTPVIPTLWEAKPDGSPEAKFEFHHGDYEKQFLHVLSRKDKTGIVVNNPNQSVFLFIDRQHLQTPKNKATIFKLCSICLYLPQEQLTHWAVGTIEDHLRPYMPE

SEQ ID NO: 24629 - protein, 109 aa, Artificial Sequence; identical to SEQ ID NO: 24628
  Synthetic polypeptide

SEQ ID NO: 24630 - protein, 109 aa, Artificial Sequence; identical to SEQ ID NO: 24628
  Synthetic polypeptide

SEQ ID NO: 24631 - protein, 31 aa, Artificial Sequence
  Synthetic polypeptide
SQHFGRLSQMDHLRPNLSFIMVTMKNSFCMY

SEQ ID NO: 24632 - protein, 31 aa, Artificial Sequence; identical to SEQ ID NO: 24631
  Synthetic polypeptide

SEQ ID NO: 24633 - protein, 31 aa, Artificial Sequence; identical to SEQ ID NO: 24631
  Synthetic polypeptide

SEQ ID NO: 24634 - protein, 30 aa, Artificial Sequence
  Synthetic polypeptide
VYTDKFSFKLGKSILSVLEGSGRKTEKGAV

SEQ ID NO: 24635 - protein, 30 aa, Artificial Sequence; identical to SEQ ID NO: 24634
  Synthetic polypeptide

SEQ ID NO: 24636 - protein, 30 aa, Artificial Sequence; identical to SEQ ID NO: 24634
  Synthetic polypeptide

SEQ ID NO: 24637 - protein, 133 aa, Artificial Sequence
  Synthetic polypeptide
KRIYESILINFLLNWENPSSQYWKEVAEKRRKALYEALKENEKLHKEIEQKDNEIARLKKENKELAEVAEHVQYMAELIERLNGEPLDNFESLDNQEFDSEEETVEDSLVEDSEIGTCAEGTVSSSTDAKPCI

SEQ ID NO: 24638 - protein, 133 aa, Artificial Sequence; identical to SEQ ID NO: 24637
  Synthetic polypeptide

SEQ ID NO: 24639 - protein, 44 aa, Artificial Sequence
  Synthetic polypeptide
IGKIHPLSIGRKWQKNGERRCMKHLRKMRNFIKKLNKRTMKLPA

SEQ ID NO: 24640 - protein, 44 aa, Artificial Sequence; identical to SEQ ID NO: 24639
  Synthetic polypeptide

SEQ ID NO: 24641 - protein, 44 aa, Artificial Sequence; identical to SEQ ID NO: 24639
  Synthetic polypeptide

SEQ ID NO: 24642 - protein, 103 aa, Artificial Sequence
  Synthetic polypeptide
KRIYESILINFLLNWENPSSQYWKEVAEKRRKALYEALKENEKLHKEIEQKDNEIARLKKENKELAEVAEHVQYMAELIERLNGEPLDNFESLDNQEFDSEEE

SEQ ID NO: 24643 - protein, 21 aa, Artificial Sequence
  Synthetic polypeptide
VYTDKFSFKLGKSILSVLEGS

SEQ ID NO: 24644 - protein, 26 aa, Artificial Sequence
  Synthetic polypeptide
KRIYESILINFLLNWENPSSQYWKEV

SEQ ID NO: 24645 - protein, 13 aa, Artificial Sequence
  Synthetic polypeptide
IGKIHPLSIGRKW

SEQ ID NO: 24646 - protein, 42 aa, Artificial Sequence
  Synthetic polypeptide
FFEHTRRSPTSSRGVPSTCYVLSPEVSMTTSLFQVYVLLAME

SEQ ID NO: 24647 - protein, 42 aa, Artificial Sequence; identical to SEQ ID NO: 24646
  Synthetic polypeptide

SEQ ID NO: 24648 - protein, 42 aa, Artificial Sequence; identical to SEQ ID NO: 24646
  Synthetic polypeptide

SEQ ID NO: 24649 - protein, 42 aa, Artificial Sequence; identical to SEQ ID NO: 24646
  Synthetic polypeptide

SEQ ID NO: 24650 - protein, 42 aa, Artificial Sequence; identical to SEQ ID NO: 24646
  Synthetic polypeptide

SEQ ID NO: 24651 - protein, 50 aa, Artificial Sequence
  Synthetic polypeptide
PPLCSKFMFCSLWNSPRLTFLQFHNDSTKCHHEHHHGSHGQQHKPSIPAQ

SEQ ID NO: 24652 - protein, 50 aa, Artificial Sequence; identical to SEQ ID NO: 24651
  Synthetic polypeptide

SEQ ID NO: 24653 - protein, 50 aa, Artificial Sequence; identical to SEQ ID NO: 24651
  Synthetic polypeptide

SEQ ID NO: 24654 - protein, 50 aa, Artificial Sequence; identical to SEQ ID NO: 24651
  Synthetic polypeptide

SEQ ID NO: 24655 - protein, 50 aa, Artificial Sequence; identical to SEQ ID NO: 24651
  Synthetic polypeptide

SEQ ID NO: 24656 - protein, 497 aa, Artificial Sequence
  Synthetic polypeptide
TYQALSNQLQGCSLYLLCSFPRGQHDHLSVPSLCSARYGIALVLHFCNFTTIAQNVIMNITMVAMVNSTSPQSQLNDSSEVLPVDSFGGLSKAPKSLPAKAPVYDWSPQIQGIIFGAVGYGGILTMAPSGYLAGRVGTKRVVGISLFATSFLTLCIPLATDFGIVLLIVTRIVQGLSQSSILGGQFAIWEKWGPPQERSRLCSIALSGMLLGCFTAILIGGFISETLGWPFVFYIFGGVGCVCCLLWFVVIYDDPVSYPWISTSEKEYIISSLKQQVGSSKQPLPIKAMLRSLPIWSICLGCFSHQWLVSTMVVYIPTYISSVYHVNIRDNGLLSALPFIVAWVIGMVGGYLADFLLTKKFRLITVRKIATILGSLPSSALIVSLPYLNSGYITATALLTLSCGLSTLCQSGIYINVLDIAPRYSSFLMGASRGFSSIAPVIVPTVSGFLLSQDPEFGWRNVFFLLFAVNLLGLLFYLIFGEADVQEWAKERKLTRL

SEQ ID NO: 24657 - protein, 419 aa, Artificial Sequence
  Synthetic polypeptide
TYQALSNQLQGCSLYLLCSFPRGQHDHLSVPSLCSARYGIALVLHFCNFTTIAQNVIMNITMVAMVNSTSPQSQLNDSSEVLPVDSFGGLSKAPKSLPAKSSILGGQFAIWEKWGPPQERSRLCSIALSGMLLGCFTAILIGGFISETLGWPFVFYIFGGVGCVCCLLWFVVIYDDPVSYPWISTSEKEYIISSLKQQVGSSKQPLPIKAMLRSLPIWSICLGCFSHQWLVSTMVVYIPTYISSVYHVNIRDNGLLSALPFIVAWVIGMVGGYLADFLLTKKFRLITVRKIATILGSLPSSALIVSLPYLNSGYITATALLTLSCGLSTLCQSGIYINVLDIAPRYSSFLMGASRGFSSIAPVIVPTVSGFLLSQDPEFGWRNVFFLLFAVNLLGLLFYLIFGEADVQEWAKERKLTRL

SEQ ID NO: 24658 - protein, 419 aa, Artificial Sequence; identical to SEQ ID NO: 24657
  Synthetic polypeptide

SEQ ID NO: 24659 - protein, 111 aa, Artificial Sequence
  Synthetic polypeptide
TYQALSNQLQGCSLYLLCSFPRGQHDHLSVPSLCSARYGIALVLHFCNFTTIAQNVIMNITMVAMVNSTSPQSQLNDSSEVLPVDSFGGLSKAPKSLPAKECYWDALLPSS

SEQ ID NO: 24660 - protein, 111 aa, Artificial Sequence; identical to SEQ ID NO: 24659
  Synthetic polypeptide

SEQ ID NO: 24661 - protein, 128 aa, Artificial Sequence
  Synthetic polypeptide
QTIIGGREKEEVWVLIHWLPYCKLPSGWLHCLAEALGSNLHVEVKGYEDGGIHLECRSTGWYPQPQIQWSNAKGENIPAVEAPVVADGVGLYEVAASVIMRGGSGEGVSCIIRNSLLGLEKTASISIA

SEQ ID NO: 24662 - protein, 39 aa, Artificial Sequence
  Synthetic polypeptide
EEEKRKKSGCLFTGFLTASYPQAGCIALLKHWVLIFTSK

SEQ ID NO: 24663 - protein, 39 aa, Artificial Sequence; identical to SEQ ID NO: 24662
  Synthetic polypeptide

SEQ ID NO: 24664 - protein, 39 aa, Artificial Sequence; identical to SEQ ID NO: 24662
  Synthetic polypeptide

SEQ ID NO: 24665 - protein, 39 aa, Artificial Sequence; identical to SEQ ID NO: 24662
  Synthetic polypeptide

SEQ ID NO: 24666 - protein, 39 aa, Artificial Sequence; identical to SEQ ID NO: 24662
  Synthetic polypeptide

SEQ ID NO: 24667 - protein, 39 aa, Artificial Sequence; identical to SEQ ID NO: 24662
  Synthetic polypeptide

SEQ ID NO: 24668 - protein, 39 aa, Artificial Sequence; identical to SEQ ID NO: 24662
  Synthetic polypeptide

SEQ ID NO: 24669 - protein, 39 aa, Artificial Sequence; identical to SEQ ID NO: 24662
  Synthetic polypeptide

SEQ ID NO: 24670 - protein, 47 aa, Artificial Sequence
  Synthetic polypeptide
QTIIGGREKEEVWVLIHWLPYCKLPSGWLHCLAEALGSNLHVEVKGY

SEQ ID NO: 24671 - protein, 224 aa, Artificial Sequence
  Synthetic polypeptide
QTIIGGREKEEVWVLIHWLPYCKLPSGWLHCLAEALGSNLHVEVKGYEDGGIHLECRSTGWYPQPQIQWSNAKGENIPAVEAPVVADGVGLYEVAASVIMRGGSGEGVSCIIRNSLLGLEKTASISIADPFFRSAQPWIAALAGTLPILLLLLAGASYFLWRQQKEITALSSEIESEQEMKEMGYAATEREISLRESLQEELKRKKIQYLTRGEESSSDTNKSA

SEQ ID NO: 24672 - protein, 224 aa, Artificial Sequence; identical to SEQ ID NO: 24671
  Synthetic polypeptide

SEQ ID NO: 24673 - protein, 224 aa, Artificial Sequence; identical to SEQ ID NO: 24671
  Synthetic polypeptide

SEQ ID NO: 24674 - protein, 224 aa, Artificial Sequence; identical to SEQ ID NO: 24671
  Synthetic polypeptide

SEQ ID NO: 24675 - protein, 224 aa, Artificial Sequence; identical to SEQ ID NO: 24671
  Synthetic polypeptide

SEQ ID NO: 24676 - protein, 224 aa, Artificial Sequence; identical to SEQ ID NO: 24671
  Synthetic polypeptide

SEQ ID NO: 24677 - protein, 9 aa, Artificial Sequence
  Synthetic polypeptide
WLPDRSDGW

SEQ ID NO: 24678 - protein, 30 aa, Artificial Sequence
  Synthetic polypeptide
PIKLFLCVTSLVEWSSLNLSDGCPIVLMGG

SEQ ID NO: 24679 - protein, 133 aa, Artificial Sequence
  Synthetic polypeptide
APDVTCENPRCPFSQLPALPSQLDLCEQVFGLSALSVAQAVAQTNSYYGGQTPGANKVLFVNGDTDPWHVLSVTQALGSSESTLLIRTGSHCLDMAPERPSDSPSLRLGRQNIFQQLQTWLKLAKESQIKGEV

SEQ ID NO: 24680 - protein, 133 aa, Artificial Sequence; identical to SEQ ID NO: 24679
  Synthetic polypeptide

SEQ ID NO: 24681 - protein, 81 aa, Artificial Sequence
  Synthetic polypeptide
VSLATSDFDSSVFSLAFYTACHNTFFIACLPLWTESCDSRAWSCLGCHHVPNIVQHLSEHLMSPVRIPDVLSPSSQHCPPS

SEQ ID NO: 24682 - protein, 81 aa, Artificial Sequence; identical to SEQ ID NO: 24681
  Synthetic polypeptide

SEQ ID NO: 24683 - protein, 81 aa, Artificial Sequence; identical to SEQ ID NO: 24681
  Synthetic polypeptide

SEQ ID NO: 24684 - protein, 23 aa, Artificial Sequence
  Synthetic polypeptide
APDVTCENPRCPFSQLPALPSQL

SEQ ID NO: 24685 - protein, 4 aa, Artificial Sequence
  Synthetic polypeptide
APDV

SEQ ID NO: 24686 - protein, 4 aa, Artificial Sequence
  Synthetic polypeptide
APDV

SEQ ID NO: 24687 - protein, 63 aa, Artificial Sequence
  Synthetic polypeptide
VSLATSDFDSSVFSLAFYTACHNTFFIACLPLWTESCDSRAWSCLGCHHVPNIVQHLSEHLMS

SEQ ID NO: 24688 - protein, 63 aa, Artificial Sequence; identical to SEQ ID NO: 24687
  Synthetic polypeptide

SEQ ID NO: 24689 - protein, 8 aa, Artificial Sequence
  Synthetic polypeptide
HEMLPPPP

SEQ ID NO: 24690 - protein, 8 aa, Artificial Sequence
  Synthetic polypeptide
HEMLPPPP

SEQ ID NO: 24691 - protein, 901 aa, Artificial Sequence
  Synthetic polypeptide
GQEFETSLRNMRCCPHPLRPEGSGAMGPEALSSLLLLLLVASGDADMKGHFDPAKCRYALGMQDRTIPDSDISASSSWSDSTAARHSRLESSDGDGAWCPAGSVFPKEEEYLQVDLQRLHLVALVGTQGRHAGGLGKEFSRSYRLRYSRDGRRWMGWKDRWGQEVISGNEDPEGVVLKDLGPPMVARLVRFYPRADRVMSVCLRVELYGCLWRDGLLSYTAPVGQTMYLSEAVYLNDSTYDGHTVGGLQYGGLGQLADGVVGLDDFRKSQELRVWPGYDYVGWSNHSFSSGYVEMEFEFDRLRAFQAMQVHCNNMHTLGARLPGGVECRFRRGPAMAWEGEPMRHNLGGNLGDPRARAVSVPLGGRVARFLQCRFLFAGPWLLFSEISFISDVVNNSSPALGGTFPPAPWWPPGPPPTNFSSLELEPRGQQPVAKAEGSPTAILIGCLVAIILLLLLIIALMLWRLHWRRLLSKAERRVLEEELTVHLSVPGDTILINNRPGPREPPPYQEPRPRGNPPHSAPCVPNGSAYSGDYMEPEKPGAPLLPPPPQNSVPHYAEADIVTLQGVTGGNTYAVPALPPGAVGDGPPRVDFPRSRLRFKEKLGEGQFGEVHLCEVDSPQDLVSLDFPLNVRKGHPLLVAVKILRPDATKNARNDFLKEVKIMSRLKDPNIIRLLGVCVQDDPLCMITDYMENGDLNQFLSAHQLEDKAAEGAPGDGQAAQGPTISYPMLLHVAAQIASGMRYLATLNFVHRDLATRNCLVGENFTIKIADFGMSRNLYAGDYYRVQGRAVLPIRWMAWECILMGKFTTASDVWAFGVTLWEVLMLCRAQPFGQLTDEQVIENAGEFFRDQGRQVYLSRPPACPQGLYELMLRCWSRESEQRPPFSQLHRFLAEDALNTV

SEQ ID NO: 24692 - protein, 195 aa, Artificial Sequence
  Synthetic polypeptide
GQEFETSLRNMRCCPHPLRPEGSGAMGPEALSSLLLLLLVASGDADMKGHFDPAKCRYALGMQDRTIPDSDISASSSWSDSTAARHSRLESSDGDGAWCPAGSVFPKEEEYLQVDLQRLHLVALVGTQGRHAGGLGKEFSRSYRLRYSRDGRRWMGWKDRWGQEVISGNEDPEGVVLKDLGPPMVARLVRFYPRA

SEQ ID NO: 24693 - protein, 1372 aa, Artificial Sequence
  Synthetic polypeptide
KKKKKKGATTFQEYQKTGELSTSDHIFPLTPGLVYSIPFDHIVLHSGQRPPELPKSTEIHEQKRHCNTTRHSKPTDKPTGNSKTIDHKSSTDNHEAPPTSEENSSNQGKDPMIRNQRSVDPADSTTTHKESAGKKHITPAPKSKINCRKSTTGKSTVTRKSDKTGRPLEKSMSTLDKTSTSSHKTTTSFHNSGNSQTKQKSTSFPEKITAASKTTYKTTGTPEESEKTEDSRTTVASDKLLTKTTKNIQETISANELTQSLAEPTEHGGRTANENNTPSPAEPTENRERTANENTTLSPAEPIENRERTANENTAPFPAGPTENREMTANENTTLFPAEPTEHGERTANENTTPSPAEPTEHGERTANENTTPSPAEPTEHGERTPFANDKTTSSSAESTEHGERTPLANENTTPSPAEPTENRERTANENTTPSPAGPTENRETTANEKTTLSPVEPTENRETTANEKTTPSPAEPTENGQRTPFANEKTTSSSAEPTEHGERTPLANENTTPSPAEPTENRERTANEKTTPSPAEPTENGDRTPLANEKTTPSLAEPTENGQRTPFANEKTTSSSAEPTEHEERTPLANENTTPSPAEPTENRERTANENTTPSPAGPTENREMTANEKTTLFPAEPTENRERTANEKTTSSPAEPTENGQRTPFANEKTTSSSAEPTEHGERTPLANENTTLSPAEPTENRERTANEKTTPFPAEPTENRERTANENTTPSPAQPTENGDRTPLANEKTTPSLAEPTENGKRTPFANEKTTSSSAEPTEHAERTPLANENTTSSPAEPTENRERTANEKTTQFPAEPTENRESTANEKTTPFPAEPTENREWTANENTTLSPAEPTEHEEMTPLANEKTTLSPAEPTENGERTPFTNEKTTPSSAEPTEHGERTPLANEITTPSRAEPTEHGERIANEKATPSPAKPTEHGETTVNEDTTPSSAEPTENGERTPLANENTTTSPTESTEHGERTANEKTTPSPAEPTEHGERTPSANEKTIPSPAKPTEHEEMTPSANENTTPSPVKPTEHGEKTTLANEKITLSPEGPTEHGAKTTSANEKITPSLAKPTEHGERTTSPNDKITSSAAESTEHRDRATSANVITPAPAEPIKHAKRTTLAHEKMTQVTEKSTEHPEKTTSTTEKTTRTPEKPTLYSEKTICTKGKNTPVPEKPTENLGNTTLTTETIKAPVKSTENPEKTAAVTKTIKPSVKVTGDKSLTTTSSHLNKTEVTHQVPTGSFTLITSRTKLSSITSEATGNESHPYLNKDGSQKGIHAGQMGENDSFPAWAIVIVVLVAVILLLVFLGLIFLVSYMMRTRRTLTQNTQYNDAEDEGGPNSYPVYLMEQQNLGMGQIPSPR

SEQ ID NO: 24694 - protein, 97 aa, Artificial Sequence
  Synthetic polypeptide
DQPGQHSETLRLKKKKKKKVLLHSKNIRKLGNSQHPITYFPSLQALFIVSLLITLFCIQDKDLQSSLNLQKSMSKNATATPHAILSQLTSLQATPKL

SEQ ID NO: 24695 - protein, 52 aa, Artificial Sequence
  Synthetic polypeptide
RPEFETSLANIVRPCVLKKKKKKRCYYIPRISENWGTLNIRSHISPHSRPCL

SEQ ID NO: 24696 - protein, 92 aa, Artificial Sequence
  Synthetic polypeptide
TLLCCWGCSCKPSSSCVFLWVQTWTLLRKPQPGPRHSLASSWGLFKLLSFHEPALRSGSRPPWLRWKGLPPSFPASTTDSAMLSARSTPFGA

SEQ ID NO: 24697 - protein, 92 aa, Artificial Sequence; identical to SEQ ID NO: 24696
  Synthetic polypeptide

SEQ ID NO: 24698 - protein, 92 aa, Artificial Sequence; identical to SEQ ID NO: 24696
  Synthetic polypeptide

SEQ ID NO: 24699 - protein, 36 aa, Artificial Sequence
  Synthetic polypeptide
GNPSPAPDTPWPPPGACLSCSVFMSQLSDLARDHHG

SEQ ID NO: 24700 - protein, 36 aa, Artificial Sequence; identical to SEQ ID NO: 24699
  Synthetic polypeptide

SEQ ID NO: 24701 - protein, 36 aa, Artificial Sequence; identical to SEQ ID NO: 24699
  Synthetic polypeptide

SEQ ID NO: 24702 - protein, 346 aa, Artificial Sequence
  Synthetic polypeptide
ASSQIWLETTMAKVEGAAAQLPSLNNRLSYAVRKVHTIRGLIARKLALAQLRQESCPLPPPVTDVSLELQQLREERNRLDAELQLSARLIQQEVGRAREQGEAERQQLSKVAQQLEQELQQTQESLASLGLQLEVARQGQQESTEEAASLRQELTQQQELYGQALQEKVAEVETRLREQLSDTERRLNEARREHAKAVVSLRQIQRRAAQEKERSQELRRLQEEARKEEGQRLARRLQELERDKNLMLATLQQEGLLSRYKQQRLLTVLPSLLDKKKSVVSSPRPPECSASAPVAAAVPTRESIKGSLSVLLDDLQDLSEAISKEEAVCQGDNLDRCSSSNPQMSS

SEQ ID NO: 24703 - protein, 346 aa, Artificial Sequence; identical to SEQ ID NO: 24702
  Synthetic polypeptide

SEQ ID NO: 24704 - protein, 346 aa, Artificial Sequence; identical to SEQ ID NO: 24702
  Synthetic polypeptide

SEQ ID NO: 24705 - protein, 285 aa, Artificial Sequence
  Synthetic polypeptide
RRRQALLQSHPEADWSTHRRSMRKLIAGLIFLKIWTCTVRTSTDLPQIENCFQYIHQVTESQDIKALQKELEQFAKLLKQKRITLGYTQADVGLTLGVLFGKVFSQTTICRFEALQLSFKNMCKLRPLLQKWVEEADNNENLQEICKAETLVQARKRKRTSIENRVRGNLENLFLQCPKPTLQQISHIAQQLGLEKDVVRVWFCNRRQKGKRSSSDYAQREDFEAAGSPFSGGPVSFPLAPGPHFGTPGYGSPHFTALYSSVPFPEGEAFPPVSVTTLGSPMHSN

SEQ ID NO: 24706 - protein, 38 aa, Artificial Sequence
  Synthetic polypeptide
GLQLTFLRLRTVSSIYIKSLSPRTSKLCRKNSSNLPSS

SEQ ID NO: 24707 - protein, 67 aa, Artificial Sequence
  Synthetic polypeptide
TLGRNWHLESGHLKLVPGHQSSAERTRAICQAPEAEEDHPGIYTGRCGAHPGGSIWEGIQPNDHLPL

SEQ ID NO: 24708 - protein, 227 aa, Artificial Sequence
  Synthetic polypeptide
NLSQDIKALQKELEQFAKLLKQKRITLGYTQADVGLTLGVLFGKVFSQTTICRFEALQLSFKNMCKLRPLLQKWVEEADNNENLQEICKAETLVQARKRKRTSIENRVRGNLENLFLQCPKPTLQQISHIAQQLGLEKDVVRVWFCNRRQKGKRSSSDYAQREDFEAAGSPFSGGPVSFPLAPGPHFGTPGYGSPHFTALYSSVPFPEGEAFPPVSVTTLGSPMHSN

SEQ ID NO: 24709 - protein, 95 aa, Artificial Sequence
  Synthetic polypeptide
LTDGQGSPLGGLGLPCGASLRWTLASLSDAIQRALPGRKFPGWNASPEQHVAGPRGGLTHWLNTGKELALGVRTSETCPRTSKLCRKNSSNLPSS

SEQ ID NO: 24710 - protein, 29 aa, Artificial Sequence
  Synthetic polypeptide
CAMIVPVNSHCTPAWATCQWRSSWMMRRS

SEQ ID NO: 24711 - protein, 29 aa, Artificial Sequence
  Synthetic polypeptide
CAMIVPVNSHCTPAWATCQWRSSWMMRRS

SEQ ID NO: 24712 - protein, 29 aa, Artificial Sequence
  Synthetic polypeptide
CAMIVPVNSHCTPAWATCQWRSSWMMRRS

SEQ ID NO: 24713 - protein, 29 aa, Artificial Sequence
  Synthetic polypeptide
CAMIVPVNSHCTPAWATCQWRSSWMMRRS

SEQ ID NO: 24714 - protein, 29 aa, Artificial Sequence
  Synthetic polypeptide
CAMIVPVNSHCTPAWATCQWRSSWMMRRS

SEQ ID NO: 24715 - protein, 29 aa, Artificial Sequence
  Synthetic polypeptide
CAMIVPVNSHCTPAWATCQWRSSWMMRRS

SEQ ID NO: 24716 - protein, 29 aa, Artificial Sequence
  Synthetic polypeptide
CAMIVPVNSHCTPAWATCQWRSSWMMRRS

SEQ ID NO: 24717 - protein, 29 aa, Artificial Sequence
  Synthetic polypeptide
CAMIVPVNSHCTPAWATCQWRSSWMMRRS

SEQ ID NO: 24718 - protein, 29 aa, Artificial Sequence
  Synthetic polypeptide
CAMIVPVNSHCTPAWATCQWRSSWMMRRS

SEQ ID NO: 24719 - protein, 17 aa, Artificial Sequence
  Synthetic polypeptide
IATALQPGQHANGDLRG

SEQ ID NO: 24720 - protein, 17 aa, Artificial Sequence
  Synthetic polypeptide
IATALQPGQHANGDLRG

SEQ ID NO: 24721 - protein, 17 aa, Artificial Sequence
  Synthetic polypeptide
IATALQPGQHANGDLRG

SEQ ID NO: 24722 - protein, 17 aa, Artificial Sequence
  Synthetic polypeptide
IATALQPGQHANGDLRG

SEQ ID NO: 24723 - protein, 17 aa, Artificial Sequence
  Synthetic polypeptide
IATALQPGQHANGDLRG

SEQ ID NO: 24724 - protein, 17 aa, Artificial Sequence
  Synthetic polypeptide
IATALQPGQHANGDLRG

SEQ ID NO: 24725 - protein, 17 aa, Artificial Sequence
  Synthetic polypeptide
IATALQPGQHANGDLRG

SEQ ID NO: 24726 - protein, 17 aa, Artificial Sequence
  Synthetic polypeptide
IATALQPGQHANGDLRG

SEQ ID NO: 24727 - protein, 17 aa, Artificial Sequence
  Synthetic polypeptide
IATALQPGQHANGDLRG

SEQ ID NO: 24728 - protein, 113 aa, Artificial Sequence
  Synthetic polypeptide
PLHSSLGNMPMEIFVDDETKLTLHGLQQYYVKLKDNEKNRKLFDLLDVLEFNQVVIFVKSVQRCIALAQLLVEQNFPAIAIHRGMPQEESLKIFNDEFLWLPTYLAEAWTSSG

SEQ ID NO: 24729 - protein, 189 aa, Artificial Sequence
  Synthetic polypeptide
PLHSSLGNMPMEIFVDDETKLTLHGLQQYYVKLKDNEKNRKLFDLLDVLEFNQVVIFVKSVQRCIALAQLLVEQNFPAIAIHRGMPQEERLSRYQQFKDFQRRILVATNLFGRGMDIERVNIAFNYDMPEDSDTYLHRCYPLSPSRWPEQAGLAPRAWLSHLCPMRMMPRSSMMCRIALRSILVSCLMR

SEQ ID NO: 24730 - protein, 192 aa, Artificial Sequence
  Synthetic polypeptide
PLHSSLGNMPMEIFVDDETKLTLHGLQQYYVKLKDNEKNRKLFDLLDVLEFNQVVIFVKSVQRCIALAQLLVEQNFPAIAIHRGMPQEERLSRYQQFKDFQRRILVATNLFGRGMDIERVNIAFNYDMPEDSDTYLHRVARAGRFGTKGLAITFVSDENDAKILNDVQDRFEVNISELPDEIDISSYIEQTR

SEQ ID NO: 24731 - protein, 192 aa, Artificial Sequence; identical to SEQ ID NO: 24730
  Synthetic polypeptide

SEQ ID NO: 24732 - protein, 192 aa, Artificial Sequence; identical to SEQ ID NO: 24730
  Synthetic polypeptide

SEQ ID NO: 24733 - protein, 192 aa, Artificial Sequence; identical to SEQ ID NO: 24730
  Synthetic polypeptide

SEQ ID NO: 24734 - protein, 187 aa, Artificial Sequence
  Synthetic polypeptide
PLHSSLGNMPMEIFVDDETKLTLHGLQQYYVKLKDNEKNRKLFDLLDVLEFNQVVIFVKSVQRCIALAQLLVEQNFPAIAIHRGMPQEERLSRYQQFKDFQRRILVATNLFGRGMDIERVNIAFNYDMPEDSDTYLHRVARAGRFGTKGLAITFVSDENDAKILNDVQDRFEVNISELPDEIDISSY

SEQ ID NO: 24735 - protein, 87 aa, Artificial Sequence
  Synthetic polypeptide
PLHSSLGNMPMEIFVDDETKLTLHGLQQYYVKLKDNEKNRKLFDLLDVLEFNQVVIFVKSVQRCIALAQLLVEQNFPAIAIHRGMPQ

SEQ ID NO: 24736 - protein, 53 aa, Artificial Sequence
  Synthetic polypeptide
PLHSSLGNMPMEIFVDDETKLTLHGLQQYYVKLKDNEKNRKLFDLLDVLEFNQ

SEQ ID NO: 24737 - protein, 51 aa, Artificial Sequence
  Synthetic polypeptide
TCPARLLRRLSKLPGGAHPRAPDAVSRLCVPAAEGPHACAAAGPGPTGGRV

SEQ ID NO: 24738 - protein, 51 aa, Artificial Sequence; identical to SEQ ID NO: 24737
  Synthetic polypeptide

SEQ ID NO: 24739 - protein, 351 aa, Artificial Sequence
  Synthetic polypeptide
VSYLVAHTLGRRMLYPGSVYLLQKALMPVLLQGQARLVEECNGRRAKLLACDGNEIDTMFVDRRGTAEPQGQKLVICCEGNAGFYEVGCVSTPLEAGYSVLGWNHPGFAGSTGVPFPQNEANAMDVVVQFAIHRLGFQPQDIIIYAWSIGGFTATWAAMSYPDVSAMILDASFDDLVPLALKVMPDSWRGLVTRTVRQHLNLNNAEQLCRYQGPVLLIRRTKDEIITTTVPEDIMSNRGNDLLLKLLQHRYPRVMAEEGLRVVRQWLEASSQLEEASIYSRWEVEEDWCLSVLRSYQAEHGPDFPWSVGEDMSADGRRQLALFLARKHLHNFEATHCTPLPAQNFQMPWHL

SEQ ID NO: 24740 - protein, 351 aa, Artificial Sequence; identical to SEQ ID NO: 24739
  Synthetic polypeptide

SEQ ID NO: 24741 - protein, 57 aa, Artificial Sequence
  Synthetic polypeptide
SQHFGRPRRSFKSRGRSESSSWASTWMPMELSSLRTTGPESSRPVMADRMLGQCRNF

SEQ ID NO: 24742 - protein, 42 aa, Artificial Sequence
  Synthetic polypeptide
AGAVAHTCNPSTLGGREGASRAGGDQNRPAGLRLGCPWNYLH

SEQ ID NO: 24743 - protein, 42 aa, Artificial Sequence; identical to SEQ ID NO: 24742
  Synthetic polypeptide

SEQ ID NO: 24744 - protein, 42 aa, Artificial Sequence; identical to SEQ ID NO: 24742
  Synthetic polypeptide

SEQ ID NO: 24745 - protein, 42 aa, Artificial Sequence; identical to SEQ ID NO: 24742
  Synthetic polypeptide

SEQ ID NO: 24746 - protein, 191 aa, Artificial Sequence
  Synthetic polypeptide
PARWLTPVIPALWEAEKELQEQGEIRIVQLGFDLDAHGIIFTEDYRTRVLKACDGRPYAGAVQKFLASVLPACGDLSFQQDQMTQTFGFRDSEITHLVNAGVLTVRDAGSWWLAVPGAGRFIKYFVKGRQAVLSMVRKAKYRELLLSELLGRRAPVVVRLGLTYHVHDLIGAQLVDCISTTSGTLLRLPET

SEQ ID NO: 24747 - protein, 61 aa, Artificial Sequence
  Synthetic polypeptide
SQHFGRPRRSFKSRGRSESSSWASTWMPMELSSLRTTGPEYVTVSSRPVMADRMLGQCRNF

SEQ ID NO: 24748 - protein, 195 aa, Artificial Sequence
  Synthetic polypeptide
PARWLTPVIPALWEAEKELQEQGEIRIVQLGFDLDAHGIIFTEDYRTRVCDCVLKACDGRPYAGAVQKFLASVLPACGDLSFQQDQMTQTFGFRDSEITHLVNAGVLTVRDAGSWWLAVPGAGRFIKYFVKGRQAVLSMVRKAKYRELLLSELLGRRAPVVVRLGLTYHVHDLIGAQLVDCISTTSGTLLRLPET

SEQ ID NO: 24749 - protein, 34 aa, Artificial Sequence
  Synthetic polypeptide
SQHFGRPRRSFKSRGRSESSSWASTWMPMELSSL

SEQ ID NO: 24750 - protein, 34 aa, Artificial Sequence; identical to SEQ ID NO: 24749
  Synthetic polypeptide

SEQ ID NO: 24751 - protein, 42 aa, Artificial Sequence
  Synthetic polypeptide
PARWLTPVIPALWEAEKELQEQGEIRIVQLGFDLDAHGIIFT

SEQ ID NO: 24752 - protein, 42 aa, Artificial Sequence; identical to SEQ ID NO: 24751
  Synthetic polypeptide

SEQ ID NO: 24753 - protein, 121 aa, Artificial Sequence
  Synthetic polypeptide
PWELLALDVSASAGSGLETRSFGRSSVMSMGLTPLAVTMETVICSWRESMFTTMKPLVTNMFLGPSSWIWSQARWIRLGLDHSARSSDQTISCLARVEPGITGPRATTQREPSWSTRSWMW

SEQ ID NO: 24754 - protein, 9 aa, Artificial Sequence
  Synthetic polypeptide
KLGVLGGHQ

SEQ ID NO: 24755 - protein, 462 aa, Artificial Sequence
  Synthetic polypeptide
KDEIPVRALSSTCCMTLGIASPRRFGICRIWIRNSEFWEVISDEHGIDPTGSYHGDSDLQLERINVYYNEATGNKYVPRAILVDLEPGTMDSVRSGPFGQIFRPDNFVFGQSGAGNNWAKGHYTEGAELVDSVLDVVRKESESCDCLQGFQLTHSLGGGTGSGMGTLLISKIREEYPDRIMNTFSVMPSPKVSDTVVEPYNATLSVHQLVENTDETYCIDNEALYDICFRTLKLTTPTYGDLNHLVSATMSGVTTCLRFPGQLNADLRKLAVNMVPFPRLHFFMPGFAPLTSRGSQQYRALTVPELTQQMFDSKNMMAACDPRHGRYLTVAAIFRGRMSMKEVDEQMLNVQNKNSSYFVEWIPNNVKTAVCDIPPRGLKMSATFIGNSTAIQELFKRISEQFTAMFRRKAFLHWYTGEGMDEMEFTEAESNMNDLVSEYQQYQDATADEQGEFEEEEGEDEA

SEQ ID NO: 24756 - protein, 430 aa, Artificial Sequence
  Synthetic polypeptide
ARTRFWEVISDEHGIDPTGSYHGDSDLQLERINVYYNEATGNKYVPRAILVDLEPGTMDSVRSGPFGQIFRPDNFVFGQSGAGNNWAKGHYTEGAELVDSVLDVVRKESESCDCLQGFQLTHSLGGGTGSGMGTLLISKIREEYPDRIMNTFSVMPSPKVSDTVVEPYNATLSVHQLVENTDETYCIDNEALYDICFRTLKLTTPTYGDLNHLVSATMSGVTTCLRFPGQLNADLRKLAVNMVPFPRLHFFMPGFAPLTSRGSQQYRALTVPELTQQMFDSKNMMAACDPRHGRYLTVAAIFRGRMSMKEVDEQMLNVQNKNSSYFVEWIPNNVKTAVCDIPPRGLKMSATFIGNSTAIQELFKRISEQFTAMFRRKAFLHWYTGEGMDEMEFTEAESNMNDLVSEYQQYQDATADEQGEFEEEEGEDEA

SEQ ID NO: 24757 - protein, 104 aa, Artificial Sequence
  Synthetic polypeptide
REHGFGRSSVMSMGLTPLAVTMETVICSWRESMFTTMKPLVTNMFLGPSSWIWSQARWIRLGLDHSARSSDQTISCLARVEPGITGPRATTQREPSWSTRSWMW

SEQ ID NO: 24758 - protein, 9 aa, Artificial Sequence
  Synthetic polypeptide
ENTVLGGHQ

SEQ ID NO: 24759 - protein, 257 aa, Artificial Sequence
  Synthetic polypeptide
APPAEWRGLFSRVWIPRGSASLAQARFLQQDKYECHFFNGTERVRFLHRDIYNQEEDLRFDSDVGEYRAVTELGRPDAEYWNSQKDFLEDRRAAVDTYCRHNYGVGESFTVQRRVEPKVTVYPARTQTLQHHNLLVCSVNGFYPGSIEVRWFRNSQEEKAGVVSTGLIQNGDWTFQTLVMLETVPRSGEVYTCQVEHPSVTSPLTVEWRAQSESAQSKMLSGVGGFVLGLLFLGAGLFIYFKNQKGHSGLHPTGLVS

SEQ ID NO: 24760 - protein, 105 aa, Artificial Sequence
  Synthetic polypeptide
DHPITLCSGTPHFRHFSFLSKLLCVWFLASLLLLFKLPQRSGEVCFPVFGFPEAVQAWHKHVSCSRISMSVISSTGRSGCGSCTETSITKRRTCASTATWGSTGR

SEQ ID NO: 24761 - protein, 82 aa, Artificial Sequence
  Synthetic polypeptide
TVTLQKVLLWHPNVIEIILLLCVLELHTSDISHSCLSSCVFGFWPHFYCSLSSPSGVERSVFPCLDSQRQCKPGTSTFLAAG

SEQ ID NO: 24762 - protein, 12 aa, Artificial Sequence
  Synthetic polypeptide
EVKPAGLLGGDS

SEQ ID NO: 24763 - protein, 12 aa, Artificial Sequence
  Synthetic polypeptide
SQLDFWVGIPEL

SEQ ID NO: 24764 - protein, 14 aa, Artificial Sequence
  Synthetic polypeptide
RGEASWTSGWGFLS

SEQ ID NO: 24765 - protein, 3 aa, Artificial Sequence
  Synthetic polypeptide
EDS

SEQ ID NO: 24766 - protein, 6 aa, Artificial Sequence
  Synthetic polypeptide
ERIPEL

SEQ ID NO: 24767 - protein, 5 aa, Artificial Sequence
  Synthetic polypeptide
RGFLS

SEQ ID NO: 24768 - protein, 30 aa, Artificial Sequence
  Synthetic polypeptide
APPEEWRGLHLPSGAPKRDKPSHSGMESTV

SEQ ID NO: 24769 - protein, 92 aa, Artificial Sequence
  Synthetic polypeptide
LSSCVFGFWPSLSLLFKLPQRSGEVYTCQVEHPSVTSPLTVEWRARSESAQSKMLSGVGGFVLGLLFLGAGLFIYFRNQKGHSGLQPTGFLS

SEQ ID NO: 24770 - protein, 33 aa, Artificial Sequence
  Synthetic polypeptide
ALVCLVFGHRFHCSLSSPRGVERFTPAKWSTQA

SEQ ID NO: 24771 - protein, 230 aa, Artificial Sequence
  Synthetic polypeptide
ESQMALQIPGGFWAAAVTVMLVMLSTPVAEARDFPKDFLVQFKGMCYFTNGTERVRGVARYIYNREEYGRFDSDVGEFQAVTELGRSIEDWNNYKDFLEQERAAVDKVCRHNYEAELRTTLQRQVEPTVTISPSRTEALNHHNLLVCSVTDFYPAQIKVRWFRNDQEETAGVVSTSLIRNGDWTFQILVMLEITPQRGDIYTCQVEHPSLQSPITVEWRPRGPPPAGLLH

SEQ ID NO: 24772 - protein, 60 aa, Artificial Sequence
  Synthetic polypeptide
GLCKMCFVKQMLEGSMLLKSHHHSLISSTQGHKHCGRLQGPLPRKARWLCRSLEAFGQQL

SEQ ID NO: 24773 - protein, 60 aa, Artificial Sequence; identical to SEQ ID NO: 24772
  Synthetic polypeptide

SEQ ID NO: 24774 - protein, 60 aa, Artificial Sequence; identical to SEQ ID NO: 24772
  Synthetic polypeptide

SEQ ID NO: 24775 - protein, 47 aa, Artificial Sequence
  Synthetic polypeptide
SQVPRDTNTAEGCRDLCLGKPDGSADPWRLLGSSCDRDAGDAEHPSG

SEQ ID NO: 24776 - protein, 47 aa, Artificial Sequence; identical to SEQ ID NO: 24775
  Synthetic polypeptide

SEQ ID NO: 24777 - protein, 47 aa, Artificial Sequence; identical to SEQ ID NO: 24775
  Synthetic polypeptide

SEQ ID NO: 24778 - protein, 278 aa, Artificial Sequence
  Synthetic polypeptide
ESQMALQIPGGFWAAAVTVMLVMLSTPVAEARDFPKDFLVQFKGMCYFTNGTERVRGVARYIYNREEYGRFDSDVGEFQAVTELGRSIEDWNNYKDFLEQERAAVDKVCRHNYEAELRTTLQRQVEPTVTISPSRTEALNHHNLLVCSVTDFYPAQIKVRWFRNDQEETAGVVSTSLIRNGDWTFQILVMLEITPQRGDIYTCQVEHPSLQSPITVEWRAQSESAQSKMLSGIGGFVLGLIFLGLGLIIRHRGQKGPRGPPPAGNISAMIQSGERAQA

SEQ ID NO: 24779 - protein, 267 aa, Artificial Sequence
  Synthetic polypeptide
ESQMALQIPGGFWAAAVTVMLVMLSTPVAEARDFPKDFLVQFKGMCYFTNGTERVRGVARYIYNREEYGRFDSDVGEFQAVTELGRSIEDWNNYKDFLEQERAAVDKVCRHNYEAELRTTLQRQVEPTVTISPSRTEALNHHNLLVCSVTDFYPAQIKVRWFRNDQEETAGVVSTSLIRNGDWTFQILVMLEITPQRGDIYTCQVEHPSLQSPITVEWRAQSESAQSKMLSGIGGFVLGLIFLGLGLIIRHRGQKGPRGPPPAGLLH

SEQ ID NO: 24780 - protein, 235 aa, Artificial Sequence
  Synthetic polypeptide
LIRVCRTGPDHVSTYAAFVQTHRPTGEFMFEFDEDEMFYVDLDKKETVWHLEEFGQAFSFEAQGGLANIAILNNNLNTLIQRSNHTQATNDPPEVTVFPKEPVELGQPNTLICHIDKFFPPVLNVTWLCNGELVTEGVAESLFLPRTDYSFHKFHYLTFVPSAEDFYDCRVEHWGLDQPLLKHWEAQEPIQMPETTETVLCALGLVLGLVGIIVGTVLIIKSLRSGHDPRAQGTL

SEQ ID NO: 24781 - protein, 235 aa, Artificial Sequence; identical to SEQ ID NO: 24780
  Synthetic polypeptide

SEQ ID NO: 24782 - protein, 84 aa, Artificial Sequence
  Synthetic polypeptide
TCCCPVTCVSFCDLYASAEQDRTMCQLMPRLYRRIDQQGSLCLNLMKMRCSMWIWTRRRPSGIWRSLAKPFPLRLRAGWLTLLY

SEQ ID NO: 24783 - protein, 84 aa, Artificial Sequence; identical to SEQ ID NO: 24782
  Synthetic polypeptide

SEQ ID NO: 24784 - protein, 84 aa, Artificial Sequence; identical to SEQ ID NO: 24782
  Synthetic polypeptide

SEQ ID NO: 24785 - protein, 63 aa, Artificial Sequence
  Synthetic polypeptide
SHLFPRKPSLMCCLVASCVYLRICTYPSEPAVVLSLVFPSVTYTRLQNRTGPCVNLCRVCTDA

SEQ ID NO: 24786 - protein, 63 aa, Artificial Sequence; identical to SEQ ID NO: 24785
  Synthetic polypeptide

SEQ ID NO: 24787 - protein, 63 aa, Artificial Sequence; identical to SEQ ID NO: 24785
  Synthetic polypeptide

SEQ ID NO: 24788 - protein, 184 aa, Artificial Sequence
  Synthetic polypeptide
LIRVCRTGPDHVSTYAAFVQTHRPTGEFMFEFDEDEMFYVDLDKKETVWHLEEFGQAFSFEAQGGLANIAILNNNLNTLIQRSNHTQATNDPPEVTVFPKEPVELGQPNTLICHIDKFFPPVLNVTWLCNGELVTEGVAESLFLPRTDYSFHKFHYLTFVPSAEDFYDCRVEHWGLDQPLLKHW

SEQ ID NO: 24789 - protein, 174 aa, Artificial Sequence
  Synthetic polypeptide
DLGIRSQQEQEAEGVAAPADPEMVTLPLQPSSTMGQVGRQLAIIGDDINRRYDSEFQTMLQHLQPTAENAYEYFTKIATSLFESGINWGRVVALLGFGYRLALHVYQHGLTGFLGQVTRFVVDFMLHHCIARWIAQRGGWVAALNLGNGPILNVLVVLGVVLLGQFVVRRFFKS

SEQ ID NO: 24790 - protein, 174 aa, Artificial Sequence; identical to SEQ ID NO: 24789
  Synthetic polypeptide

SEQ ID NO: 24791 - protein, 109 aa, Artificial Sequence
  Synthetic polypeptide
TWESGPSRNRRLKGWLPLPTQRWSPYLCNLAAPWGRWDGSSPSSGTTSTDAMTQSSRPCCSTCSPRQRMPMSTSPRLPPACLRVASIGAVWWLFWASATVWPYTSTSMA

SEQ ID NO: 24792 - protein, 109 aa, Artificial Sequence; identical to SEQ ID NO: 24791
  Synthetic polypeptide

SEQ ID NO: 24793 - protein, 11 aa, Artificial Sequence
  Synthetic polypeptide
LGNQVPAGTGG

SEQ ID NO: 24794 - protein, 11 aa, Artificial Sequence
  Synthetic polypeptide
LGNQVPAGTGG

SEQ ID NO: 24795 - protein, 11 aa, Artificial Sequence
  Synthetic polypeptide
LGNQVPAGTGG

SEQ ID NO: 24796 - protein, 116 aa, Artificial Sequence
  Synthetic polypeptide
DLGIRSQQEQEAEGVAAPADPEMVTLPLQPSSTMGQVGRQLAIIGDDINRRYDSEFQTMLQHLQPTAENAYEYFTKIATRPAATPTACLRVASIGAVWWLFWASATVWPYTSTSMA

SEQ ID NO: 24797 - protein, 88 aa, Artificial Sequence
  Synthetic polypeptide
TWESGPSRNRRLKGWLPLPTQRWSPYLCNLAAPWGRWDGSSPSSGTTSTDAMTQSSRPCCSTCSPRQRMPMSTSPRLPPGQQQHPQPV

SEQ ID NO: 24798 - protein, 26 aa, Artificial Sequence
  Synthetic polypeptide
GRVRWLKPVIPALWEAEVGGSQGCRA

SEQ ID NO: 24799 - protein, 26 aa, Artificial Sequence
  Synthetic polypeptide
GRVRWLKPVIPALWEAEVGGSQGCRA

SEQ ID NO: 24800 - protein, 93 aa, Artificial Sequence
  Synthetic polypeptide
SQHFGRPRWADHKVAEPEACDQMYESLARLHSNYYKHKYPRPRDTSFSGLSLEEYKLILSTDTLEELKEIDKGMWKKLQEKFAPKGPEEDHKA

SEQ ID NO: 24801 - protein, 93 aa, Artificial Sequence; identical to SEQ ID NO: 24800
  Synthetic polypeptide

SEQ ID NO: 24802 - protein, 35 aa, Artificial Sequence
  Synthetic polypeptide
SGAVAQACNPSTLGGRGGRITRLQSLRPVIRCTRA

SEQ ID NO: 24803 - protein, 35 aa, Artificial Sequence; identical to SEQ ID NO: 24802
  Synthetic polypeptide

SEQ ID NO: 24804 - protein, 5 aa, Artificial Sequence
  Synthetic polypeptide
EKCYS

SEQ ID NO: 24805 - protein, 5 aa, Artificial Sequence
  Synthetic polypeptide
EKCYS

SEQ ID NO: 24806 - protein, 54 aa, Artificial Sequence
  Synthetic polypeptide
SCIWSCSRHFEAMRRNGRVQRYRVWALMASSGQTNSSSCLPQISVSEKSATREQ

SEQ ID NO: 24807 - protein, 54 aa, Artificial Sequence; identical to SEQ ID NO: 24806
  Synthetic polypeptide

SEQ ID NO: 24808 - protein, 160 aa, Artificial Sequence
  Synthetic polypeptide
WHQVVRPTPVAVFLRFLLVRKVLLVSSSRHPDRWIVPGGGMEPEEEPSVAAVREVCEEAGVKGTLGRLVGIFENQERKHRTYVYVLIVTEVLEDWEDSVNIGRKREWFKIEDAIKVLQYHKPVQASYFETLRQGYSANNGTPVVATTYSVSAQSSMSGIR

SEQ ID NO: 24809 - protein, 155 aa, Artificial Sequence
  Synthetic polypeptide
WHQVVRPTPVAVFLRFLLVRKVLLVSSSRHPDRWIVPGGGMEPEEEPSVAAVREVCEEAGVKGTLGRLVGIFENQERKHRTYVYVLIVTEVLEDWEDSVNIGRKREWFKIEDAIKVLQYHKPVQASYFETLRQGYSANNGTPVVATTYSVSAQSS

SEQ ID NO: 24810 - protein, 94 aa, Artificial Sequence
  Synthetic polypeptide
PCASVSSSVRYRGWREWWGSKTNSQIPWTGAPAMCRSGSCGQSTNTGCPPWARPSRSWRARSCAPCRRSSSASARPWVGMCCTPTWTSGSQRPG

SEQ ID NO: 24811 - protein, 101 aa, Artificial Sequence
  Synthetic polypeptide
DTGAGENGGVLRLIPRSHGLEPQQCAEVAPVDRAPIPAAPHGQGLPGAGGQGAVRHVGGAVPPALAPGWGCAARPPGHLEVSGLDERADFTWGDSLLCLDQ

SEQ ID NO: 24812 - protein, 192 aa, Artificial Sequence
  Synthetic polypeptide
FPDPMDWSPSNVQKWLLWTEHQYRLPPMGKAFQELAGKELCAMSEEQFRQRSPLGGDVLHAHLDIWKSAAWMKERTSPGAIHYCASTSEESWTDSEVDSSCSGQPIHLWQFLKELLLKPHSYGRFIRWLNKEKGIFKIEDSAQVARLWGIRKNRPAMNYDKLSRSIRQYYKKGIIRKPDISQRLVYQFVHPI

SEQ ID NO: 24813 - protein, 163 aa, Artificial Sequence
  Synthetic polypeptide
PCASVSSSVRYRGWREWWGSKTNSQIPWTGAPAMCRSGSCGQSTNTGCPPWARPSRSWRARSCAPCRRSSSASARPWVGMCCTPTWTSGSQPRPVRRAGPTARWTHHAPGSPSTCGSSSRSCYSSPTAMAASLGGSTRRRASSKLRTQPRWPGCGASARTVPP

SEQ ID NO: 24814 - protein, 85 aa, Artificial Sequence
  Synthetic polypeptide
DTGAGENGGVLRLIPRSHGLEPQQCAEVAPVDRAPIPAAPHGQGLPGAGGQGAVRHVGGAVPPALAPGWGCAARPPGHLEVSLDQ

SEQ ID NO: 24815 - protein, 176 aa, Artificial Sequence
  Synthetic polypeptide
FPDPMDWSPSNVQKWLLWTEHQYRLPPMGKAFQELAGKELCAMSEEQFRQRSPLGGDVLHAHLDIWKSASTSEESWTDSEVDSSCSGQPIHLWQFLKELLLKPHSYGRFIRWLNKEKGIFKIEDSAQVARLWGIRKNRPAMNYDKLSRSIRQYYKKGIIRKPDISQRLVYQFVHPI

SEQ ID NO: 24816 - protein, 675 aa, Artificial Sequence
  Synthetic polypeptide
TPGRNWHLESGHLKLDHRRSSSSRSQDSAEGQDGQVPEQFSGLLHGSSPVCEVGQDPFQLLCTAGQSHPDGSPQQGACHKASMQLEETGVHAPGASQPSALDQSKRVGYLTGLPTTNSRSHPETLTHTASPHPGGAEEGDRSGARSRAPPTSKPKAELKLSRSLSKSDSDLLTCSPTEDATMGSRSESLSNCSIGKKRLEKSPSFASEWDEIEKIMSSIGEGIDFSQERQKISGLRTLEQSVGEWLESIGLQQYESKLLLNGFDDVHFLGSNVMEEQDLRDIGISDPQHRRKLLQAARSLPKVKALGYDGNSPPSVPSWLDSLGLQDYVHSFLSSGYSSIDTVKNLWELELVNVLKVQLLGHRKRIIASLADRPYEEPPQKPPRFSQLRCQDLLSQTSSPLSQNDSCTGRSADLLLPPGDTGRRRHDSLHDPAAPSRAERFRIQEEHREAKLTLRPPSLAAPYAPVQSWQHQPEKLIFESCGYEANYLGSMLIKDLRGTESTQDACAKMRKSTEHMKKIPTIILSITYKGVKFIDASNKNVIAEHEIRNISCAAQDPEDLCTFAYITKDLQTSHHYCHVFSTVDVNLTYEIILTLGQAFEVAYQLALQAQKSRATGASAAEMIETKSSKPVPKPRVGVRKSALEPPDMDQDAQSHASVSWVVDPKPDSKRSLSTN

SEQ ID NO: 24817 - protein, 111 aa, Artificial Sequence
  Synthetic polypeptide
NLTTGGAAAAGARTLRRGRTGRSQSSSQASSTAPPRCARWGRTLSSCSVPLARAIQTGPPSRAPATRPACSWRRRVCMLLEPPSPVPWTRAREWATSQACPPPTAARTLKL

SEQ ID NO: 24818 - protein, 45 aa, Artificial Sequence
  Synthetic polypeptide
GSMVQASRRSLEGWWRDPASCVSSDANQLWIIGLWTEEPRSYPHW

SEQ ID NO: 24819 - protein, 45 aa, Artificial Sequence; identical to SEQ ID NO: 24818
  Synthetic polypeptide

SEQ ID NO: 24820 - protein, 45 aa, Artificial Sequence; identical to SEQ ID NO: 24818
  Synthetic polypeptide

SEQ ID NO: 24821 - protein, 45 aa, Artificial Sequence; identical to SEQ ID NO: 24818
  Synthetic polypeptide

SEQ ID NO: 24822 - protein, 164 aa, Artificial Sequence
  Synthetic polypeptide
AAWFRPAEGAWRVGGETQPLVSALMPTSCGLLGYGLKSHVRTHTGEKPYKCPEELCSKAFKTSGDLQKHVRTHTGERPFQCPFEGCGRSFTTSNIRKVHVRTHTGERPYTCPEPHCGRGFTSATNYKNHVRIHTGEKPYVCTVPGCGKRFTEYSSLYKHHVVHT

SEQ ID NO: 24823 - protein, 11 aa, Artificial Sequence
  Synthetic polypeptide
CQPAVDYWAMD

SEQ ID NO: 24824 - protein, 11 aa, Artificial Sequence
  Synthetic polypeptide
CQPAVDYWAMD

SEQ ID NO: 24825 - protein, 11 aa, Artificial Sequence
  Synthetic polypeptide
CQPAVDYWAMD

SEQ ID NO: 24826 - protein, 11 aa, Artificial Sequence
  Synthetic polypeptide
CQPAVDYWAMD

SEQ ID NO: 24827 - protein, 394 aa, Artificial Sequence
  Synthetic polypeptide
AAWFRPAEGAWRVGGETQPLVSALMPTSCGLLGYGLKSHVRTHTGEKPYKCPEELCSKAFKTSGDLQKHVRTHTGERPFQCPFEGCGRSFTTSNIRKVHVRTHTGERPYTCPEPHCGRGFTSATNYKNHVRIHTGEKPYVCTVPGCGKRFTEYSSLYKHHVVHTHCKPYTCSTCGKTYRQTSTLAMHKRSAHGELEATEESEQALYEQQQLEAASAAEESPPPKRPRIAYLSEVKEERDDIPAQVAMVTEEDGAPQVALITQDGAQQVSLSPEDLQALGSAISMVTQHGSTTLTIPSPDADLATSGTHTVTMVSADGTQTQPVTIITSGAVVAEDSSVASLRHQQVALLATANGTHIAVQLEEQQTLEEAINVATAAMQQGAVTLETTVSESGC

SEQ ID NO: 24828 - protein, 394 aa, Artificial Sequence; identical to SEQ ID NO: 24827
  Synthetic polypeptide

SEQ ID NO: 24829 - protein, 339 aa, Artificial Sequence
  Synthetic polypeptide
AAWFRPAEGAWRVGGETQPLVSALMPTSCGLLGYGLKSHVRTHTGEKPYKCPEELCSKAFKTSGDLQKHVRTHTGERPFQCPFEGCGRSFTTSNIRKVHVRTHTGERPYTCPEPHCGRGFTSATNYKNHVRIHTGEKPYVCTVPGCGKRFTEYSSLYKHHVVHTHCKPYTCSTCGKTYRQTSTLAMHKRSAHGELEATEESEQALYEQQQLEAASAAEESPPPKRPRIAYLSEVKEERDDIPAQVAMVTEEDGAPQVALITQDGAQQVTIITSGAVVAEDSSVASLRHQQVALLATANGTHIAVQLEEQQTLEEAINVATAAMQQGAVTLETTVSESGC

SEQ ID NO: 24830 - protein, 370 aa, Artificial Sequence
  Synthetic polypeptide
EGSLHTPGTVHPLEPLRDFILEDMDLAANEISIYDKLSETVDLVRQTGHQCGMSEKAIEKFIRQLLEKNEPQRPPPQYPLLIVVYKVLATLGLILLTAYFVIQPFSPLAPEPVLSGAHTWRSLIHHIRLMSLPIAKKYMSENKGVPLHGGDEDRPFPDFDPWWTNDCEQNESEPIPANCTGCAQKHLKVMLLEDAPRKFERLHPLVIKTGKPLLEEEIQHFLCQYPEATEGFSEGFFAKWWRCFPERWFPFPYPWRRPLNRSQMLRELFPVFTHLPFPKDASLNKCSFLHPEPVVGSKMHKMPDLFIIGSGEAMLQLIPPFQCRRHCQSVAMPIEPGDIGYVDTTHWKVYVIARGVQPLVICDGTAFSEL

SEQ ID NO: 24831 - protein, 72 aa, Artificial Sequence
  Synthetic polypeptide
NLQIGSSENTRERERLSLPSTLQQNFGALNLGFIISQLRRVPPHSWNCTSIGTLKGFYIGRHGSCCQRDQHL

SEQ ID NO: 24832 - protein, 151 aa, Artificial Sequence
  Synthetic polypeptide
PLPVPQLLASAVRMNNPTHGPDPAQNPSVAPMAPYCFRDGTRSWPPSPRPTHGSACGATTRSAGAAARICSPSQTRAWTCRWPWRSGTTSVSTTTSAPPPAAQARCAATTRRWYGPRQRGSAVVPTSVRSSRVLRRPTSNYWCATMSLRGT

SEQ ID NO: 24833 - protein, 76 aa, Artificial Sequence
  Synthetic polypeptide
IIQHMGLTLLKILQWLPWLPTASEMGRGAGRLRQGLRTAVRVGPQQGARAPRRESVRHHRRGHGRAAGHGGVAPRA

SEQ ID NO: 24834 - protein, 422 aa, Artificial Sequence
  Synthetic polypeptide
PCSKSFSGSHGSLLLQRWDEELAAFAKAYARQCVWGHNKERGRRGENLFAITDEGMDVPLAMEEWHHEREHYNLSAATCSPGQMCGHYTQVVWAKTERIGCGSHFCEKLQGVEETNIELLVCNYEPPGNVKGKRPYQEGTPCSQCPSGYHCKNSLCEPIGSPEDAQDLPYLVTEAPSFRATEASDSRKMGTPSSLATGIPAFLVTEVSGSLATKALPAVETQAPTSLATKDPPSMATEAPPCVTTEVPSILAAHSLPSLDEEPVTFPKSTHVPIPKSADKVTDKTKVPSRSPENSLDPKMSLTGARELLPHAQEEAEAEAELPPSSEVLASVFPAQDKPGELQATLDHTGHTSSKSLPNFPNTSATANATGGRALALQSSLPGAEGPDKPSVVSGLNSGPGHVWGPLLGLLLLPPLVLAGIF

SEQ ID NO: 24835 - protein, 467 aa, Artificial Sequence
  Synthetic polypeptide
DREYVLQCKDFWLNYNWLKVTVGRGFGVTYQLVSKICPLMISRNHCVLKQNPEGQWTIMDNKSLNGVWLNRARLEPLRVYSIHQGDYIQLGVPLENKENAEYEYEVTEEDWETIYPCLSPKNDQMIEKNKELRTKRKFSLDELAGPGAEGPSNLKSKINKVSCESGQPVKSQGKGEVASTPSDNLDPKLTALEPSKTTGAPIYPGFPKVTEVHHEQKASNSSASQRSLQMFKVTMSRILRLKIQMQEKHEAVMNVKKQTQKGNSKKVVQMEQELQDLQSQLCAEQAQQQARVEQLEKTFQEEEQHLQGLEIAQGEKDLKQQLAQALQEHWALMEELNRSKKDFEAIIQAKNKELEQTKEEKEKMQAQKEEVLSHMNDVLENELQCIICSEYFIEAVTLNCAHSFCSYCINEWMKRKIECPICRKDIKSKTYSLVLDNCINKMVNNLSSEVKERRIVLIRERKAKRLF

SEQ ID NO: 24836 - protein, 36 aa, Artificial Sequence
  Synthetic polypeptide
LAEGDCRTRIWCHIPTGIKNLPPDDFSKPLCFEAES

SEQ ID NO: 24837 - protein, 36 aa, Artificial Sequence; identical to SEQ ID NO: 24836
  Synthetic polypeptide

SEQ ID NO: 24838 - protein, 36 aa, Artificial Sequence; identical to SEQ ID NO: 24836
  Synthetic polypeptide

SEQ ID NO: 24839 - protein, 36 aa, Artificial Sequence; identical to SEQ ID NO: 24836
  Synthetic polypeptide

SEQ ID NO: 24840 - protein, 36 aa, Artificial Sequence; identical to SEQ ID NO: 24836
  Synthetic polypeptide

SEQ ID NO: 24841 - protein, 80 aa, Artificial Sequence
  Synthetic polypeptide
DREYVLQCKDFWLNYNWLKVTVGRGFGVTYQLVSKICPLMISRNHCVLKQNPEGQWTIMDNKSFPSEKAEDFTAAGERFL

SEQ ID NO: 24842 - protein, 80 aa, Artificial Sequence; identical to SEQ ID NO: 24841
  Synthetic polypeptide

SEQ ID NO: 24843 - protein, 71 aa, Artificial Sequence
  Synthetic polypeptide
DREYVLQCKDFWLNYNWLKVTVGRGFGVTYQLVSKICPLMISRNHCVLKQNPEGQWTIMDNKGTTSLSKER

SEQ ID NO: 24844 - protein, 430 aa, Artificial Sequence
  Synthetic polypeptide
DREYVLQCKDFWLNYNWLKVTVGRGFGVTYQLVSKICPLMISRNHCVLKQNPEGQWTIMDNKSLNGVWLNRARLEPLRVYSIHQGDYIQLGVPLENKENAEYEYEVTEEDWETIYPCLSPKNDQMIEKNKELRTKRKFSLDELAGPGAEGPSNLKSKINKVSCESGQPVKSQGKGEVASTPSDNLDPKLTALEPSKTTGAPIYPGFPKVTEVHHEQKASNSSASQRSLQMFKVTMSRILRLKIQMQEKHEAVMNVKKQTQKGNSKKVVQMEQELQDLQSQLCAEQAQQQARVEQLEKTFQEEEQHLQGLEIAQGEKDLKQQLAQALQEHWALMEELNRSKKDFEAIIQAKNKELEQTKEEKEKMQAQKEEVLSHMNDVLENELQCIICSEYFIEQRDCSEDRALRAFERLPGSASLRWSGGFSLAVTPLL

SEQ ID NO: 24845 - protein, 335 aa, Artificial Sequence
  Synthetic polypeptide
PSHCSLQIKALAKIHAFVQDTTLSEPRQAEIRKECLRLWGIPDQARVAPSSSDPKSKFFELIQGTEIDIFSYKPTLLTSKTLEKIRPVFDYRCMVSGSEQKFLIGLGKSQIYTWDGRQSDRWIKLDLKTELPRDTLLSVEIVHELKGEGKAQRKISAIHILDVLVLNGTDVREQHFNQRIQLAEKFVKAVSKPSRPDMNPIRVKEVYRLEEMEKIFVRLEMKIIKGSSGTPKLSYTGRDDRHFVPMGLYIVRTVNEPWTMGFSKSFKKKFFYNKKTKDSTFDLPADSIAPFHICYYGRLFWEWGDGIRVHDSQKPQDQDKLSKEDVLSFIQMHRA

SEQ ID NO: 24846 - protein, 58 aa, Artificial Sequence
  Synthetic polypeptide
WRVPVIPATREAEAEESLEPGRQRLQLAGIVPLHSSLATVVCRSKLWRKSMPLFKTRH

SEQ ID NO: 24847 - protein, 18 aa, Artificial Sequence
  Synthetic polypeptide
GRARWLTPVILTLWEAEE

SEQ ID NO: 24848 - protein, 57 aa, Artificial Sequence
  Synthetic polypeptide
HFGRPRNEPLPEVPTVVQEHGVPVDPLWDGMAGLDHQTHPLPAGDAREGMFLLPPQL

SEQ ID NO: 24849 - protein, 119 aa, Artificial Sequence
  Synthetic polypeptide
PGTVAHTCNSNTLGGRGMNPSQRYPLWYKNMVSLWILFGMAWLALIIKLILSQLETPGRVCSCCHHSSKEDFKSQSWRQGPDREPESHSPQQGCYPEGPMGIIQHLEPSAHAAGCGKDS

SEQ ID NO: 24850 - protein, 16 aa, Artificial Sequence
  Synthetic polypeptide
LLHLWPRPYPSFLGWR

SEQ ID NO: 24851 - protein, 16 aa, Artificial Sequence
  Synthetic polypeptide
LLHLWPRPYPSFLGWR

SEQ ID NO: 24852 - protein, 16 aa, Artificial Sequence
  Synthetic polypeptide
LLHLWPRPYPSFLGWR

SEQ ID NO: 24853 - protein, 16 aa, Artificial Sequence
  Synthetic polypeptide
LLHLWPRPYPSFLGWR

SEQ ID NO: 24854 - protein, 16 aa, Artificial Sequence
  Synthetic polypeptide
LLHLWPRPYPSFLGWR

SEQ ID NO: 24855 - protein, 16 aa, Artificial Sequence
  Synthetic polypeptide
LLHLWPRPYPSFLGWR

SEQ ID NO: 24856 - protein, 95 aa, Artificial Sequence
  Synthetic polypeptide
LVKTQCEYCLPQEACLTHSAIWARCPSSVLPPFFQMPQCNSCTSGPDPIPPSWAGGSNRIHSPCGGSTRGGLPGGGGNPHAPRQWPWHPPGPGQH

SEQ ID NO: 24857 - protein, 95 aa, Artificial Sequence; identical to SEQ ID NO: 24856
  Synthetic polypeptide

SEQ ID NO: 24858 - protein, 95 aa, Artificial Sequence; identical to SEQ ID NO: 24856
  Synthetic polypeptide

SEQ ID NO: 24859 - protein, 95 aa, Artificial Sequence; identical to SEQ ID NO: 24856
  Synthetic polypeptide

SEQ ID NO: 24860 - protein, 95 aa, Artificial Sequence; identical to SEQ ID NO: 24856
  Synthetic polypeptide

SEQ ID NO: 24861 - protein, 95 aa, Artificial Sequence; identical to SEQ ID NO: 24856
  Synthetic polypeptide

SEQ ID NO: 24862 - protein, 216 aa, Artificial Sequence
  Synthetic polypeptide
HTQPSGLGARLLCFHHSSRCPSVTLAPLAQTLSLLPGLEVVTGSTHPAEAAPEEGSLEEAATPMPQGNGPGIPQGLDSTDLDVPTEAVTCQPQGNPLGCTPLLPNDSGHPSELGGTRRAGNGALGGPKAHRKLQTHPSLASQGSKKSKSSSKSTTSQIPLQAQEDCCVHCILSCLFCEFLTLCNIVLDCATCGSCSSEDSCLCCCCCGSGECADCD

SEQ ID NO: 24863 - protein, 234 aa, Artificial Sequence
  Synthetic polypeptide
HTQPSGLGARLLCFHHSSRCPSVTLAPLAQTLSLLPGLEVVTGSTHPAEAAPEEGSLEEAATPMPQGNGPGIPQGLDSTDLDVPTEAVTCQPQGNPLGCTPLLPNDSGHPSELGGTRRAGNGALGGPKAHRKLQTHPSLASQGSKKSKSSSKSTTSQIPLQAQEDCCVHCILSCLFCEFLTLCNIVLDCATCGSCSSEDSCLCCCCCGSGECADCDLPCDLDCGILDACCESAD

SEQ ID NO: 24864 - protein, 249 aa, Artificial Sequence
  Synthetic polypeptide
HTQPSGLGARLLCFHHSSRCPSVTLAPLAQTLSLLPGLEVVTGSTHPAEAAPEEGSLEEAATPMPQGNGPGIPQGLDSTDLDVPTEAVTCQPQGNPLGCTPLLPNDSGHPSELGGTRRAGNGALGGPKAHRKLQTHPSLASQGSKKSKSSSKSTTSQIPLQAQEDCCVHCILSCLFCEFLTLCNIVLDCATCGSCSSEDSCLCCCCCGSGECADCDLPCDLDCGILDACCESADCLEICMECCGLCFSS

SEQ ID NO: 24865 - protein, 249 aa, Artificial Sequence; identical to SEQ ID NO: 24864
  Synthetic polypeptide

SEQ ID NO: 24866 - protein, 101 aa, Artificial Sequence
  Synthetic polypeptide
HTQPSGLGARLLCFHHSSRCPSVTLAPLAQTLSLLPGLEVVTGSTHPAEAAPEEGSLEEAATPMPQGNGPGIPQGLDSTDLDVPTEAVTCQPQGNPLGCTP

SEQ ID NO: 24867 - protein, 131 aa, Artificial Sequence
  Synthetic polypeptide
HTQPSGLGARLLCFHHSSRCPSVTLAPLAQTLSLLPGLEVVTGSTHPAEAAPEEGSLEEAATPMPQGNGPGIPQGLDSTDLDVPTEAVTCQPQGNPLGCTPLLPNDSGHPSELGGTRRAGNGALGGPKAHR

SEQ ID NO: 24868 - protein, 517 aa, Artificial Sequence
  Synthetic polypeptide
GQARWLTPVIPALLEAKAGGSPEVRSSRPAWPTWRNPVSTKNTKISQVTNVDDEGVELGSGVMELTQSELVLHLHRREAVRWPYLCLRRYGYDSNLFSFESGRRCQTGQGIFAFKCSRAEEIFNLLQDLMQCNSINVMEEPVIITRNSHPAELDLPRAPQPPNALGYTVSSFSNGCPGEGPRFSAPRRLSTSSLRHPSLGEESTHALIAPDEQSHTYVNTPASEDDHRRGRHCLQPLPEGQAPFLPQARGPDQRDPQVFLQPGQVKFVLGPTPARRHMVKCQGLCPSLHDPPHHNNNNEAPSECPAQPKCTYENVTGGLWRGAGWRLSPEEPGWNGLAHRRAALLHYENLPPLPPVWESQAQQLGGEAGDDGDSRDGLTPSSNGFPDGEEDETPLQKPTSTRAAIRSHGSFPVPLTRRRGSPRVFNFDFRRPGPEPPRQLNYIQVELKGWGGDRPKGPQNPSSPQAPMPTTHPARSSDSYAVIDLKKTVAMSNLQRALPRDDGTARKTRHNSTDLPL

SEQ ID NO: 24869 - protein, 517 aa, Artificial Sequence; identical to SEQ ID NO: 24868
  Synthetic polypeptide

SEQ ID NO: 24870 - protein, 38 aa, Artificial Sequence
  Synthetic polypeptide
YQHFWRPRQADHLRSGARDQPGQHGETPSLLKIQKLAR

SEQ ID NO: 24871 - protein, 38 aa, Artificial Sequence; identical to SEQ ID NO: 24870
  Synthetic polypeptide

SEQ ID NO: 24872 - protein, 38 aa, Artificial Sequence; identical to SEQ ID NO: 24870
  Synthetic polypeptide

SEQ ID NO: 24873 - protein, 38 aa, Artificial Sequence; identical to SEQ ID NO: 24870
  Synthetic polypeptide

SEQ ID NO: 24874 - protein, 6 aa, Artificial Sequence
  Synthetic polypeptide
PGDKCG

SEQ ID NO: 24875 - protein, 6 aa, Artificial Sequence
  Synthetic polypeptide
PGDKCG

SEQ ID NO: 24876 - protein, 6 aa, Artificial Sequence
  Synthetic polypeptide
PGDKCG

SEQ ID NO: 24877 - protein, 6 aa, Artificial Sequence
  Synthetic polypeptide
PGDKCG

SEQ ID NO: 24878 - protein, 148 aa, Artificial Sequence
  Synthetic polypeptide
GQARWLTPVIPALLEAKAGGSPEVRSSRPAWPTWRNPVSTKNTKISQVTNVDDEGVELGSGVMELTQSELVLHLHRREAVRWPYLCLRRYGYDSNLFSFESGRRCQTGQGIFAFKCSRAEEIFNLLQDLMQCNSINVMEEPVIITRNS

SEQ ID NO: 24879 - protein, 61 aa, Artificial Sequence
  Synthetic polypeptide
GQARWLTPVIPALLEAKAGGSPEVRSSRPAWPTWRNPVSTKNTKISQVTNVDDEGVELGSG

SEQ ID NO: 24880 - protein, 155 aa, Artificial Sequence
  Synthetic polypeptide
IDKWMEGEVWAAHPFLLWPHQSCCWWMESSRWWWSAWSLMLHPLALTAPSGSQPAMAVHWMPSPMALPQQRMAPGPTWPISPCLLRSWHPGSLWSATLGLGLRVTAGVHSPCICQERLLQPGPAPRSLSGGHRVGRCGWGSCGCCSSSCCCLTCS

SEQ ID NO: 24881 - protein, 37 aa, Artificial Sequence
  Synthetic polypeptide
TSGWKERCGRHTLSFSGPTNHAAGGWKAADGGGLPGP

SEQ ID NO: 24882 - protein, 269 aa, Artificial Sequence
  Synthetic polypeptide
RQVDGRRGVGGTPFPSLAPPIMLLVDGKQQMVVVCLVLDVAPPGLDSPIWFSAGNGSALDAFTYGPSPATDGTWTNLAHLSLPSEELASWEPLVCHTGPGAEGHSRSTQPMHLSGEASTARTCPQEPLRGTPGGALWLGVLRLLLFKLLLFDLLLTCSCLCDPAGPLPSPATTTRLRALGSHRLHPATETGGREATSSPRPQPRDRRWGDTPPGRKPGSPVWGEGSYLSSYPTCPAQAWCSRSALRAPSSSLGAFFAGDLPPPLQAGAA

SEQ ID NO: 24883 - protein, 45 aa, Artificial Sequence
  Synthetic polypeptide
IDKWMEGEPHLVLSRQWQCTGCLHLWPFPSNGWHLDQLGPSLPAF

SEQ ID NO: 24884 - protein, 45 aa, Artificial Sequence; identical to SEQ ID NO: 24883
  Synthetic polypeptide

SEQ ID NO: 24885 - protein, 229 aa, Artificial Sequence
  Synthetic polypeptide
TSGWKESPIWFSAGNGSALDAFTYGPSPATDGTWTNLAHLSLPSEELASWEPLVCHTGPGAEGHSRSTQPMHLSGEASTARTCPQEPLRGTPGGALWLGVLRLLLFKLLLFDLLLTCSCLCDPAGPLPSPATTTRLRALGSHRLHPATETGGREATSSPRPQPRDRRWGDTPPGRKPGSPVWGEGSYLSSYPTCPAQAWCSRSALRAPSSSLGAFFAGDLPPPLQAGAA

SEQ ID NO: 24886 - protein, 229 aa, Artificial Sequence; identical to SEQ ID NO: 24885
  Synthetic polypeptide

SEQ ID NO: 24887 - protein, 115 aa, Artificial Sequence
  Synthetic polypeptide
RQVDGRRAPSGSQPAMAVHWMPSPMALPQQRMAPGPTWPISPCLLRSWHPGSLWSATLGLGLRVTAGVHSPCICQERLLQPGPAPRSLSGGHRVGRCGWGSCGCCSSSCCCLTCS

SEQ ID NO: 24888 - protein, 115 aa, Artificial Sequence; identical to SEQ ID NO: 24887
  Synthetic polypeptide

SEQ ID NO: 24889 - protein, 161 aa, Artificial Sequence
  Synthetic polypeptide
MEDRWLIEERMDKQVWAAHPFLLWPHQSCCWWMESSRWWWSAWSLMLHPLALTAPSGSQPAMAVHWMPSPMALPQQRMAPGPTWPISPCLLRSWHPGSLWSATLGLGLRVTAGVHSPCICQERLLQPGPAPRSLSGGHRVGRCGWGSCGCCSSSCCCLTCS

SEQ ID NO: 24890 - protein, 37 aa, Artificial Sequence
  Synthetic polypeptide
KKGWINRCGRHTLSFSGPTNHAAGGWKAADGGGLPGP

SEQ ID NO: 24891 - protein, 263 aa, Artificial Sequence
  Synthetic polypeptide
TGVGGTPFPSLAPPIMLLVDGKQQMVVVCLVLDVAPPGLDSPIWFSAGNGSALDAFTYGPSPATDGTWTNLAHLSLPSEELASWEPLVCHTGPGAEGHSRSTQPMHLSGEASTARTCPQEPLRGTPGGALWLGVLRLLLFKLLLFDLLLTCSCLCDPAGPLPSPATTTRLRALGSHRLHPATETGGREATSSPRPQPRDRRWGDTPPGRKPGSPVWGEGSYLSSYPTCPAQAWCSRSALRAPSSSLGAFFAGDLPPPLQAGAA

SEQ ID NO: 24892 - protein, 51 aa, Artificial Sequence
  Synthetic polypeptide
MEDRWLIEERMDKQPHLVLSRQWQCTGCLHLWPFPSNGWHLDQLGPSLPAF

SEQ ID NO: 24893 - protein, 51 aa, Artificial Sequence; identical to SEQ ID NO: 24892
  Synthetic polypeptide

SEQ ID NO: 24894 - protein, 229 aa, Artificial Sequence
  Synthetic polypeptide
KKGWINSPIWFSAGNGSALDAFTYGPSPATDGTWTNLAHLSLPSEELASWEPLVCHTGPGAEGHSRSTQPMHLSGEASTARTCPQEPLRGTPGGALWLGVLRLLLFKLLLFDLLLTCSCLCDPAGPLPSPATTTRLRALGSHRLHPATETGGREATSSPRPQPRDRRWGDTPPGRKPGSPVWGEGSYLSSYPTCPAQAWCSRSALRAPSSSLGAFFAGDLPPPLQAGAA

SEQ ID NO: 24895 - protein, 229 aa, Artificial Sequence; identical to SEQ ID NO: 24894
  Synthetic polypeptide

SEQ ID NO: 24896 - protein, 109 aa, Artificial Sequence
  Synthetic polypeptide
TAPSGSQPAMAVHWMPSPMALPQQRMAPGPTWPISPCLLRSWHPGSLWSATLGLGLRVTAGVHSPCICQERLLQPGPAPRSLSGGHRVGRCGWGSCGCCSSSCCCLTCS

SEQ ID NO: 24897 - protein, 109 aa, Artificial Sequence; identical to SEQ ID NO: 24896
  Synthetic polypeptide

SEQ ID NO: 24898 - protein, 54 aa, Artificial Sequence
  Synthetic polypeptide
MEDRWLIEERMDKQERLLQPGPAPRSLSGGHRVGRCGWGSCGCCSSSCCCLTCS

SEQ ID NO: 24899 - protein, 54 aa, Artificial Sequence; identical to SEQ ID NO: 24898
  Synthetic polypeptide

SEQ ID NO: 24900 - protein, 54 aa, Artificial Sequence; identical to SEQ ID NO: 24898
  Synthetic polypeptide

SEQ ID NO: 24901 - protein, 43 aa, Artificial Sequence
  Synthetic polypeptide
KKGWINRRGFYSQDLPPGASQGDTGWGAVAGGPAAAALQAAAV

SEQ ID NO: 24902 - protein, 43 aa, Artificial Sequence; identical to SEQ ID NO: 24901
  Synthetic polypeptide

SEQ ID NO: 24903 - protein, 43 aa, Artificial Sequence; identical to SEQ ID NO: 24901
  Synthetic polypeptide

SEQ ID NO: 24904 - protein, 156 aa, Artificial Sequence
  Synthetic polypeptide
TGEASTARTCPQEPLRGTPGGALWLGVLRLLLFKLLLFDLLLTCSCLCDPAGPLPSPATTTRLRALGSHRLHPATETGGREATSSPRPQPRDRRWGDTPPGRKPGSPVWGEGSYLSSYPTCPAQAWCSRSALRAPSSSLGAFFAGDLPPPLQAGAA

SEQ ID NO: 24905 - protein, 156 aa, Artificial Sequence; identical to SEQ ID NO: 24904
  Synthetic polypeptide

SEQ ID NO: 24906 - protein, 156 aa, Artificial Sequence; identical to SEQ ID NO: 24904
  Synthetic polypeptide

SEQ ID NO: 24907 - protein, 10 aa, Artificial Sequence
  Synthetic polypeptide
GEILQTRYLR

SEQ ID NO: 24908 - protein, 10 aa, Artificial Sequence
  Synthetic polypeptide
GEILQTRYLR

SEQ ID NO: 24909 - protein, 10 aa, Artificial Sequence
  Synthetic polypeptide
GEILQTRYLR

SEQ ID NO: 24910 - protein, 10 aa, Artificial Sequence
  Synthetic polypeptide
GEILQTRYLR

SEQ ID NO: 24911 - protein, 10 aa, Artificial Sequence
  Synthetic polypeptide
GEILQTRYLR

SEQ ID NO: 24912 - protein, 299 aa, Artificial Sequence
  Synthetic polypeptide
GTLSLSFFLYKCCFLIGRNSSDEILKMMNNGLLQQPSALMLLPCRPVLTSVALNANFVSWKSRTKYTITPVKMRKSGGRDHTGRIRVHGIGGGHKQRYRMIDFLRFRPEETKSGPFEEKVIQVRYDPCRSADIALVAGGSRKRWIIATENMQAGDTILNSNHIGRMAVAAREGDAHPLGALPVGTLINNVESEPGRGAQYIRAAGTCGVLLRKVNGTAIIQLPSKRQMQVLETCVATVGRVSNVDHNKRVIGKAGRNRWLGKRPNSGRWHRKGGWAGRKIRPLPPMKSYVKLPSASAQS

SEQ ID NO: 24913 - protein, 219 aa, Artificial Sequence
  Synthetic polypeptide
GTLSLSFFLYKCCFLIGRNSSDEILKMMNNGLLQQPSALMLLPCRPVLTSVALNANFVSWKSRTKYTITPVKMRKSGGRDHTGRIRVHGIGGGHKQRYRMIDFLRFRPEETKSGPFEEKVIQVRYDPCRSADIALVAGGSRKRWIIATENMQAGDTILNSNHIGRMAVAAREGDAHPLGALPVGTLINNVESEPGRGAQYIRAAGAGNVRSNSRPSIQR

SEQ ID NO: 24914 - protein, 97 aa, Artificial Sequence
  Synthetic polypeptide
GTLSLSFFLYKCCFLIGRNSSDEILKMMNNGLLQQPSALMLLPCRPVLTSVALNANFVSWKSRTKYTITPVKMRKSGGRDHTGAGNVRSNSRPSIQR

SEQ ID NO: 24915 - protein, 53 aa, Artificial Sequence
  Synthetic polypeptide
GTLSLSFFLYKCCFLIGRNSSDEILKMMNNGLLQQPSALMLLPCRPVLTSVAL

SEQ ID NO: 24916 - protein, 90 aa, Artificial Sequence
  Synthetic polypeptide
GTLSLSFFLYKCCFLIGRNSSDEILKMMNNGLLQQPSALMLLPCRPVLTSVALNANFVSWKSRTKYTITPVKMRKSGGRDHTGGNKDRGI

SEQ ID NO: 24917 - protein, 205 aa, Artificial Sequence
  Synthetic polypeptide
APSDSEPSTLDSQSSTTLFLSSEEPGPSTAALPSPSSSSCEPQAFSPGPPALPPLLPPLPAASAPPGPGASRRTGRYSVVASSPEAAPRLVDWLPGCPSTISPSTRGDDKERPPPVLAPAEGPERSRAPRPSTAGREEGTVDAGTSPPPRARPAAAASLEAHVGDILVELRTMNGHLDSIARALTKLASSLGPQPEPLPDVSDAN

SEQ ID NO: 24918 - protein, 172 aa, Artificial Sequence
  Synthetic polypeptide
LLQIQSPVPWTPSLRPPCSSPRRSQAPPPPPCHLPPPLPASLRPFPQVRQRCLRCCLRSPQPRRPQAPAPPGAQAATQSSPPPRRPPRVWSTGSPVALRPSLPAHAGMTRSGRRPSWHRPRARKGAAPRAPALRAGRRAPWTRVHPRRPEPGPPLRRAWRPTSGTSWWSCGP

SEQ ID NO: 24919 - protein, 107 aa, Artificial Sequence
  Synthetic polypeptide
SFRFRAQYLGLPVFDHLVPLLGGARPLHRRPAISLLLFLRASGLFPRSASAASAVASAPRSLGAPRPRRLPAHRPLLSRRLLPGGRPASGRLAPRLPFDHLSQHTRG

SEQ ID NO: 24920 - protein, 22 aa, Artificial Sequence
  Synthetic polypeptide
NKPLHTLSSMDQYLQSLLWETE

SEQ ID NO: 24921 - protein, 57 aa, Artificial Sequence
  Synthetic polypeptide
DLSLFTVFSSHFQISLRGLPFFPQRSLIVYEINLFIPSQVWTNIYSLCYGKPNDLCY

SEQ ID NO: 24922 - protein, 417 aa, Artificial Sequence
  Synthetic polypeptide
TSSYPLKYGPIFTVFAMGNRMTFVTEEEGINVFLKSKKVDFELAVQNIVYRTASIPKNVFLALHEKLYIMLKGKMGTVNLHQFTGQLTEELHEQLENLGTHGTMDLNNLVRHLLYPVTVNMLFNKSLFSTNKKKIKEFHQYFQVYDEDFEYGSQLPECLLRNWSKSKKWFLELFEKNIPDIKACKSAKDNSMTLLQATLDIVETETSKENSPNYGLLLLWASLSNAVPVAFWTLAYVLSHPDIHKAIMEGISSVFGKAGKDKIKVSEDDLENLLLIKWCVLETIRLKAPGVITRKVVKPVEILNYIIPSGDLLMLSPFWLHRNPKYFPEPELFKPERWKKANLEKHSFLDCFMAFGSGKFQCPARWFALLEVQMCIILILYKYDCSLLDPLPKQSYLHLVGVPQPEGQCRIEYKQRI

SEQ ID NO: 24923 - protein, 33 aa, Artificial Sequence
  Synthetic polypeptide
LGCKLKKGGASSVFAHLCVASTILSPGTKQGAS

SEQ ID NO: 24924 - protein, 33 aa, Artificial Sequence; identical to SEQ ID NO: 24923
  Synthetic polypeptide

SEQ ID NO: 24925 - protein, 46 aa, Artificial Sequence
  Synthetic polypeptide
RKEGPALFLLTFVLPAPFYLQARNRGQADFHGPRTHRAQGTRHPCF

SEQ ID NO: 24926 - protein, 46 aa, Artificial Sequence; identical to SEQ ID NO: 24925
  Synthetic polypeptide

SEQ ID NO: 24927 - protein, 2131 aa, Artificial Sequence
  Synthetic polypeptide
AEERRGQLCFCSPLCCQHHFISRHETGGKLIFMAPGPIELRAHAILVSDGGELRIGSEDKPFQGRAQITLYGSSYSTPFFPYGVKFLAVRNGTLSLHGSLPEVIVTCLRATAHALDTVLALEDAVDWNPGDEVVIISGTGVKGAKPMEEIVTVETVQDTDLYLKSPLRYSHNFTENWVAGEHHILKATVALLSRSITIQGNLTNEREKLLVSCQEANAPEGNLQHCLYSMSEKMLGSRDMGARVIVQSFPEEPSQVQLKGVQFQVLGQAFHKHLSSLTLVGAMRESFIQGCTVRNSFSRGLSMCGTLGLKVDSNVFYNILGHALLVGTCTEMRYISWEAIHGRKDDWSGHGNIIRNNVIIQVSGAEGLSNPEMLTPSGIYICSPTNVIEGNRVCGAGYGYFFHLMTNQTSQAPLLSFTQNIAHSCTRYGLFVYPKFQPPWDNVTGTTLFQSFTVWESAGGAQIFRSSNLRLKNFKVYSCRDFGIDVLESDANTSVTDSLLLGHFAHKGSLCMSSGIKTPKRWELMVSNTTFVNFDLINCVAIRTCSDCSQGQGGFTVKTSQLKFTNSSNLVAFPFPHAAILEDLDGSLSGKNRSHILASMETLSASCLVNSSFGRVVHGSACGGGVLFHRMSIGLANTPEVSYDLTMTDSRNKTTTVNYVRDTLSNPRGWMALLLDQETYSLQSENLWINRSLQYSATFDNFAPGNYLLLVHTDLPPYPDILLRCGSRVGLSFPFLPSPGQNQGCDWFFNSQLRQLTYLVSGEGQVQVILRVKEGMPPTISASTSAPESALKWSLPETWQGVEEGWGGYNNTIPGPGDDVLILPNRTVLVDTDLPFFKGLYVMGTLDFPVDRSNVLSVACMVIAGGELKVGTLENPLEKEQKLLILLRASEGVFCDRMNGIHIDPGTIGVYGKVHLYSAYPKNSWTHLGADIASGNERIIVEDAVDWRPHDKIVLSSSSYEPHEAEVLTVKEVKGHHVRIYERLKHRHIGSVHVTEDGRHIRLAAEVGLLTRNIQIQPDVSCRGRLFVGSFRKSSREEFSGVLQLLNVEIQNFGSPLYSSVEFSNVSAGSWIISSTLHQSCGGGIHAAASHGVLLNDNIVFGTAGHGIDLEGQAYTVTNNLVVLMTQPAWSTIWVAGIKVNQVKDINLHGNVVAGSERLGFHIRGHKCSSCELLWSDNVAHSSLHGLHLYKESGLDNCTRISGFLAFKNFDYGAMLHVENSVEIENITLVDNTIGLLAVVYVFSAPQNSVKKVQIVLRNSVIVATSSSFDCIQDKVKPHSANLTSTDRAPSNPRGGRIGILWPVFTSEPNQWPQEPWHKVRNDHSISGIMKLQDVTFSSFVKSCYSDDLDVCILPNAENSGIMHPITAERTRMLKIKDKNKFYFPSLQPRKDLGKVVCPELDCASPRKYLFKDLDGRALGLPPPVSVFPKTEAEWTASFFNAGTFREEQKCTYQFLMQGFICKQTDQVVLILDSADAIWAIQKLYPVVSVTSGFVDVFSSVNANIPCSTSGSVSTFYSILPIRQITKVCFMDQTPQVLRFFLLGNKSTSKLLLAVFYHELQSPHVFLGESFIPPTLVQSASLLLNESIGANYFNIMDNLLYVVLQGEEPIEIRSGVSIHLALTVMVSVLEKGWEIVILERLTNFLQIGQNQIRFIHEMPGHEETLKAIADSRAKRKRNCPTVTCTSHYRRVGQRRPLMMEMNSHRASPPMTVETISKVIVIEIGDSPTVRSTGMISSLSSNKLQNLAHRVITAQQTGVLENVLNMTIGALLVTQSKGVIGYGNTSSFKTGNLIYIRPYALSILVQPSDGEVGNELPVQPQLVFLDEQNRRVESLGPPSEPWTISASLEGASDSVLKGCTQAETQDGYVSFYNLAVLISGSNWHFIFTVTSPPGVNFTARSKPFAVLPVTRKEKSTIILAASLSSVASWLALSCLVCCWLKRSKSRKTKPEEIPESQTNNQNIHIHISSKRRESQGPKKEDTVVGEDMRMKVMLGKVNQCPHQLMNGVSRRKVSRHIVREEEAAVPAPGTTGITSHGHICAPGAPAQQVYLQETGNWKEGQEQLLRYQLAGQNQLLLLCPDFRQERQQLPGQSRLSKQSGSLGLSQEKKASCGATEAFCLHSVHPETIQEQL

SEQ ID NO: 24928 - protein, 1453 aa, Artificial Sequence
  Synthetic polypeptide
AEERRGQLCFCSPLCCQHHFISRHETGGKLIFMAPGPIELRAHAILVSDGGELRIGSEDKPFQGRAQITLYGSSYSTPFFPYGVKFLAVRNGTLSLHGSLPEVIVTCLRATAHALDTVLALEDAVDWNPGDEVVIISGTGVKGAKPMEEIVTVETVQDTDLYLKSPLRYSHNFTENWVAGEHHILKATVALLSRSITIQGNLTNEREKLLVSCQEANAPEGNLQHCLYSMSEKMLGSRDMGARVIVQSFPEEPSQVQLKGVQFQVLGQAFHKHLSSLTLVGAMRESFIQGCTVRNSFSRGLSMCGTLGLKVDSNVFYNILGHALLVGTCTEMRYISWEAIHGRKDDWSGHGNIIRNNVIIQVSGAEGLSNPEMLTPSGIYICSPTNVIEGNRVCGAGYGYFFHLMTNQTSQAPLLSFTQNIAHSCTRYGLFVYPKFQPPWDNVTGTTLFQSFTVWESAGGAQIFRSSNLRLKNFKVYSCRDFGIDVLESDANTSVTDSLLLGHFAHKGSLCMSSGIKTPKRWELMVSNTTFVNFDLINCVAIRTCSDCSQGQGGFTVKTSQLKFTNSSNLVAFPFPHAAILEDLDGSLSGKNRSHILASMETLSASCLVNSSFGRVVHGSACGGGVLFHRMSIGLANTPEVSYDLTMTDSRNKTTTVNYVRDTLSNPRGWMALLLDQETYSLQSENLWINRSLQYSATFDNFAPGNYLLLVHTDLPPYPDILLRCGSRVGLSFPFLPSPGQNQGCDWFFNSQLRQLTYLVSGEGQVQVILRVKEGMPPTISASTSAPESALKWSLPETWQGVEEGWGGYNNTIPGPGDDVLILPNRTVLVDTDLPFFKGLYVMGTLDFPVDRSNVLSVACMVIAGGELKVGTLENPLEKEQKLLILLRASEGVFCDRMNGIHIDPGTIGVYGKVHLYSAYPKNSWTHLGADIASGNERIIVEDAVDWRPHDKIVLSSSSYEPHEAEVLTVKEVKGHHVRIYERLKHRHIGSVHVTEDGRHIRLAAEVGLLTRNIQIQPDVSCRGRLFVGSFRKSSREEFSGVLQLLNVEIQNFGSPLYSSVEFSNVSAGSWIISSTLHQSCGGGIHAAASHGVLLNDNIVFGTAGHGIDLEGQAYTVTNNLVVLMTQPAWSTIWVAGIKVNQVKDINLHGNVVAGSERLGFHIRGHKCSSCELLWSDNVAHSSLHGLHLYKESGLDNCTRISGFLAFKNFDYGAMLHVENSVEIENITLVDNTIGLLAVVYVFSAPQNSVKKVQIVLRNSVIVATSSSFDCIQDKVKPHSANLTSTDRAPSNPRGGRIGILWPVFTSEPNQWPQEPWHKVRNDHSISGIMKLQDVTFSSFVKSCYSDDLDVCILPNAENSGIMHPITAERTRMLKIKDKNKFYFPSLQPRKDLGKVVCPELDCASPRKYLFKDLDGRALGLPPPVSVFPKTEAEWTASFFNAVTTEQALKISE

SEQ ID NO: 24929 - protein, 154 aa, Artificial Sequence
  Synthetic polypeptide
LHAPAGAQDRIGWAFGLGLERLAMILYDIPDIRLFWCEDERFLKQFCVSNINQKVKFQPLSKYPAVINDISFWLPSENYAENDFYDLVRTIGGDLVEKVDLIDKFVHPKTHKTSHCYRITYRHMERTLSQREVRHIHQALQEAAVQLLGVEGRF

SEQ ID NO: 24930 - protein, 154 aa, Artificial Sequence; identical to SEQ ID NO: 24929
  Synthetic polypeptide

SEQ ID NO: 24931 - protein, 21 aa, Artificial Sequence
  Synthetic polypeptide
HQRSDCTHQLVLKTESAGLLA

SEQ ID NO: 24932 - protein, 21 aa, Artificial Sequence
  Synthetic polypeptide
HQRSDCTHQLVLKTESAGLLA

SEQ ID NO: 24933 - protein, 50 aa, Artificial Sequence
  Synthetic polypeptide
SLSCLREESVHHRVSNTSGVTARTSWCSRPNRLGFWPRIRKASHDPLRHP

SEQ ID NO: 24934 - protein, 50 aa, Artificial Sequence; identical to SEQ ID NO: 24933
  Synthetic polypeptide

SEQ ID NO: 24935 - protein, 32 aa, Artificial Sequence
  Synthetic polypeptide
HFCSVTAGVQNLNPIMKKYQLVLKTESAGLLA

SEQ ID NO: 24936 - protein, 32 aa, Artificial Sequence; identical to SEQ ID NO: 24935
  Synthetic polypeptide

SEQ ID NO: 24937 - protein, 29 aa, Artificial Sequence
  Synthetic polypeptide
RNISWCSRPNRLGFWPRIRKASHDPLRHP

SEQ ID NO: 24938 - protein, 29 aa, Artificial Sequence
  Synthetic polypeptide
RNISWCSRPNRLGFWPRIRKASHDPLRHP

SEQ ID NO: 24939 - protein, 166 aa, Artificial Sequence
  Synthetic polypeptide
CYSWGPEPESNHEEISAGAQDRIGWAFGLGLERLAMILYDIPDIRLFWCEDERFLKQFCVSNINQKVKFQPLSKYPAVINDISFWLPSENYAENDFYDLVRTIGGDLVEKVDLIDKFVHPKTHKTSHCYRITYRHMERTLSQREVRHIHQALQEAAVQLLGVEGRF

SEQ ID NO: 24940 - protein, 166 aa, Artificial Sequence; identical to SEQ ID NO: 24939
  Synthetic polypeptide

SEQ ID NO: 24941 - protein, 248 aa, Artificial Sequence
  Synthetic polypeptide
PPDGPAVAPVTNGNTTVPPLNDDLDIFGPMISNPLPATVMPPAQGTPSAPAAATLSTVTSGDLDLFTEQTTKSEEVAKKQLSKDSILSLYGTGTIQQQSTPGVFMGPTNIPFTSQAPAAFQGFPSMGVPVPAAPGLIGNVMGQSPSMMVGMPMPNGFMGNAQTGVMPLPQNVVGPQGGMVGQMGAPQSKFGLPQAQQPQWSLSQMNQQMAGMSISSATPTAGFGQPSSTTAGWSGSSSGQTLSTQLWK

SEQ ID NO: 24942 - protein, 248 aa, Artificial Sequence; identical to SEQ ID NO: 24941
  Synthetic polypeptide

SEQ ID NO: 24943 - protein, 9 aa, Artificial Sequence
  Synthetic polypeptide
LQMALLWHQ

SEQ ID NO: 24944 - protein, 9 aa, Artificial Sequence
  Synthetic polypeptide
LQMALLWHQ

SEQ ID NO: 24945 - protein, 9 aa, Artificial Sequence
  Synthetic polypeptide
LQMALLWHQ

SEQ ID NO: 24946 - protein, 21 aa, Artificial Sequence
  Synthetic polypeptide
SRWPCCGTSDQREHNGATPER

SEQ ID NO: 24947 - protein, 21 aa, Artificial Sequence
  Synthetic polypeptide
SRWPCCGTSDQREHNGATPER

SEQ ID NO: 24948 - protein, 21 aa, Artificial Sequence
  Synthetic polypeptide
SRWPCCGTSDQREHNGATPER

SEQ ID NO: 24949 - protein, 244 aa, Artificial Sequence
  Synthetic polypeptide
PPDGPAVAPVTNGNTTVPPLNDDLDIFGPMISNPLPATVMPPAQGTPSAPAAATLSTVTSGDLDLFTEQTTKSEEVAKKQLSKDSILSLYGTGTIQQQSTPGVFMGPTNIPFTSQAPAAFQGFPSMGVPVPAAPGLIGNVMGQSPSMMVGMPMPNGFMGNAQTGVMPLPQNVVGPQGGMVGQMGAPQSKFGLPQAQQPQWSLSQIMQKGDAVLQHSISAIYWPMTRWLKCPLVDESADGWHEYQ

SEQ ID NO: 24950 - protein, 11 aa, Artificial Sequence
  Synthetic polypeptide
PPGEMALLWHQ

SEQ ID NO: 24951 - protein, 11 aa, Artificial Sequence
  Synthetic polypeptide
PPGEMALLWHQ

SEQ ID NO: 24952 - protein, 11 aa, Artificial Sequence
  Synthetic polypeptide
PPGEMALLWHQ

SEQ ID NO: 24953 - protein, 23 aa, Artificial Sequence
  Synthetic polypeptide
LQVRWPCCGTSDQREHNGATPER

SEQ ID NO: 24954 - protein, 23 aa, Artificial Sequence
  Synthetic polypeptide
LQVRWPCCGTSDQREHNGATPER

SEQ ID NO: 24955 - protein, 23 aa, Artificial Sequence
  Synthetic polypeptide
LQVRWPCCGTSDQREHNGATPER

SEQ ID NO: 24956 - protein, 10 aa, Artificial Sequence
  Synthetic polypeptide
SQHFGKPRLF

SEQ ID NO: 24957 - protein, 10 aa, Artificial Sequence
  Synthetic polypeptide
SQHFGKPRLF

SEQ ID NO: 24958 - protein, 10 aa, Artificial Sequence
  Synthetic polypeptide
SQHFGKPRLF

SEQ ID NO: 24959 - protein, 1302 aa, Artificial Sequence
  Synthetic polypeptide
MGVVAHAYNPSTLGSQGSFKTLTLPSDPKSNLIQQWLSQQSDLGVISKTFQLSSHPILGDWSIQVQVNDQTYYQSFQVSEYVLPKFEVTLQTPLYCSMNSKHLNGTITAKYTYGKPVKGDVTLTFLPLSFWGKKKNITKTFKINGSANFSFNDEEMKNVMDSSNGLSEYLDLSSPGPVEILTTVTESVTGISRNVSTNVFFKQHDYIIEFFDYTTVLKPSLNFTATVKVTRADGNQLTLEERRNNVVITVTQRNYTEYWSGSNSGNQKMEAVQKINYTVPQSGTFKIEFPILEDSSELQLKAYFLGSKSSMAVHSLFKSPSKTYIQLKTRDENIKVGSPFELVVSGNKRLKELSYMVVSRGQLVAVGKQNSTMFSLTPENSWTPKACVIVYYIEDDGEIISDVLKIPVQLVFKNKIKLYWSKVKAEPSEKVSLRISVTQPDSIVGIVAVDKSVNLMNASNDITMENVVHELELYNTGYYLGMFMNSFAVFQECGLWVLTDANLTKDYIDGVYDNAEYAERFMEENEGHIVDIHDFSLGSSPHVRKHFPETWIWLDTNMGYRIYQEFEVTVPDSITSWVATGFVISEDLGLGLTTTPVELQAFQPFFIFLNLPYSVIRGEEFALEITIFNYLKDATEVKVIIEKSDKFDILMTSNEINATGHQQTLLVPSEDGATVLFPIRPTHLGEIPITVTALSPTASDAVTQMILVKAEGIEKSYSQSILLDLTDNRLQSTLKTLSFSFPPNTVTGSERVQITAIGDVLGPSINGLASLIRMPYGCGEQNMINFAPNIYILDYLTKKKQLTDNLKEKALSFMRQGYQRELLYQREDGSFSAFGNYDPSGSTWLSAFVLRCFLEADPYIDIDQNVLHRTYTWLKGHQKSNGEFWDPGRVIHSELQGGNKSPVTLTAYIVTSLLGYRKYQPNIDVQESIHFLESEFSRGISDNYTLALITYALSSVGSPKAKEALNMLTWRAEQEGGMQFWVSSESKLSDSWQPRSLDIEVAAYALLSHFLQFQTSEGIPIMRWLSRQRNSLGGFASTQDTTVALKALSEFAALMNTERTNIQVTVTGPSSPSPVKFLIDTHNRLLLQTAELAVVQPTAVNISANGFGFAICQLNVVYNVKASGSSRRRRSIQNQEAFDLDVAVKENKDDLNHVDLNVCTSFSGPGRSGMALMEVNLLSGFMVPSEAISLSETVKKVEYDHGKLNLYLDSVNETQFCVNIPAVRNFKVSNTQDASVSIVDYYEPRRQAVRSYNSEVKLSSCDLCSDVQGCRPCEDGASGSHHHSSVIFIFCFKLLYFMELWL

SEQ ID NO: 24960 - protein, 31 aa, Artificial Sequence
  Synthetic polypeptide
WVWWLTPIIPALWEAKALLRHLLFHQTPNQI

SEQ ID NO: 24961 - protein, 1362 aa, Artificial Sequence
  Synthetic polypeptide
MGVVAHAYNPSTLGSQGSFKTLTLPSLPLNSADEIYELRVTGRTQDEILFSNSTRLSFETKRISVFIQTDKALYKPKQEVKFRIVTLFSDFKPYKTSLNILIKDPKSNLIQQWLSQQSDLGVISKTFQLSSHPILGDWSIQVQVNDQTYYQSFQVSEYVLPKFEVTLQTPLYCSMNSKHLNGTITAKYTYGKPVKGDVTLTFLPLSFWGKKKNITKTFKINGSANFSFNDEEMKNVMDSSNGLSEYLDLSSPGPVEILTTVTESVTGISRNVSTNVFFKQHDYIIEFFDYTTVLKPSLNFTATVKVTRADGNQLTLEERRNNVVITVTQRNYTEYWSGSNSGNQKMEAVQKINYTVPQSGTFKIEFPILEDSSELQLKAYFLGSKSSMAVHSLFKSPSKTYIQLKTRDENIKVGSPFELVVSGNKRLKELSYMVVSRGQLVAVGKQNSTMFSLTPENSWTPKACVIVYYIEDDGEIISDVLKIPVQLVFKNKIKLYWSKVKAEPSEKVSLRISVTQPDSIVGIVAVDKSVNLMNASNDITMENVVHELELYNTGYYLGMFMNSFAVFQECGLWVLTDANLTKDYIDGVYDNAEYAERFMEENEGHIVDIHDFSLGSSPHVRKHFPETWIWLDTNMGYRIYQEFEVTVPDSITSWVATGFVISEDLGLGLTTTPVELQAFQPFFIFLNLPYSVIRGEEFALEITIFNYLKDATEVKVIIEKSDKFDILMTSNEINATGHQQTLLVPSEDGATVLFPIRPTHLGEIPITVTALSPTASDAVTQMILVKAEGIEKSYSQSILLDLTDNRLQSTLKTLSFSFPPNTVTGSERVQITAIGDVLGPSINGLASLIRMPYGCGEQNMINFAPNIYILDYLTKKKQLTDNLKEKALSFMRQGYQRELLYQREDGSFSAFGNYDPSGSTWLSAFVLRCFLEADPYIDIDQNVLHRTYTWLKGHQKSNGEFWDPGRVIHSELQGGNKSPVTLTAYIVTSLLGYRKYQPNIDVQESIHFLESEFSRGISDNYTLALITYALSSVGSPKAKEALNMLTWRAEQEGGMQFWVSSESKLSDSWQPRSLDIEVAAYALLSHFLQFQTSEGIPIMRWLSRQRNSLGGFASTQDTTVALKALSEFAALMNTERTNIQVTVTGPSSPSPLAVVQPTAVNISANGFGFAICQLNVVYNVKASGSSRRRRSIQNQEAFDLDVAVKENKDDLNHVDLNVCTSFSGPGRSGMALMEVNLLSGFMVPSEAISLSETVKKVEYDHGKLNLYLDSVNETQFCVNIPAVRNFKVSNTQDASVSIVDYYEPRRQAVRSYNSEVKLSSCDLCSDVQGCRPCEDGASGSHHHSSVIFIFCFKLLYFMELWL

SEQ ID NO: 24962 - protein, 28 aa, Artificial Sequence
  Synthetic polypeptide
WVWWLTPIIPALWEAKALLRHLLFHHYL

SEQ ID NO: 24963 - protein, 28 aa, Artificial Sequence
  Synthetic polypeptide
WVWWLTPIIPALWEAKALLRHLLFHHYL

SEQ ID NO: 24964 - protein, 1379 aa, Artificial Sequence
  Synthetic polypeptide
MGVVAHAYNPSTLGSQGSFKTLTLPSLPLNSADEIYELRVTGRTQDEILFSNSTRLSFETKRISVFIQTDKALYKPKQEVKFRIVTLFSDFKPYKTSLNILIKDPKSNLIQQWLSQQSDLGVISKTFQLSSHPILGDWSIQVQVNDQTYYQSFQVSEYVLPKFEVTLQTPLYCSMNSKHLNGTITAKYTYGKPVKGDVTLTFLPLSFWGKKKNITKTFKINGSANFSFNDEEMKNVMDSSNGLSEYLDLSSPGPVEILTTVTESVTGISRNVSTNVFFKQHDYIIEFFDYTTVLKPSLNFTATVKVTRADGNQLTLEERRNNVVITVTQRNYTEYWSGSNSGNQKMEAVQKINYTVPQSGTFKIEFPILEDSSELQLKAYFLGSKSSMAVHSLFKSPSKTYIQLKTRDENIKVGSPFELVVSGNKRLKELSYMVVSRGQLVAVGKQNSTMFSLTPENSWTPKACVIVYYIEDDGEIISDVLKIPVQLVFKNKIKLYWSKVKAEPSEKVSLRISVTQPDSIVGIVAVDKSVNLMNASNDITMENVVHELELYNTGYYLGMFMNSFAVFQECGLWVLTDANLTKDYIDGVYDNAEYAERFMEENEGHIVDIHDFSLGSSPHVRKHFPETWIWLDTNMGYRIYQEFEVTVPDSITSWVATGFVISEDLGLGLTTTPVELQAFQPFFIFLNLPYSVIRGEEFALEITIFNYLKDATEVKVIIEKSDKFDILMTSNEINATGHQQTLLVPSEDGATVLFPIRPTHLGEIPITVTALSPTASDAVTQMILVKAEGIEKSYSQSILLDLTDNRLQSTLKTLSFSFPPNTVTGSERVQITAIGDVLGPSINGLASLIRMPYGCGEQNMINFAPNIYILDYLTKKKQLTDNLKEKALSFMRQGYQRELLYQREDGSFSAFGNYDPSGSTWLSAFVLRCFLEADPYIDIDQNVLHRTYTWLKGHQKSNGEFWDPGRVIHSELQGGNKSPVTLTAYIVTSLLGYRKYQPNIDVQESIHFLESEFSRGISDNYTLALITYALSSVGSPKAKEALNMLTWRAEQEGGMQFWVSSESKLSDSWQPRSLDIEVAAYALLSHFLQFQTSEGIPIMRWLSRQRNSLGGFASTQDTTVALKALSEFAALMNTERTNIQVTVTGPSSPSPVKFLIDTHNRLLLQTAELAVVQPTAVNISANGFGFAICQLNVVYNVKASGSSRRRRSIQNQEAFDLDVAVKENKDDLNHVDLNVCTSFSGPGRSGMALMEVNLLSGFMVPSEAISLSETVKKVEYDHGKLNLYLDSVNETQFCVNIPAVRNFKVSNTQDASVSIVDYYEPRRQAVRSYNSEVKLSSCDLCSDVQGCRPCEDGASGSHHHSSVIFIFCFKLLYFMELWL

SEQ ID NO: 24965 - protein, 78 aa, Artificial Sequence
  Synthetic polypeptide
DKRADSISCSASEMEKLASITTHPSLCQWLQVNKQLAQGQSDHILIEWLWTAIQTVWNNAGEIPKPLQRIQRAKMDPK

SEQ ID NO: 24966 - protein, 78 aa, Artificial Sequence; identical to SEQ ID NO: 24965
  Synthetic polypeptide

SEQ ID NO: 24967 - protein, 34 aa, Artificial Sequence
  Synthetic polypeptide
LSGYGQPYRLCGTTLVKYPNLSREYRGQRWIQSN

SEQ ID NO: 24968 - protein, 34 aa, Artificial Sequence; identical to SEQ ID NO: 24967
  Synthetic polypeptide

SEQ ID NO: 24969 - protein, 76 aa, Artificial Sequence
  Synthetic polypeptide
NTQTSPENTEGKDGSKVTKQEPTRRSARLSAKPAPPKPEPKPRKTSAKKEPGAKISRGAKGKKEEKQEAGKEGTEN

SEQ ID NO: 24970 - protein, 98 aa, Artificial Sequence
  Synthetic polypeptide
NTQTSPENTEGKDGSKVTKQEPTRRSARLSAKPAPPKPEPKPRKTSAKKEPGAKISRGAKGKKEEKQEAGKEGTAPSENGETKAEEAQKTESVDNEGE

SEQ ID NO: 24971 - protein, 509 aa, Artificial Sequence
  Synthetic polypeptide
AGHDGSHLQSQHFRRPRQEDRLRPGIQGNTVHLGTGDPYTPGFPSFNQTQFPPVASSGLPSIPAQPISADIASRLLRKLKGPVAPQEWQGSLLGSPYHLGPGPRLRLVVNNHRTSTPINNIFGCIEGRSEPDHYVVIGAQRDAWGPGAAKSAVGTAILLELVRTFSSMVSNGFRPRRSLLFISWDGGDFGSVGSTEWLEGYLSVLHLKAVVYVSLDNAVLGDDKFHAKTSPLLTSLIESVLKQVDSPNHSGQTLYEQVVFTNPSWDAEVIRPLPMDSSAYSFTAFVGVPAVEFSFMEDDQAYPFLHTKEDTYENLHKVLQGRLPAVAQAVAQLAGQLLIRLSHDRLLPLDFGRYGDVVLRHIGNLNEFSGDLKARGLTLQWVYSARGDYIRAAEKLRQEIYSSEERDERLTRMYNVRIMRVEFYFLSQYVSPADSPFRHIFMGRGDHTLGALLDHLRLLRSNSSGTPGATSSTGFQESRFRRQLALLTWTLQGAANALSGDVWNIDNNF

SEQ ID NO: 24972 - protein, 509 aa, Artificial Sequence; identical to SEQ ID NO: 24971
  Synthetic polypeptide

SEQ ID NO: 24973 - protein, 53 aa, Artificial Sequence
  Synthetic polypeptide
GQEFKATRCTWELETPTHLASLPSIKPSSLQLHHQAFPASQPSPSVQTLPPAC

SEQ ID NO: 24974 - protein, 53 aa, Artificial Sequence; identical to SEQ ID NO: 24973
  Synthetic polypeptide

SEQ ID NO: 24975 - protein, 53 aa, Artificial Sequence; identical to SEQ ID NO: 24973
  Synthetic polypeptide

SEQ ID NO: 24976 - protein, 135 aa, Artificial Sequence
  Synthetic polypeptide
EAKTGGSLEARNSRQHGAPGNWRPLHTWLPFLQSNPVPSSCIIRPSQHPSPAHQCRHCLPPAEEAQRPCGPPRMAGEPPRLPLSPGPRATTAASGQQSQDLHPHQQHLRLHRRPLRARSLRCHRGPEGCMGPRSS

SEQ ID NO: 24977 - protein, 135 aa, Artificial Sequence; identical to SEQ ID NO: 24976
  Synthetic polypeptide

SEQ ID NO: 24978 - protein, 125 aa, Artificial Sequence
  Synthetic polypeptide
AGHDGSHLQSQHFRRPRQEDRLRPGIQGNTVHLGTGDPYTPGFPSFNQTQFPPVASSGLPSIPAQPISADIASRLLRLECSGAILAHCNLHLPGSSDSSASDSRVSRITGSSKALWPPKNGRGAS

SEQ ID NO: 24979 - protein, 82 aa, Artificial Sequence
  Synthetic polypeptide
EAKTGGSLEARNSRQHGAPGNWRPLHTWLPFLQSNPVPSSCIIRPSQHPSPAHQCRHCLPPAEAGVQWCNLGSLQPPPPGFK

SEQ ID NO: 24980 - protein, 98 aa, Artificial Sequence
  Synthetic polypeptide
AGHDGSHLQSQHFRRPRQEDRLRPGIQGNTSQRTSPRTHPSQACPASRQCMDMCTWELETPTHLASLPSIKPSSLQLHHQAFPASQPSPSVQTLPPAC

SEQ ID NO: 24981 - protein, 98 aa, Artificial Sequence; identical to SEQ ID NO: 24980
  Synthetic polypeptide

SEQ ID NO: 24982 - protein, 98 aa, Artificial Sequence; identical to SEQ ID NO: 24980
  Synthetic polypeptide

SEQ ID NO: 24983 - protein, 149 aa, Artificial Sequence
  Synthetic polypeptide
GQEFKATRASGLLPGPTQAKPVQPAGSVWTCAPGNWRPLHTWLPFLQSNPVPSSCIIRPSQHPSPAHQCRHCLPPAEEAQRPCGPPRMAGEPPRLPLSPGPRATTAASGQQSQDLHPHQQHLRLHRRPLRARSLRCHRGPEGCMGPRSS

SEQ ID NO: 24984 - protein, 149 aa, Artificial Sequence; identical to SEQ ID NO: 24983
  Synthetic polypeptide

SEQ ID NO: 24985 - protein, 518 aa, Artificial Sequence
  Synthetic polypeptide
EAKTGGSLEARNSRQHEPADFSQDPPKPSLSSQQAVYGHVHLGTGDPYTPGFPSFNQTQFPPVASSGLPSIPAQPISADIASRLLRKLKGPVAPQEWQGSLLGSPYHLGPGPRLRLVVNNHRTSTPINNIFGCIEGRSEPDHYVVIGAQRDAWGPGAAKSAVGTAILLELVRTFSSMVSNGFRPRRSLLFISWDGGDFGSVGSTEWLEGYLSVLHLKAVVYVSLDNAVLGDDKFHAKTSPLLTSLIESVLKQVDSPNHSGQTLYEQVVFTNPSWDAEVIRPLPMDSSAYSFTAFVGVPAVEFSFMEDDQAYPFLHTKEDTYENLHKVLQGRLPAVAQAVAQLAGQLLIRLSHDRLLPLDFGRYGDVVLRHIGNLNEFSGDLKARGLTLQWVYSARGDYIRAAEKLRQEIYSSEERDERLTRMYNVRIMRVEFYFLSQYVSPADSPFRHIFMGRGDHTLGALLDHLRLLRSNSSGTPGATSSTGFQESRFRRQLALLTWTLQGAANALSGDVWNIDNNF

SEQ ID NO: 24986 - protein, 518 aa, Artificial Sequence; identical to SEQ ID NO: 24985
  Synthetic polypeptide

SEQ ID NO: 24987 - protein, 96 aa, Artificial Sequence
  Synthetic polypeptide
GQEFKATRASGLLPGPTQAKPVQPAGSVWTCAPGNWRPLHTWLPFLQSNPVPSSCIIRPSQHPSPAHQCRHCLPPAEAGVQWCNLGSLQPPPPGFK

SEQ ID NO: 24988 - protein, 134 aa, Artificial Sequence
  Synthetic polypeptide
EAKTGGSLEARNSRQHEPADFSQDPPKPSLSSQQAVYGHVHLGTGDPYTPGFPSFNQTQFPPVASSGLPSIPAQPISADIASRLLRLECSGAILAHCNLHLPGSSDSSASDSRVSRITGSSKALWPPKNGRGAS

SEQ ID NO: 24989 - protein, 41 aa, Artificial Sequence
  Synthetic polypeptide
VGVEVFLWASPDCRDQGRNSLCPGHLQAPVRRRVLPAMPSQ

SEQ ID NO: 24990 - protein, 41 aa, Artificial Sequence; identical to SEQ ID NO: 24989
  Synthetic polypeptide

SEQ ID NO: 24991 - protein, 682 aa, Artificial Sequence
  Synthetic polypeptide
RSFCGLHQTAEIRVETACAQGTFKPLSGEGSCQPCPANSHSNTIGSAVCQCRVGYFRARTDPRGAPCTTPPSAPRSVVSRLNGSSLHLEWSAPLESGGREDLTYALRCRECRPGGSCAPCGGDLTFDPGPRDLVEPWVVVRGLRPDFTYTFEVTALNGVSSLATGPVPFEPVNVTTDREVPPAVSDIRVTRSSPSSLSLAWAVPRAPSGAVLDYEVKYHEKGAEGPSSVRFLKTSENRAELRGLKRGASYLVQVRARSEAGYGPFGQEHHSQTQLDESEGWREQLALIAGTAVVGVVLVLVVIVVAVLCLRKQSNGREAEYSDKHGQYLIGHGTKVYIDPFTYEDPNEAVREFAKEIDVSYVKIEEVIGAGEFGEVCRGRLKAPGKKESCVAIKTLKGGYTERQRREFLSEASIMGQFEHPNIIRLEGVVTNSMPVMILTEFMENGALDSFLRLNDGQFTVIQLVGMLRGIASGMRYLAEMSYVHRDLAARNILVNSNLVCKVSDFGLSRFLEENSSDPTYTSSLGGKIPIRWTAPEAIAFRKFTSASDAWSYGIVMWEVMSFGERPYWDMSNQDVINAIEQDYRLPPPPDCPTSLHQLMLDCWQKDRNARPRFPQVVSALDKMIRNPASLKIVARENGGDLLRIGVTLAGHQKKILASVQHMKSQAKPGTPGGTGGPAPQY

SEQ ID NO: 24992 - protein, 101 aa, Artificial Sequence
  Synthetic polypeptide
LVSLVFLCILWSAFKIISWSRGLSVGFTRLPRSGSKQPVPRAPSSPCQEKGPASHAQPIATLTPLDQPSASAASGTSGHAQTPGVHPAPPLLRLRGAWFPA

SEQ ID NO: 24993 - protein, 101 aa, Artificial Sequence; identical to SEQ ID NO: 24992
  Synthetic polypeptide

SEQ ID NO: 24994 - protein, 734 aa, Artificial Sequence
  Synthetic polypeptide
RSFCGLHQTAEIRVETACAQGTFKPLSGEGSCQPCPANSHSNTIGSAVCQCRVGYFRARTDPRGAPCTTPPSAPRSVVSRLNGSSLHLEWSAPLESGGREDLTYALRCRECRPGGSCAPCGGDLTFDPGPRDLVEPWVVVRGLRPDFTYTFEVTALNGVSSLATGPVPFEPVNVTTDREVPPAVSDIRVTRSSPSSLSLAWAVPRAPSGAVLDYEVKYHEKGAEGPSSVRFLKTSENRAELRGLKRGASYLVQVRARSEAGYGPFGQEHHSQTQLDESEGWREQLALIAGTAVVGVVLVLVVIVVAVLCLRKQSNGREAEYSDKHGQYLIGHGTKVYIDPFTYEDPNEAVREFAKEIDVSYVKIEEVIGAGEFGEVCRGRLKAPGKKESCVAIKTLKGGYTERQRREFLSEASIMGQFEHPNIIRLEGVVTNSMPVMILTEFMENGALDSFLRLNDGQFTVIQLVGMLRGIASGMRYLAEMSYVHRDLAARNILVNSNLVCKVSDFGLSRFLEENSSDPTYTSSLGGKIPIRWTAPEAIAFRKFTSASDAWSYGIVMWEVMSFGERPYWDMSNQDVINAIEQDYRLPPPPDCPTSLHQLMLDCWQKDRNARPRFPQVVSALDKMIRNPASLKIVARENGGASHPLLDQRQPHYSAFGSVGEWLRAIKMGRYEESFAAAGFGSFELVSQISAEDLLRIGVTLAGHQKKILASVQHMKSQAKPGTPGGTGGPAPQY

SEQ ID NO: 24995 - protein, 178 aa, Artificial Sequence
  Synthetic polypeptide
SGEAEDDEEMDPQTIDSLIELSTKLHLPADDVVSIIEEVEEKRKRKKNAPPEPVPPPRAAPAPTHVRSPQPPPPAPAPARDELPDWNEVLPPWDREEDEVYPPGPYHPFPNYIRPRTLQPPSALRRRHYHHALPPSRHYPGREAQARRAQEEAEAEERRLQEQEELENYIEHVLLRRP

SEQ ID NO: 24996 - protein, 178 aa, Artificial Sequence; identical to SEQ ID NO: 24995
  Synthetic polypeptide

SEQ ID NO: 24997 - protein, 180 aa, Artificial Sequence
  Synthetic polypeptide
FEAGRQRTTRRWIRRRSTASLSCPPNSTCQRTTWSASSRRWRRSGSGRRTPLPSPCRPPVPPPPPPTSAPRSPRPPPPLPHETSCRTGTRCSRPGIGRRTRCTRQGRTTLSPTTSGRGHCSRPRPCAAATTTTPCRLRATIPAGRPRRGARRRRRRRRSAGCRSRRSWRITSSTCCSGAR

SEQ ID NO: 24998 - protein, 180 aa, Artificial Sequence; identical to SEQ ID NO: 24997
  Synthetic polypeptide

SEQ ID NO: 24999 - protein, 25 aa, Artificial Sequence
  Synthetic polypeptide
RQENSLKRGGRGRRGDGSADDRQPH

SEQ ID NO: 25000 - protein, 25 aa, Artificial Sequence
  Synthetic polypeptide
RQENSLKRGGRGRRGDGSADDRQPH

SEQ ID NO: 25001 - protein, 110 aa, Artificial Sequence
  Synthetic polypeptide
GRAWWLTHVIPALCEAEARAVMNFVVRYRPDEQPSLRPHHDSSTFTLNVALNHKGLDYEGGGCRFLRYDCVISSPRKGWALLHPGRLTHYHEGLPTTWGTRYIMVSFVDP

SEQ ID NO: 25002 - protein, 110 aa, Artificial Sequence; identical to SEQ ID NO: 25001
  Synthetic polypeptide

SEQ ID NO: 25003 - protein, 11 aa, Artificial Sequence
  Synthetic polypeptide
SQHFARLRRGR

SEQ ID NO: 25004 - protein, 11 aa, Artificial Sequence
  Synthetic polypeptide
SQHFARLRRGR

SEQ ID NO: 25005 - protein, 206 aa, Artificial Sequence
  Synthetic polypeptide
GWLQWLTLLMPPLWEAEGIFLHLSNQHEFGRLLATSRYDTEHLHPDLWQIFDNPVDWKEQYIHENYSRALEGEGIVEQPCPDVYWFPLLSEQMCDELVAEMEHYGQWSGGRHEARAVMNFVVRYRPDEQPSLRPHHDSSTFTLNVALNHKGLDYEGGGCRFLRYDCVISSPRKGWALLHPGRLTHYHEGLPTTWGTRYIMVSFVDP

SEQ ID NO: 25006 - protein, 13 aa, Artificial Sequence
  Synthetic polypeptide
CHHFGRLRASSSI

SEQ ID NO: 25007 - protein, 13 aa, Artificial Sequence
  Synthetic polypeptide
CHHFGRLRASSSI

SEQ ID NO: 25008 - protein, 255 aa, Artificial Sequence
  Synthetic polypeptide
GWLQWLTLLMPPLWEAEGIFLHLSNQHEFGRLLATSRYDTEHLHPDLWQIFDNPVDWKEQYIHENYSRALEGEGIVEQPCPDVYWFPLLSEQMCDELVAEMEHYGQWSGGRHEDSRLAGGYENVPTVDIHMKQVGYEDQWLQLLRTYVGPMTESLFPGYHTKARAVMNFVVRYRPDEQPSLRPHHDSSTFTLNVALNHKGLDYEGGGCRFLRYDCVISSPRKGWALLHPGRLTHYHEGLPTTWGTRYIMVSFVDP

SEQ ID NO: 25009 - protein, 243 aa, Artificial Sequence
  Synthetic polypeptide
GWLQWLTLLMPPLWEAEAYVIRGDTLRMELPQRDVFSGSDTDPDMAFCKSFRDKGIFLHLSNQHEFGRLLATSRYDTEHLHPDLWQIFDNPVDWKEQYIHENYSRALEGEGIVEQPCPDVYWFPLLSEQMCDELVAEMEHYGQWSGGRHEARAVMNFVVRYRPDEQPSLRPHHDSSTFTLNVALNHKGLDYEGGGCRFLRYDCVISSPRKGWALLHPGRLTHYHEGLPTTWGTRYIMVSFVDP

SEQ ID NO: 25010 - protein, 10 aa, Artificial Sequence
  Synthetic polypeptide
CHHFGRLRPM

SEQ ID NO: 25011 - protein, 10 aa, Artificial Sequence
  Synthetic polypeptide
CHHFGRLRPM

SEQ ID NO: 25012 - protein, 10 aa, Artificial Sequence
  Synthetic polypeptide
CHHFGRLRPM

SEQ ID NO: 25013 - protein, 292 aa, Artificial Sequence
  Synthetic polypeptide
GWLQWLTLLMPPLWEAEAYVIRGDTLRMELPQRDVFSGSDTDPDMAFCKSFRDKGIFLHLSNQHEFGRLLATSRYDTEHLHPDLWQIFDNPVDWKEQYIHENYSRALEGEGIVEQPCPDVYWFPLLSEQMCDELVAEMEHYGQWSGGRHEDSRLAGGYENVPTVDIHMKQVGYEDQWLQLLRTYVGPMTESLFPGYHTKARAVMNFVVRYRPDEQPSLRPHHDSSTFTLNVALNHKGLDYEGGGCRFLRYDCVISSPRKGWALLHPGRLTHYHEGLPTTWGTRYIMVSFVDP

SEQ ID NO: 25014 - protein, 33 aa, Artificial Sequence
  Synthetic polypeptide
GWLQWLTLLMPPLWEAEAYVIRGDTLRMELPQR

SEQ ID NO: 25015 - protein, 67 aa, Artificial Sequence
  Synthetic polypeptide
SQHFGRLRYLRDGGHLLVRLQHHPGLLRPLVPRNQVRAGPRPLPGVERLTDLHPGWPLPLLRLLLRL

SEQ ID NO: 25016 - protein, 67 aa, Artificial Sequence; identical to SEQ ID NO: 25015
  Synthetic polypeptide

SEQ ID NO: 25017 - protein, 67 aa, Artificial Sequence; identical to SEQ ID NO: 25015
  Synthetic polypeptide

SEQ ID NO: 25018 - protein, 67 aa, Artificial Sequence; identical to SEQ ID NO: 25015
  Synthetic polypeptide

SEQ ID NO: 25019 - protein, 44 aa, Artificial Sequence
  Synthetic polypeptide
AEVSAGWWPSPGTPSTSPGTSSTPCTPEPSTSWAPPSTWGGAPH

SEQ ID NO: 25020 - protein, 44 aa, Artificial Sequence; identical to SEQ ID NO: 25019
  Synthetic polypeptide

SEQ ID NO: 25021 - protein, 44 aa, Artificial Sequence; identical to SEQ ID NO: 25019
  Synthetic polypeptide

SEQ ID NO: 25022 - protein, 44 aa, Artificial Sequence; identical to SEQ ID NO: 25019
  Synthetic polypeptide

SEQ ID NO: 25023 - protein, 129 aa, Artificial Sequence
  Synthetic polypeptide
NPVSTKNRKISRAWWVYSGLPGTHDHRHPPGLPRPLARHSGPALHQHWGPGALQESQAGGHRRGPPHSGRYLRDGGHLLVRLQHHPGLLRPLVPRNQVRAGPRPLPGVERLTDLHPGWPLPLLRLLLRL

SEQ ID NO: 25024 - protein, 129 aa, Artificial Sequence; identical to SEQ ID NO: 25023
  Synthetic polypeptide

SEQ ID NO: 25025 - protein, 196 aa, Artificial Sequence
  Synthetic polypeptide
SQHFRRPRQADHLGSGVRDQPGQHGETLSLLKTEKLAGRGGYIQACRALMITAILLGFLGLLLGIAGLRCTNIGGLELSRKAKLAATAGALHILAGICGMVAISWYAFNITRDFFDPLYPGTKYELGPALYLGWSASLISILGGLCLCSACCCGSDEDPAASARRPYQAPVSVMPVATSDQEGDSSFGKYGRNAYV

SEQ ID NO: 25026 - protein, 196 aa, Artificial Sequence; identical to SEQ ID NO: 25025
  Synthetic polypeptide

SEQ ID NO: 25027 - protein, 13 aa, Artificial Sequence
  Synthetic polypeptide
PGVVGIFRPAGHS

SEQ ID NO: 25028 - protein, 13 aa, Artificial Sequence
  Synthetic polypeptide
PGVVGIFRPAGHS

SEQ ID NO: 25029 - protein, 13 aa, Artificial Sequence
  Synthetic polypeptide
PGVVGIFRPAGHS

SEQ ID NO: 25030 - protein, 83 aa, Artificial Sequence
  Synthetic polypeptide
NPVSTKNRKISRAWWVYSGLPGTHDHRHPPGLPRPLARHSGPALHQHWGPGALQESQAGGHRRGPPHSGRSPGCKSAHRQCFL

SEQ ID NO: 25031 - protein, 108 aa, Artificial Sequence
  Synthetic polypeptide
SQHFRRPRQADHLGSGVRDQPGQHGETLSLLKTEKLAGRGGYIQACRALMITAILLGFLGLLLGIAGLRCTNIGGLELSRKAKLAATAGALHILADLLAANQPIGSVS

SEQ ID NO: 25032 - protein, 148 aa, Artificial Sequence
  Synthetic polypeptide
GLAQWLMPVIPALQEAEASRSFGVRSSRPAWTTWVYSGLPGTHDHRHPPGLPRPLARHSGPALHQHWGPGALQESQAGGHRRGPPHSGRYLRDGGHLLVRLQHHPGLLRPLVPRNQVRAGPRPLPGVERLTDLHPGWPLPLLRLLLRL

SEQ ID NO: 25033 - protein, 148 aa, Artificial Sequence; identical to SEQ ID NO: 25032
  Synthetic polypeptide

SEQ ID NO: 25034 - protein, 180 aa, Artificial Sequence
  Synthetic polypeptide
SQHFRRPRQADHLGSGVRDQPGQHGYIQACRALMITAILLGFLGLLLGIAGLRCTNIGGLELSRKAKLAATAGALHILAGICGMVAISWYAFNITRDFFDPLYPGTKYELGPALYLGWSASLISILGGLCLCSACCCGSDEDPAASARRPYQAPVSVMPVATSDQEGDSSFGKYGRNAYV

SEQ ID NO: 25035 - protein, 180 aa, Artificial Sequence; identical to SEQ ID NO: 25034
  Synthetic polypeptide

SEQ ID NO: 25036 - protein, 42 aa, Artificial Sequence
  Synthetic polypeptide
PGTVAHACNPSTSGGRGKQIIWGQEFETSLDNMGIFRPAGHS

SEQ ID NO: 25037 - protein, 42 aa, Artificial Sequence; identical to SEQ ID NO: 25036
  Synthetic polypeptide

SEQ ID NO: 25038 - protein, 42 aa, Artificial Sequence; identical to SEQ ID NO: 25036
  Synthetic polypeptide

SEQ ID NO: 25039 - protein, 102 aa, Artificial Sequence
  Synthetic polypeptide
GLAQWLMPVIPALQEAEASRSFGVRSSRPAWTTWVYSGLPGTHDHRHPPGLPRPLARHSGPALHQHWGPGALQESQAGGHRRGPPHSGRSPGCKSAHRQCFL

SEQ ID NO: 25040 - protein, 92 aa, Artificial Sequence
  Synthetic polypeptide
SQHFRRPRQADHLGSGVRDQPGQHGYIQACRALMITAILLGFLGLLLGIAGLRCTNIGGLELSRKAKLAATAGALHILADLLAANQPIGSVS

SEQ ID NO: 25041 - protein, 27 aa, Artificial Sequence
  Synthetic polypeptide
GRARWLMPVIPALWEAEVNVKALKRNS

SEQ ID NO: 25042 - protein, 27 aa, Artificial Sequence
  Synthetic polypeptide
GRARWLMPVIPALWEAEVNVKALKRNS

SEQ ID NO: 25043 - protein, 8 aa, Artificial Sequence
  Synthetic polypeptide
SQPFGRPR

SEQ ID NO: 25044 - protein, 8 aa, Artificial Sequence
  Synthetic polypeptide
SQPFGRPR

SEQ ID NO: 25045 - protein, 111 aa, Artificial Sequence
  Synthetic polypeptide
PGAVAHACDPSPLGGRGECKSFKEKFMKCLHNNNFENALCRKESKEYLECRMERSRLGLLHSGRLHLPELLGNPPEYPPGQQGEVRPPGRLGGGPSGVHGLPRERRRESQV

SEQ ID NO: 25046 - protein, 79 aa, Artificial Sequence
  Synthetic polypeptide
PGAVAHACDPSPLGGRGECKSFKEKFMKCLHNNNFENALCRKESKEYLECRMERKLMLQEPLEKLGFGDLTSGKSEAKK

SEQ ID NO: 25047 - protein, 101 aa, Artificial Sequence
  Synthetic polypeptide
ARITINKDTKVPNACLFTINKEDHTLGNIIKSQLLKDPQVLFAGYKVPHPLEHKIIIRVQTTPDYSPQEAFTNAITDLISELSLLEERFRVAIKDKQEGIE

SEQ ID NO: 25048 - protein, 34 aa, Artificial Sequence
  Synthetic polypeptide
PGSPLTRTPRYPMPVYSPSTKKTTHWETSLNHNS

SEQ ID NO: 25049 - protein, 34 aa, Artificial Sequence; identical to SEQ ID NO: 25048
  Synthetic polypeptide

SEQ ID NO: 25050 - protein, 4 aa, Artificial Sequence
  Synthetic polypeptide
QDHH

SEQ ID NO: 25051 - protein, 4 aa, Artificial Sequence
  Synthetic polypeptide
QDHH

SEQ ID NO: 25052 - protein, 111 aa, Artificial Sequence
  Synthetic polypeptide
ARITINKDTKVPNACLFTINKEDHTLGNIIKSQLLKDPQVLFAGYKVPHPLEHKIIIRVQTTPDYSPQEAFTNAITDLISELSLLEERFRVRAGPGGADGVAIKDKQEGIE

SEQ ID NO: 25053 - protein, 53 aa, Artificial Sequence
  Synthetic polypeptide
SQHFGRPRQVVHLRPGVQDQPDHHGIWPQRTAMAHLTPSSECATRAGHGRPRS

SEQ ID NO: 25054 - protein, 53 aa, Artificial Sequence; identical to SEQ ID NO: 25053
  Synthetic polypeptide

SEQ ID NO: 25055 - protein, 53 aa, Artificial Sequence; identical to SEQ ID NO: 25053
  Synthetic polypeptide

SEQ ID NO: 25056 - protein, 22 aa, Artificial Sequence
  Synthetic polypeptide
GQEFKTSLTTMGSGPKGPQWHI

SEQ ID NO: 25057 - protein, 22 aa, Artificial Sequence
  Synthetic polypeptide
GQEFKTSLTTMGSGPKGPQWHI

SEQ ID NO: 25058 - protein, 22 aa, Artificial Sequence
  Synthetic polypeptide
GQEFKTSLTTMGSGPKGPQWHI

SEQ ID NO: 25059 - protein, 617 aa, Artificial Sequence
  Synthetic polypeptide
PPWDLAPKDRNGTSDPFVRVRYKGRTRETSIVKKSCYPRWNETFEFELQEGAMEALCVEAWDWDLVSRNDFLGKVVIDVQRLRVVQQEEGWFRLQPDQSKSRRHDEGNLGSLQLEVRLRDETVLPSSYYQPLVHLLCHEVKLGMQGPGQLIPLIEETTSTECRQDVATNLLKLFLGQGLAKDFLDLLFQLELSRTSETNTLFRSNSLASKSVESFLKVAGMQYLHGVLGPIINKVFEEKKYVELDPSKVEVKDVGCSGLHRPQTEAEVLEQSAQTLRAHLGALLSALSRSVRACPAVVRATFRQLFRRVRERFPGAQHENVPFIAVTSFLCLRFFSPAIMSPKLFHLRERHADARTSRTLLLLAKAVQNVGNMDTPASRAKEAWMEPLQPTVHQGVAQLKDFITKLVDIEEKDELDLQRTLSLQAPPVKEGPLFIHRTKGKGPLMSSSFKKLYFSLTTEALSFAKTPSSKCVNELNQWLSALRKVSINNTGLLGSYHPGVFRGDKWSCCHQKEKTGQGCDKTRSRVTLQEWNDPLDHDLEAQLIYRHLLGVEAMLWERHRELSGGAEAGTVPTSPGKVPEDSLARLLRVLQDLREAHSSSPAGSPPSEPNCLLELQT

SEQ ID NO: 25060 - protein, 663 aa, Artificial Sequence
  Synthetic polypeptide
PPWDLAPKDRNGTSDPFVRVRYKGRTRETSIVKKSCYPRWNETFEFELQEGAMEALCVEAWDWDLVSRNDFLGKVVIDVQRLRVVQQEEGWFRLQPDQSKSRRHDEGNLGSLQLEVRLRDETVLPSSYYQPLVHLLCHEVKLGMQGPGQLIPLIEETTSTECRQDVATNLLKLFLGQGLAKDFLDLLFQLELSRTSETNTLFRSNSLASKSVESFLKVAGMQYLHGVLGPIINKVFEEKKYVELDPSKVEVKDVGCSGLHRPQTEAEVLEQSAQTLRAHLGALLSALSRSVRACPAVVRATFRQLFRRVRERFPGAQHENVPFIAVTSFLCLRFFSPAIMSPKLFHLRERHADARTSRTLLLLAKAVQNVGNMDTPASRAKEAWMEPLQPTVHQGVAQLKDFITKLVDIEEKDELDLQRTLSLQAPPVKEGPLFIHRTKGKGPLMSSSFKKLYFSLTTEALSFAKTPSSKKSALIKLANIRAAEKVEEKSFGGSHVMQVIYTDDAGRPQTAYLQCKCVNELNQWLSALRKVSINNTGLLGSYHPGVFRGDKWSCCHQKEKTGQGCDKTRSRVTLQEWNDPLDHDLEAQLIYRHLLGVEAMLWERHRELSGGAEAGTVPTSPGKVPEDSLARLLRVLQDLREAHSSSPAGSPPSEPNCLLELQT

SEQ ID NO: 25061 - protein, 663 aa, Artificial Sequence; identical to SEQ ID NO: 25060
  Synthetic polypeptide

SEQ ID NO: 25062 - protein, 29 aa, Artificial Sequence
  Synthetic polypeptide
TREAEVAVSRDCATALQPRRACFPFAFCR

SEQ ID NO: 25063 - protein, 29 aa, Artificial Sequence
  Synthetic polypeptide
TREAEVAVSRDCATALQPRRACFPFAFCR

SEQ ID NO: 25064 - protein, 29 aa, Artificial Sequence
  Synthetic polypeptide
TREAEVAVSRDCATALQPRRACFPFAFCR

SEQ ID NO: 25065 - protein, 21 aa, Artificial Sequence
  Synthetic polypeptide
AEIVPLHSSLDVPASPSPSAV

SEQ ID NO: 25066 - protein, 21 aa, Artificial Sequence
  Synthetic polypeptide
AEIVPLHSSLDVPASPSPSAV

SEQ ID NO: 25067 - protein, 21 aa, Artificial Sequence
  Synthetic polypeptide
AEIVPLHSSLDVPASPSPSAV

SEQ ID NO: 25068 - protein, 88 aa, Artificial Sequence
  Synthetic polypeptide
TREAEVAVSRDCATALQPRRACFPFAFCRDCQFPEASPATLPVQPAELCPRAHQLCAPALKRHLGGEAHPVHLHAGAASRPVQQPQHL

SEQ ID NO: 25069 - protein, 80 aa, Artificial Sequence
  Synthetic polypeptide
AEIVPLHSSLDVPASPSPSAVIVSFLRPPQPRFLYSLQNSAPEHISYVPQLSNDTLAGRLTLSTFTLEQPLGQFSSHNIS

SEQ ID NO: 25070 - protein, 246 aa, Artificial Sequence
  Synthetic polypeptide
TREAEVAVSRDCATALQPRRACFPFAFCRDCQFPEASPATLPVQPAELLAWKSPCATGKDINKHQEVSKSTRSHRHHVDIHLPVFPGKILLNCAALAKRAAPEHISYVPQLSNDTLAGRLTLSTFTLEQPLGQFSSHNISDLDTIWLVVALSNATQSFTAPRTNQDIPAPANFSQRGYYLTLRANRVLYQTRGQLHVLRVGNDTHCQPTKIGCNHPLPGPGPYRVKFLVMNDEGPVAETKWSSDTR

SEQ ID NO: 25071 - protein, 82 aa, Artificial Sequence
  Synthetic polypeptide
AEIVPLHSSLDVPASPSPSAVIVSFLRPPQPRFLYSLQNFWHGKAPVQLVKISISTRRYLNPPGAIGITLTSIYQSSLARFF

SEQ ID NO: 25072 - protein, 82 aa, Artificial Sequence; identical to SEQ ID NO: 25071
  Synthetic polypeptide

SEQ ID NO: 25073 - protein, 153 aa, Artificial Sequence
  Synthetic polypeptide
TREAEVAVSRDCATALQPRRACFPFAFCRDCQFPEASPATLPVQPAELLAWKSPCATGKDINKHQEVSKSTRSHRHHVDIHLPVFPGKILLNCAALAKRAAPEHISYVPQLSNDTLAGRLTLSTFTLEQPLGQFSSHNISDLDTIWLVVALSN

SEQ ID NO: 25074 - protein, 48 aa, Artificial Sequence
  Synthetic polypeptide
TREAEVAVSRDCATALQPRRACFPFAFCRDCQFPEASPATLPVQPAEL

SEQ ID NO: 25075 - protein, 48 aa, Artificial Sequence; identical to SEQ ID NO: 25074
  Synthetic polypeptide

SEQ ID NO: 25076 - protein, 40 aa, Artificial Sequence
  Synthetic polypeptide
AEIVPLHSSLDVPASPSPSAVIVSFLRPPQPRFLYSLQNY

SEQ ID NO: 25077 - protein, 40 aa, Artificial Sequence
  Synthetic polypeptide
AEIVPLHSSLDVPASPSPSAVIVSFLRPPQPRFLYSLQNC

SEQ ID NO: 25078 - protein, 29 aa, Artificial Sequence
  Synthetic polypeptide
SRGRVITRSGVQDQPGKHDVPASPSPSAV

SEQ ID NO: 25079 - protein, 29 aa, Artificial Sequence
  Synthetic polypeptide
SRGRVITRSGVQDQPGKHDVPASPSPSAV

SEQ ID NO: 25080 - protein, 29 aa, Artificial Sequence
  Synthetic polypeptide
SRGRVITRSGVQDQPGKHDVPASPSPSAV

SEQ ID NO: 25081 - protein, 23 aa, Artificial Sequence
  Synthetic polypeptide
SRGQEFKTSLANMTCLLPLRLLP

SEQ ID NO: 25082 - protein, 23 aa, Artificial Sequence
  Synthetic polypeptide
SRGQEFKTSLANMTCLLPLRLLP

SEQ ID NO: 25083 - protein, 23 aa, Artificial Sequence
  Synthetic polypeptide
SRGQEFKTSLANMTCLLPLRLLP

SEQ ID NO: 25084 - protein, 23 aa, Artificial Sequence
  Synthetic polypeptide
SRGQEFKTSLANMTCLLPLRLLP

SEQ ID NO: 25085 - protein, 23 aa, Artificial Sequence
  Synthetic polypeptide
SRGQEFKTSLANMTCLLPLRLLP

SEQ ID NO: 25086 - protein, 23 aa, Artificial Sequence
  Synthetic polypeptide
SRGQEFKTSLANMTCLLPLRLLP

SEQ ID NO: 25087 - protein, 23 aa, Artificial Sequence
  Synthetic polypeptide
SRGQEFKTSLANMTCLLPLRLLP

SEQ ID NO: 25088 - protein, 23 aa, Artificial Sequence
  Synthetic polypeptide
SRGQEFKTSLANMTCLLPLRLLP

SEQ ID NO: 25089 - protein, 88 aa, Artificial Sequence
  Synthetic polypeptide
SRGRVITRSGVQDQPGKHDVPASPSPSAVIVSFLRPPQPRFLYSLQNSAPEHISYVPQLSNDTLAGRLTLSTFTLEQPLGQFSSHNIS

SEQ ID NO: 25090 - protein, 90 aa, Artificial Sequence
  Synthetic polypeptide
SRGRVITRSGVQDQPGKHDVPASPSPSAVIVSFLRPPQPRFLYSLQNFWHGKAPVQLVKISISTRRYLNPPGAIGITLTSIYQSSLARFF

SEQ ID NO: 25091 - protein, 90 aa, Artificial Sequence; identical to SEQ ID NO: 25090
  Synthetic polypeptide

SEQ ID NO: 25092 - protein, 48 aa, Artificial Sequence
  Synthetic polypeptide
SRGRVITRSGVQDQPGKHDVPASPSPSAVIVSFLRPPQPRFLYSLQNY

SEQ ID NO: 25093 - protein, 48 aa, Artificial Sequence
  Synthetic polypeptide
SRGRVITRSGVQDQPGKHDVPASPSPSAVIVSFLRPPQPRFLYSLQNC

SEQ ID NO: 25094 - protein, 34 aa, Artificial Sequence; identical to SEQ ID NO: 25048
  Synthetic polypeptide

SEQ ID NO: 25095 - protein, 34 aa, Artificial Sequence; identical to SEQ ID NO: 25048
  Synthetic polypeptide

SEQ ID NO: 25096 - protein, 34 aa, Artificial Sequence; identical to SEQ ID NO: 25048
  Synthetic polypeptide

SEQ ID NO: 25097 - protein, 34 aa, Artificial Sequence; identical to SEQ ID NO: 25048
  Synthetic polypeptide

SEQ ID NO: 25098 - protein, 4 aa, Artificial Sequence
  Synthetic polypeptide
QDHH

SEQ ID NO: 25099 - protein, 4 aa, Artificial Sequence
  Synthetic polypeptide
QDHH

SEQ ID NO: 25100 - protein, 4 aa, Artificial Sequence
  Synthetic polypeptide
QDHH

SEQ ID NO: 25101 - protein, 4 aa, Artificial Sequence
  Synthetic polypeptide
QDHH

SEQ ID NO: 25102 - protein, 4 aa, Artificial Sequence
  Synthetic polypeptide
QDHH

SEQ ID NO: 25103 - protein, 4 aa, Artificial Sequence
  Synthetic polypeptide
QDHH

SEQ ID NO: 25104 - protein, 4 aa, Artificial Sequence
  Synthetic polypeptide
QDHH

SEQ ID NO: 25105 - protein, 4 aa, Artificial Sequence
  Synthetic polypeptide
QDHH

SEQ ID NO: 25106 - protein, 4 aa, Artificial Sequence
  Synthetic polypeptide
QDHH

SEQ ID NO: 25107 - protein, 4 aa, Artificial Sequence
  Synthetic polypeptide
QDHH

SEQ ID NO: 25108 - protein, 143 aa, Artificial Sequence
  Synthetic polypeptide
ARITINKDTKVPNACLFTINKEDHTLGNIIKSQLLKDPQVLFAGYKVPHPLEHKIIIRVQTTPDYSPQEAFTNAITDLISELSLLEERFRVRAGPGGADGVGWTLARVPRPGTALACFFGGPQGEAAVMEEQGLPPQAPGHVD

SEQ ID NO: 25109 - protein, 100 aa, Artificial Sequence
  Synthetic polypeptide
ARITINKDTKVPNACLFTINKEDHTLGNIIKSQLLKDPQVLFAGYKVPHPLEHKIIIRVQTTPDYSPQEAFTNAITDLISELSLLEERFRTCLLPLRLLP

SEQ ID NO: 25110 - protein, 100 aa, Artificial Sequence; identical to SEQ ID NO: 25109
  Synthetic polypeptide

SEQ ID NO: 25111 - protein, 100 aa, Artificial Sequence; identical to SEQ ID NO: 25109
  Synthetic polypeptide

SEQ ID NO: 25112 - protein, 101 aa, Artificial Sequence
  Synthetic polypeptide
ARITINKDTKVPNACLFTINKEDHTLGNIIKSRACFPFAFCRDCQFPEASPATLPVQPAELCPRAHQLCAPALKRHLGGEAHPVHLHAGAASRPVQQPQHL

SEQ ID NO: 25113 - protein, 101 aa, Artificial Sequence
  Synthetic polypeptide
PGSPLTRTPRYPMPVYSPSTKKTTHWETSLNHVPASPSPSAVIVSFLRPPQPRFLYSLQNSAPEHISYVPQLSNDTLAGRLTLSTFTLEQPLGQFSSHNIS

SEQ ID NO: 25114 - protein, 259 aa, Artificial Sequence
  Synthetic polypeptide
ARITINKDTKVPNACLFTINKEDHTLGNIIKSRACFPFAFCRDCQFPEASPATLPVQPAELLAWKSPCATGKDINKHQEVSKSTRSHRHHVDIHLPVFPGKILLNCAALAKRAAPEHISYVPQLSNDTLAGRLTLSTFTLEQPLGQFSSHNISDLDTIWLVVALSNATQSFTAPRTNQDIPAPANFSQRGYYLTLRANRVLYQTRGQLHVLRVGNDTHCQPTKIGCNHPLPGPGPYRVKFLVMNDEGPVAETKWSSDTR

SEQ ID NO: 25115 - protein, 103 aa, Artificial Sequence
  Synthetic polypeptide
PGSPLTRTPRYPMPVYSPSTKKTTHWETSLNHVPASPSPSAVIVSFLRPPQPRFLYSLQNFWHGKAPVQLVKISISTRRYLNPPGAIGITLTSIYQSSLARFF

SEQ ID NO: 25116 - protein, 103 aa, Artificial Sequence; identical to SEQ ID NO: 25115
  Synthetic polypeptide

SEQ ID NO: 25117 - protein, 166 aa, Artificial Sequence
  Synthetic polypeptide
ARITINKDTKVPNACLFTINKEDHTLGNIIKSRACFPFAFCRDCQFPEASPATLPVQPAELLAWKSPCATGKDINKHQEVSKSTRSHRHHVDIHLPVFPGKILLNCAALAKRAAPEHISYVPQLSNDTLAGRLTLSTFTLEQPLGQFSSHNISDLDTIWLVVALSN

SEQ ID NO: 25118 - protein, 61 aa, Artificial Sequence
  Synthetic polypeptide
ARITINKDTKVPNACLFTINKEDHTLGNIIKSRACFPFAFCRDCQFPEASPATLPVQPAEL

SEQ ID NO: 25119 - protein, 61 aa, Artificial Sequence; identical to SEQ ID NO: 25118
  Synthetic polypeptide

SEQ ID NO: 25120 - protein, 61 aa, Artificial Sequence
  Synthetic polypeptide
PGSPLTRTPRYPMPVYSPSTKKTTHWETSLNHVPASPSPSAVIVSFLRPPQPRFLYSLQNY

SEQ ID NO: 25121 - protein, 61 aa, Artificial Sequence
  Synthetic polypeptide
PGSPLTRTPRYPMPVYSPSTKKTTHWETSLNHVPASPSPSAVIVSFLRPPQPRFLYSLQNC

SEQ ID NO: 25122 - protein, 58 aa, Artificial Sequence
  Synthetic polypeptide
ARITINKDTKVPNACLFTINKEDHTLGNIIKSLECNGTILLTATSASRVQVILLLQPS

SEQ ID NO: 25123 - protein, 50 aa, Artificial Sequence
  Synthetic polypeptide
PGSPLTRTPRYPMPVYSPSTKKTTHWETSLNRWSAMARSCSLQPPPPGFK

SEQ ID NO: 25124 - protein, 10 aa, Artificial Sequence
  Synthetic polypeptide
TWEVEVEDHH

SEQ ID NO: 25125 - protein, 10 aa, Artificial Sequence
  Synthetic polypeptide
TWEVEVEDHH

SEQ ID NO: 25126 - protein, 10 aa, Artificial Sequence
  Synthetic polypeptide
TWEVEVEDHH

SEQ ID NO: 25127 - protein, 10 aa, Artificial Sequence
  Synthetic polypeptide
TWEVEVEDHH

SEQ ID NO: 25128 - protein, 10 aa, Artificial Sequence
  Synthetic polypeptide
TWEVEVEDHH

SEQ ID NO: 25129 - protein, 10 aa, Artificial Sequence
  Synthetic polypeptide
TWEVEVEDHH

SEQ ID NO: 25130 - protein, 10 aa, Artificial Sequence
  Synthetic polypeptide
TWEVEVEDHH

SEQ ID NO: 25131 - protein, 10 aa, Artificial Sequence
  Synthetic polypeptide
TWEVEVEDHH

SEQ ID NO: 25132 - protein, 10 aa, Artificial Sequence
  Synthetic polypeptide
TWEVEVEDHH

SEQ ID NO: 25133 - protein, 10 aa, Artificial Sequence
  Synthetic polypeptide
TWEVEVEDHH

SEQ ID NO: 25134 - protein, 175 aa, Artificial Sequence
  Synthetic polypeptide
KYKISRAWWQMPVIPATQKAEAGESLEPGKWRLRITINKDTKVPNACLFTINKEDHTLGNIIKSQLLKDPQVLFAGYKVPHPLEHKIIIRVQTTPDYSPQEAFTNAITDLISELSLLEERFRVRAGPGGADGVGWTLARVPRPGTALACFFGGPQGEAAVMEEQGLPPQAPGHVD

SEQ ID NO: 25135 - protein, 132 aa, Artificial Sequence
  Synthetic polypeptide
KYKISRAWWQMPVIPATQKAEAGESLEPGKWRLRITINKDTKVPNACLFTINKEDHTLGNIIKSQLLKDPQVLFAGYKVPHPLEHKIIIRVQTTPDYSPQEAFTNAITDLISELSLLEERFRTCLLPLRLLP

SEQ ID NO: 25136 - protein, 132 aa, Artificial Sequence; identical to SEQ ID NO: 25135
  Synthetic polypeptide

SEQ ID NO: 25137 - protein, 132 aa, Artificial Sequence; identical to SEQ ID NO: 25135
  Synthetic polypeptide

SEQ ID NO: 25138 - protein, 133 aa, Artificial Sequence
  Synthetic polypeptide
KYKISRAWWQMPVIPATQKAEAGESLEPGKWRLRITINKDTKVPNACLFTINKEDHTLGNIIKSRACFPFAFCRDCQFPEASPATLPVQPAELCPRAHQLCAPALKRHLGGEAHPVHLHAGAASRPVQQPQHL

SEQ ID NO: 25139 - protein, 291 aa, Artificial Sequence
  Synthetic polypeptide
KYKISRAWWQMPVIPATQKAEAGESLEPGKWRLRITINKDTKVPNACLFTINKEDHTLGNIIKSRACFPFAFCRDCQFPEASPATLPVQPAELLAWKSPCATGKDINKHQEVSKSTRSHRHHVDIHLPVFPGKILLNCAALAKRAAPEHISYVPQLSNDTLAGRLTLSTFTLEQPLGQFSSHNISDLDTIWLVVALSNATQSFTAPRTNQDIPAPANFSQRGYYLTLRANRVLYQTRGQLHVLRVGNDTHCQPTKIGCNHPLPGPGPYRVKFLVMNDEGPVAETKWSSDTR

SEQ ID NO: 25140 - protein, 198 aa, Artificial Sequence
  Synthetic polypeptide
KYKISRAWWQMPVIPATQKAEAGESLEPGKWRLRITINKDTKVPNACLFTINKEDHTLGNIIKSRACFPFAFCRDCQFPEASPATLPVQPAELLAWKSPCATGKDINKHQEVSKSTRSHRHHVDIHLPVFPGKILLNCAALAKRAAPEHISYVPQLSNDTLAGRLTLSTFTLEQPLGQFSSHNISDLDTIWLVVALSN

SEQ ID NO: 25141 - protein, 93 aa, Artificial Sequence
  Synthetic polypeptide
KYKISRAWWQMPVIPATQKAEAGESLEPGKWRLRITINKDTKVPNACLFTINKEDHTLGNIIKSRACFPFAFCRDCQFPEASPATLPVQPAEL

SEQ ID NO: 25142 - protein, 93 aa, Artificial Sequence; identical to SEQ ID NO: 25141
  Synthetic polypeptide

SEQ ID NO: 25143 - protein, 90 aa, Artificial Sequence
  Synthetic polypeptide
KYKISRAWWQMPVIPATQKAEAGESLEPGKWRLRITINKDTKVPNACLFTINKEDHTLGNIIKSLECNGTILLTATSASRVQVILLLQPS

SEQ ID NO: 25144 - protein, 53 aa, Artificial Sequence; identical to SEQ ID NO: 25053
  Synthetic polypeptide

SEQ ID NO: 25145 - protein, 53 aa, Artificial Sequence; identical to SEQ ID NO: 25053
  Synthetic polypeptide

SEQ ID NO: 25146 - protein, 53 aa, Artificial Sequence; identical to SEQ ID NO: 25053
  Synthetic polypeptide

SEQ ID NO: 25147 - protein, 53 aa, Artificial Sequence; identical to SEQ ID NO: 25053
  Synthetic polypeptide

SEQ ID NO: 25148 - protein, 53 aa, Artificial Sequence; identical to SEQ ID NO: 25053
  Synthetic polypeptide

SEQ ID NO: 25149 - protein, 22 aa, Artificial Sequence
  Synthetic polypeptide
GQEFKTSLTTMGSGPKGPQWHI

SEQ ID NO: 25150 - protein, 22 aa, Artificial Sequence
  Synthetic polypeptide
GQEFKTSLTTMGSGPKGPQWHI

SEQ ID NO: 25151 - protein, 22 aa, Artificial Sequence
  Synthetic polypeptide
GQEFKTSLTTMGSGPKGPQWHI

SEQ ID NO: 25152 - protein, 22 aa, Artificial Sequence
  Synthetic polypeptide
GQEFKTSLTTMGSGPKGPQWHI

SEQ ID NO: 25153 - protein, 22 aa, Artificial Sequence
  Synthetic polypeptide
GQEFKTSLTTMGSGPKGPQWHI

SEQ ID NO: 25154 - protein, 22 aa, Artificial Sequence
  Synthetic polypeptide
GQEFKTSLTTMGSGPKGPQWHI

SEQ ID NO: 25155 - protein, 22 aa, Artificial Sequence
  Synthetic polypeptide
GQEFKTSLTTMGSGPKGPQWHI

SEQ ID NO: 25156 - protein, 663 aa, Artificial Sequence
  Synthetic polypeptide
PPWDLAPKDRNGTSDPFVRVRYKGRTRETSIVKKSCYPRWNETFEFELQEGAMEALCVEAWDWDLVSRNDFLGKVVIDVQRLRVVQQEEGWFRLQPDQSKSRRHDEGNLGSLQLEVRLRDETVLPSSYYQPLVHLLCHEVKLGMQGPGQLIPLIEETTSTECRQDVATNLLKLFLGQGLAKDFLDLLFQLELSRTSETNTLFRSNSLASKSMESFLKVAGMQYLHGVLGPIINKVFEEKKYVELDPSKVEVKDVGCSGLHRPQTEAEVLEQSAQTLRAHLGALLSALSRSVRACPAVVRATFRQLFRRVRERFPGAQHENVPFIAVTSFLCLRFFSPAIMSPKLFHLRERHADARTSRTLLLLAKAVQNVGNMDTPASRAKEAWMEPLQPTVRQGVAQLKDFITKLVDIEEKDELDLQRTLSLQAPPVKEGPLFIHRTKGKGPLMSSSFKKLYFSLTTEALSFAKTPSSKKSALIKLANIRAAEKVEEKSFGGSHVMQVIYTDDAGRPQTAYLQCKCVNELNQWLSALRKVSINNTGLLGSYHPGVFRGDKWSCCHQKEKTGQGCDKTRSRVTLQEWNDPLDHDLEAQLIYRHLLGVEAMLWERHRELSGGAEAGTVPTSPGKVPEDSLARLLRVLQDLREAHSSSPAGSPPSEPNCLLELQT

SEQ ID NO: 25157 - protein, 663 aa, Artificial Sequence; identical to SEQ ID NO: 25156
  Synthetic polypeptide

SEQ ID NO: 25158 - protein, 663 aa, Artificial Sequence; identical to SEQ ID NO: 25156
  Synthetic polypeptide

SEQ ID NO: 25159 - protein, 617 aa, Artificial Sequence
  Synthetic polypeptide
PPWDLAPKDRNGTSDPFVRVRYKGRTRETSIVKKSCYPRWNETFEFELQEGAMEALCVEAWDWDLVSRNDFLGKVVIDVQRLRVVQQEEGWFRLQPDQSKSRRHDEGNLGSLQLEVRLRDETVLPSSYYQPLVHLLCHEVKLGMQGPGQLIPLIEETTSTECRQDVATNLLKLFLGQGLAKDFLDLLFQLELSRTSETNTLFRSNSLASKSMESFLKVAGMQYLHGVLGPIINKVFEEKKYVELDPSKVEVKDVGCSGLHRPQTEAEVLEQSAQTLRAHLGALLSALSRSVRACPAVVRATFRQLFRRVRERFPGAQHENVPFIAVTSFLCLRFFSPAIMSPKLFHLRERHADARTSRTLLLLAKAVQNVGNMDTPASRAKEAWMEPLQPTVRQGVAQLKDFITKLVDIEEKDELDLQRTLSLQAPPVKEGPLFIHRTKGKGPLMSSSFKKLYFSLTTEALSFAKTPSSKCVNELNQWLSALRKVSINNTGLLGSYHPGVFRGDKWSCCHQKEKTGQGCDKTRSRVTLQEWNDPLDHDLEAQLIYRHLLGVEAMLWERHRELSGGAEAGTVPTSPGKVPEDSLARLLRVLQDLREAHSSSPAGSPPSEPNCLLELQT

SEQ ID NO: 25160 - protein, 185 aa, Artificial Sequence
  Synthetic polypeptide
PPWDLAPKDRNGTSDPFVRVRYKGRTRETSIVKKSCYPRWNETFEFELQEGAMEALCVEAWDWDLVSRNDFLGKVVIDVQRLRVVQQEEGWFRLQPDQSKSRRHDEGNLGSLQLEVRLRDETVLPSSYYQPLVHLLCHEVKLGMQGPGQLIPLIEETTSTECRQDVATNLLKLFLGQGLAKDFLD

SEQ ID NO: 25161 - protein, 51 aa, Artificial Sequence
  Synthetic polypeptide
SQHFGRPRQVVHLRPGVQDQPDHHGIWPQRTAMAHLTPSSECATRAGHGRP

SEQ ID NO: 25162 - protein, 51 aa, Artificial Sequence; identical to SEQ ID NO: 25161
  Synthetic polypeptide

SEQ ID NO: 25163 - protein, 30 aa, Artificial Sequence
  Synthetic polypeptide
PPWDLAPKDRNGTSDPFVRVRYKGRTRETS

SEQ ID NO: 25164 - protein, 30 aa, Artificial Sequence; identical to SEQ ID NO: 25163
  Synthetic polypeptide

SEQ ID NO: 25165 - protein, 29 aa, Artificial Sequence
  Synthetic polypeptide
TREAEVAVSRDCATALQPRRACFPFAFCR

SEQ ID NO: 25166 - protein, 29 aa, Artificial Sequence
  Synthetic polypeptide
TREAEVAVSRDCATALQPRRACFPFAFCR

SEQ ID NO: 25167 - protein, 21 aa, Artificial Sequence
  Synthetic polypeptide
AEIVPLHSSLDVPASPSPSAV

SEQ ID NO: 25168 - protein, 21 aa, Artificial Sequence
  Synthetic polypeptide
AEIVPLHSSLDVPASPSPSAV

SEQ ID NO: 25169 - protein, 88 aa, Artificial Sequence; identical to SEQ ID NO: 25068
  Synthetic polypeptide

SEQ ID NO: 25170 - protein, 80 aa, Artificial Sequence; identical to SEQ ID NO: 25069
  Synthetic polypeptide

SEQ ID NO: 25171 - protein, 29 aa, Artificial Sequence
  Synthetic polypeptide
SRGRVITRSGVQDQPGKHDVPASPSPSAV

SEQ ID NO: 25172 - protein, 29 aa, Artificial Sequence
  Synthetic polypeptide
SRGRVITRSGVQDQPGKHDVPASPSPSAV

SEQ ID NO: 25173 - protein, 29 aa, Artificial Sequence
  Synthetic polypeptide
SRGRVITRSGVQDQPGKHDVPASPSPSAV

SEQ ID NO: 25174 - protein, 23 aa, Artificial Sequence
  Synthetic polypeptide
SRGQEFKTSLANMTCLLPLRLLP

SEQ ID NO: 25175 - protein, 23 aa, Artificial Sequence
  Synthetic polypeptide
SRGQEFKTSLANMTCLLPLRLLP

SEQ ID NO: 25176 - protein, 23 aa, Artificial Sequence
  Synthetic polypeptide
SRGQEFKTSLANMTCLLPLRLLP

SEQ ID NO: 25177 - protein, 23 aa, Artificial Sequence
  Synthetic polypeptide
SRGQEFKTSLANMTCLLPLRLLP

SEQ ID NO: 25178 - protein, 23 aa, Artificial Sequence
  Synthetic polypeptide
SRGQEFKTSLANMTCLLPLRLLP

SEQ ID NO: 25179 - protein, 23 aa, Artificial Sequence
  Synthetic polypeptide
SRGQEFKTSLANMTCLLPLRLLP

SEQ ID NO: 25180 - protein, 23 aa, Artificial Sequence
  Synthetic polypeptide
SRGQEFKTSLANMTCLLPLRLLP

SEQ ID NO: 25181 - protein, 23 aa, Artificial Sequence
  Synthetic polypeptide
SRGQEFKTSLANMTCLLPLRLLP

SEQ ID NO: 25182 - protein, 88 aa, Artificial Sequence; identical to SEQ ID NO: 25089
  Synthetic polypeptide

SEQ ID NO: 25183 - protein, 90 aa, Artificial Sequence; identical to SEQ ID NO: 25090
  Synthetic polypeptide

SEQ ID NO: 25184 - protein, 90 aa, Artificial Sequence; identical to SEQ ID NO: 25090
  Synthetic polypeptide

SEQ ID NO: 25185 - protein, 48 aa, Artificial Sequence; identical to SEQ ID NO: 25092
  Synthetic polypeptide

SEQ ID NO: 25186 - protein, 48 aa, Artificial Sequence; identical to SEQ ID NO: 25093
  Synthetic polypeptide

SEQ ID NO: 25187 - protein, 29 aa, Artificial Sequence
  Synthetic polypeptide
SRGRVITRSGVQDQPGKHDVPASPSPSAV

SEQ ID NO: 25188 - protein, 29 aa, Artificial Sequence
  Synthetic polypeptide
SRGRVITRSGVQDQPGKHDVPASPSPSAV

SEQ ID NO: 25189 - protein, 23 aa, Artificial Sequence
  Synthetic polypeptide
SRGQEFKTSLANMTCLLPLRLLP

SEQ ID NO: 25190 - protein, 23 aa, Artificial Sequence
  Synthetic polypeptide
SRGQEFKTSLANMTCLLPLRLLP

SEQ ID NO: 25191 - protein, 23 aa, Artificial Sequence
  Synthetic polypeptide
SRGQEFKTSLANMTCLLPLRLLP

SEQ ID NO: 25192 - protein, 88 aa, Artificial Sequence; identical to SEQ ID NO: 25089
  Synthetic polypeptide

SEQ ID NO: 25193 - protein, 62 aa, Artificial Sequence
  Synthetic polypeptide
PDQATRILRALPGRHLPRWDTSPQQCVAGPRGESTQWLNTGKEWALGVWTSKTCHYILERTD

SEQ ID NO: 25194 - protein, 62 aa, Artificial Sequence; identical to SEQ ID NO: 25193
  Synthetic polypeptide

SEQ ID NO: 25195 - protein, 62 aa, Artificial Sequence; identical to SEQ ID NO: 25193
  Synthetic polypeptide

SEQ ID NO: 25196 - protein, 62 aa, Artificial Sequence; identical to SEQ ID NO: 25193
  Synthetic polypeptide

SEQ ID NO: 25197 - protein, 62 aa, Artificial Sequence; identical to SEQ ID NO: 25193
  Synthetic polypeptide

SEQ ID NO: 25198 - protein, 38 aa, Artificial Sequence
  Synthetic polypeptide
TPGRNGHLESGHLKLVIIFWREQIKKYTGCYPSCSECS

SEQ ID NO: 25199 - protein, 38 aa, Artificial Sequence; identical to SEQ ID NO: 25198
  Synthetic polypeptide

SEQ ID NO: 25200 - protein, 38 aa, Artificial Sequence; identical to SEQ ID NO: 25198
  Synthetic polypeptide

SEQ ID NO: 25201 - protein, 38 aa, Artificial Sequence; identical to SEQ ID NO: 25198
  Synthetic polypeptide

SEQ ID NO: 25202 - protein, 38 aa, Artificial Sequence; identical to SEQ ID NO: 25198
  Synthetic polypeptide

SEQ ID NO: 25203 - protein, 458 aa, Artificial Sequence
  Synthetic polypeptide
NLSLYFGENRLRSTQAATQVVLNVPETRVTCLESGLRVASEDSGLSTCTVGLWIDAGSRYENEKNNGTAHFLEHMAFKGTKKRSQLDLELEIENMGAHLNAYTSREQTVYYAKAFSKDLPRAVEILADIIQNSTLGEAEIERERGVILREMQEVETNLQEVVFDYLHATAYQNTALGRTILGPTENIKSISRKDLVDYITTHYKGPRIVLAAAGGVSHDELLDLAKFHFGDSLCTHKGEIPALPPCKFTGSEIRVRDDKMPLAHLAIAVEAVGWAHPDTICLMVANTLIGNWDRSFGGGMNLSSKLAQLTCHGNLCHSFQSFNTSYTDTGLWGLYMVCESSTVADMLHVVQKEWMRLCTSVTESEVARARNLLKTNMLLQLDGSTPICEDIGRQMLCYNRRIPIPELEARIDAVNAETIREVCTKYIYNRSPAIAAVGPIKQLPDFKQIRSNMCWLRD

SEQ ID NO: 25204 - protein, 459 aa, Artificial Sequence
  Synthetic polypeptide
NLSLYFGENRLRSTQAATQVVLNVPETRVTCLESGLRVASEDSGLSTCTVGLWIDAGSRYENEKNNGTAHFLEHMAFKGTKKRSQLDLELEIENMGAHLNAYTSREQTVYYAKAFSKDLPRAVEILADIIQNSTLGEAEIERERGVILREMQEVETNLQEVVFDYLHATAYQNTALGRTILGPTENIKSISRKDLVDYITTHYKGPRIVLAAAGGVSHDELLDLAKFHFGDSLCTHKGEIPALPPCKFTGSEIRVRDDKMPLAHLAIAVEAVGWAHPDTICLMVANTLIGNWDRSFGGGMNLSSKLAQLTCHGNLCHSFQSFNTSYTDTGLWGLYMVCESSTVADMLHVVQKEWMRLCTSVTESEVARARNLLKTNMLLQLDGSTPICEDIGRQMLCYNRRIPIPELEARIDAVNAETIREVCTKYIYNRSPAIAAVGKPGFFSSMQKVGQVLLINSSF

SEQ ID NO: 25205 - protein, 171 aa, Artificial Sequence
  Synthetic polypeptide
NLSLYFGENRLRSTQAATQVVLNVPETRVTCLESGLRVASEDSGLSTCTVGLWIDAGSRYENEKNNGTAHFLEHMAFKGTKKRSQLDLELEIENMGAHLNAYTSREQTVYYAKAFSKDLPRAYQNTALGRTILGPTENIKSISRKDLVDYITTHYKGPRIVLAAAGDSCEG

SEQ ID NO: 25206 - protein, 91 aa, Artificial Sequence
  Synthetic polypeptide
NLSLYFGENRLRSTQAATQVVLNVPETRVTCLESGLRVASEDSGLSTCTVGLWIDAGSRYENEKNNGTAHFLEHMAFKARHQEEIPVRSGT

SEQ ID NO: 25207 - protein, 88 aa, Artificial Sequence
  Synthetic polypeptide
NLSLYFGENRLRSTQAATQVVLNVPETRVTCLESGLRVASEDSGLSTCTVGLWIDAGSRYENEKNNGTAHFLEHMAFKAKEIPVRSGT

SEQ ID NO: 25208 - protein, 29 aa, Artificial Sequence
  Synthetic polypeptide
SQPLGRWRLSLKQQLLRKPCSTRPSASAS

SEQ ID NO: 25209 - protein, 29 aa, Artificial Sequence
  Synthetic polypeptide
SQPLGRWRLSLKQQLLRKPCSTRPSASAS

SEQ ID NO: 25210 - protein, 17 aa, Artificial Sequence
  Synthetic polypeptide
PGAAVCACSPSHLGGGD

SEQ ID NO: 25211 - protein, 17 aa, Artificial Sequence
  Synthetic polypeptide
PGAAVCACSPSHLGGGD

SEQ ID NO: 25212 - protein, 173 aa, Artificial Sequence
  Synthetic polypeptide
QVQQCVPVVPATWEVEIESETAASEETLFNASQRISELERNVEELKRKAAQNSGEAEYIEKVVYTVKQSAEDVKKTLDGELDEKYKKVENLIAKKTEESADARRKAEMLQNEAKTLLAQANSKLQLLKDLERKYEDNQRYLEDKAQELARLEGEVRSLLKDISQKVAVYSTCL

SEQ ID NO: 25213 - protein, 173 aa, Artificial Sequence; identical to SEQ ID NO: 25212
  Synthetic polypeptide

SEQ ID NO: 25214 - protein, 51 aa, Artificial Sequence
  Synthetic polypeptide
PWVLGWLLWRPHHWVRRSLPPLPLPRWSRQWTPVCQELLPRSCYFTACLCL

SEQ ID NO: 25215 - protein, 51 aa, Artificial Sequence; identical to SEQ ID NO: 25214
  Synthetic polypeptide

SEQ ID NO: 25216 - protein, 911 aa, Artificial Sequence
  Synthetic polypeptide
NWKSLDLSSWPNSASNLLSNLGCLAGYYGDPIIGSGDHCRPCPCPDGPDSGRQFARSCYQDPVTLQLACVCDPGYIGSRCDDCASGYFGNPSEVGGSCQPCQCHNNIDTTDPEACDKETGRCLKCLYHTEGEHCQFCRFGYYGDALQQDCRKCVCNYLGTVQEHCNGSDCQCDKATGQCLCLPNVIGQNCDRCAPNTWQLASGTGCDPCNCNAAHSFGPSCNEFTGQCQCMPGFGGRTCSECQELFWGDPDVECRACDCDPRGIETPQCDQSTGQCVCVEGVEGPRCDKCTRGYSGVFPDCTPCHQCFALWDVIIAELTNRTHRFLEKAKALKISGVIGPYRETVDSVERKVSEIKDILAQSPAAEPLKNIGNLFEEAEKLIKDVTEMMAQVEVKLSDTTSQSNSTAKELDSLQTEAESLDNTVKELAEQLEFIKNSDIRGALDSITKYFQMSLEAEERVNASTTEPNSTVEQSALMRDRVEDVMMERESQFKEKQEEQARLLDELAGKLQSLDLSAAAEMTCGTPPGASCSETECGGPNCRTDEGERKCGGPGCGGLVTVAHNAWQKAMDLDQDVLSALAEVEQLSKMVSEAKLRADEAKQSAEDILLKTNATKEKMDKSNEELRNLIKQIRNFLTQDSADLDSIEAVANEVLKMEMPSTPQQLQNLTEDIRERVESLSQVEVILQHSAADIARAEMLLEEAKRASKSATDVKVTADMVKEALEEAEKAQVAAEKAIKQADEDIQGTQNLLTSIESETAASEETLFNASQRISELERNVEELKRKAAQNSGEAEYIEKVVYTVKQSAEDVKKTLDGELDEKYKKVENLIAKKTEESADARRKAEMLQNEAKTLLAQANSKLQLLKDLERKYEDNQRYLEDKAQELARLEGEVRSLLKDISQKVAVYSTCL

SEQ ID NO: 25217 - protein, 911 aa, Artificial Sequence; identical to SEQ ID NO: 25216
  Synthetic polypeptide

SEQ ID NO: 25218 - protein, 184 aa, Artificial Sequence
  Synthetic polypeptide
IGNPWTSVPGPILLLTCFLTLGAWLVTMATPSLGQEITAALALAQMVPTVDASLPGAATKILLLYSLPVFVILDTLVPDVTTVPQDTLAIHQKLGGRVSLASVTTTLTRQTQKPVTRRLGGVSSACTTRKGNTVSSAGLDTMVMPSSRTVESVSVITWAPCKSTVTALTASATKPLVSACVFLM

SEQ ID NO: 25219 - protein, 184 aa, Artificial Sequence; identical to SEQ ID NO: 25218
  Synthetic polypeptide

SEQ ID NO: 25220 - protein, 1006 aa, Artificial Sequence
  Synthetic polypeptide
DPGAREPRLSPSPALKTLLRNSSGCEARRDEYRTEFTTALQRVDLFMGQFSEVLLTSISTFIKGDLTIANLGTSEGRFMQVVVSRSGPSTPHVNFLLDSHPVSPEVIVEHTLNQNGYTLVITGKKITKIPLNGLGCRHFQSCSQCLSAPPFVQCGWCHDKCVRSEECLSGTWTQQICLPAIYKVFPNSAPLEGGTRLTICGWDFGFRRNNKFDLKKTRVLLGNESCTLTLSESTMNTLKCTVGPAMNKHFNMSIIISNGHGTTQYSTFSYVDPVITSISPKYGPMAGGTLLTLTGNYLNSGNSRHISIGGKTCTLKSVSNSILECYTPAQTISTEFAVKLKIDLANRETSIFSYREDPIVYEIHPTKSFISGGSTITGVGKNLNSVSVPRMVINVHEAGRNFTVACQHRSNSEIICCTTPSLQQLNLQLPLKTKAFFMLDGILSKYFDLIYVHNPVFKPFEKPVMISMGNENVLEIKGNDIDPEAVKGEVLKVGNKSCENIHLHSEAVLCTVPNDLLKLNSELNIEWKQAISSTVLGKVIVQPDQNFTGLIAGVVSISTALLLLLGFFLWLKKRKQIKDLGSELVRYDARVHTPHLDRLVSARSVSPTTEMVSNESVDYRATFPEDQFPNSSQNGSCRQVQYPLTDMSPILTSGDSDISSPLLQNTVHIDLSALNPELVQAVQHVVIGPSSLIVHFNEVIGRGHFGCVYHGTLLDNDGKKIHCAVKSLNRITDIGEVSQFLTEGIIMKDFSHPNVLSLLGICLRSEGSPLVVLPYMKHGDLRNFIRNETHNPTVKDLIGFGLQVAKGMKYLASKKFVHRDLAARNCMLDEKFTVKVADFGLARDMYDKEYYSVHNKTGAKLPVKWMALESLQTQKFTTKSDVWSFGVLLWELMTRGAPPYPDVNTFDITVYLLQGRRLLQPEYCPDPLYEVMLKCWHPKAEMRPSFSELVSRISAIFSTFIGEHYVHVNATYVNVKCVAPYPSLLSSEDNADDEVDTRPASFWETS

SEQ ID NO: 25221 - protein, 13 aa, Artificial Sequence
  Synthetic polypeptide
PCTEDTSEKFIRL

SEQ ID NO: 25222 - protein, 13 aa, Artificial Sequence
  Synthetic polypeptide
PCTEDTSEKFIRL

SEQ ID NO: 25223 - protein, 13 aa, Artificial Sequence
  Synthetic polypeptide
PCTEDTSEKFIRL

SEQ ID NO: 25224 - protein, 1024 aa, Artificial Sequence
  Synthetic polypeptide
DPGAREPRLSPSPALKTLLRNSSGCEARRDEYRTEFTTALQRVDLFMGQFSEVLLTSISTFIKGDLTIANLGTSEGRFMQVVVSRSGPSTPHVNFLLDSHPVSPEVIVEHTLNQNGYTLVITGKKITKIPLNGLGCRHFQSCSQCLSAPPFVQCGWCHDKCVRSEECLSGTWTQQICLPAIYKVFPNSAPLEGGTRLTICGWDFGFRRNNKFDLKKTRVLLGNESCTLTLSESTMNTLKCTVGPAMNKHFNMSIIISNGHGTTQYSTFSYVDPVITSISPKYGPMAGGTLLTLTGNYLNSGNSRHISIGGKTCTLKSVSNSILECYTPAQTISTEFAVKLKIDLANRETSIFSYREDPIVYEIHPTKSFISTWWKEPLNIVSFLFCFASGGSTITGVGKNLNSVSVPRMVINVHEAGRNFTVACQHRSNSEIICCTTPSLQQLNLQLPLKTKAFFMLDGILSKYFDLIYVHNPVFKPFEKPVMISMGNENVLEIKGNDIDPEAVKGEVLKVGNKSCENIHLHSEAVLCTVPNDLLKLNSELNIEWKQAISSTVLGKVIVQPDQNFTGLIAGVVSISTALLLLLGFFLWLKKRKQIKDLGSELVRYDARVHTPHLDRLVSARSVSPTTEMVSNESVDYRATFPEDQFPNSSQNGSCRQVQYPLTDMSPILTSGDSDISSPLLQNTVHIDLSALNPELVQAVQHVVIGPSSLIVHFNEVIGRGHFGCVYHGTLLDNDGKKIHCAVKSLNRITDIGEVSQFLTEGIIMKDFSHPNVLSLLGICLRSEGSPLVVLPYMKHGDLRNFIRNETHNPTVKDLIGFGLQVAKGMKYLASKKFVHRDLAARNCMLDEKFTVKVADFGLARDMYDKEYYSVHNKTGAKLPVKWMALESLQTQKFTTKSDVWSFGVLLWELMTRGAPPYPDVNTFDITVYLLQGRRLLQPEYCPDPLYEVMLKCWHPKAEMRPSFSELVSRISAIFSTFIGEHYVHVNATYVNVKCVAPYPSLLSSEDNADDEVDTRPASFWETS

SEQ ID NO: 25225 - protein, 380 aa, Artificial Sequence
  Synthetic polypeptide
DPGAREPRLSPSPALKTLLRNSSGCEARRDEYRTEFTTALQRVDLFMGQFSEVLLTSISTFIKGDLTIANLGTSEGRFMQVVVSRSGPSTPHVNFLLDSHPVSPEVIVEHTLNQNGYTLVITGKKITKIPLNGLGCRHFQSCSQCLSAPPFVQCGWCHDKCVRSEECLSGTWTQQICLPAIYKVFPNSAPLEGGTRLTICGWDFGFRRNNKFDLKKTRVLLGNESCTLTLSESTMNTLKCTVGPAMNKHFNMSIIISNGHGTTQYSTFSYVDPVITSISPKYGPMAGGTLLTLTGNYLNSGNSRHISIGGKTCTLKSVSNSILECYTPAQTISTEFAVKLKIDLANRETSIFSYREDPIVYEIHPTKSFIRHVNIALIQR

SEQ ID NO: 25226 - protein, 9 aa, Artificial Sequence
  Synthetic polypeptide
YWTSQPPEL

SEQ ID NO: 25227 - protein, 37 aa, Artificial Sequence
  Synthetic polypeptide
PLDTGLPSLQNYNDGCRAPLQWRHCQPSGHEGESDFN

SEQ ID NO: 25228 - protein, 82 aa, Artificial Sequence
  Synthetic polypeptide
VHYKRTSLAPFSLFLALFWPFCLLPWDDTAQKPSPDADPLILDFPASRTIMMVAGPLFNGGIASLLAMKEKVISTNPGNSYL

SEQ ID NO: 25229 - protein, 4 aa, Artificial Sequence
  Synthetic polypeptide
PAEL

SEQ ID NO: 25230 - protein, 46 aa, Artificial Sequence
  Synthetic polypeptide
LSKKTLVKCVPLSLGLSLQNYNDGCRAPLQWRHCQPSGHEGESDFN

SEQ ID NO: 25231 - protein, 80 aa, Artificial Sequence
  Synthetic polypeptide
KDEFPNSPLLFCNRHALLTFCLLPWDDSARRPLLNVCPSALDLACRTIMMVAGPLFNGGIASLLAMKEKVISTNPGNSYL

SEQ ID NO: 25232 - protein, 40 aa, Artificial Sequence
  Synthetic polypeptide
ESEVLDFTPPLPLFLRPQITSASLRSGKWKERFTYLSELV

SEQ ID NO: 25233 - protein, 40 aa, Artificial Sequence; identical to SEQ ID NO: 25232
  Synthetic polypeptide

SEQ ID NO: 25234 - protein, 40 aa, Artificial Sequence; identical to SEQ ID NO: 25232
  Synthetic polypeptide

SEQ ID NO: 25235 - protein, 24 aa, Artificial Sequence
  Synthetic polypeptide
DLENGKSDLLISLSLSDPSETISQ

SEQ ID NO: 25236 - protein, 24 aa, Artificial Sequence
  Synthetic polypeptide
DLENGKSDLLISLSLSDPSETISQ

SEQ ID NO: 25237 - protein, 24 aa, Artificial Sequence
  Synthetic polypeptide
DLENGKSDLLISLSLSDPSETISQ

SEQ ID NO: 25238 - protein, 92 aa, Artificial Sequence
  Synthetic polypeptide
AQWLTQIFTYRCSKEGCKKKEMLQMVCAQCHGNFCIQHRHPLDHSCRHGSRPTIKAGCSPMTVSESRPLGDFLTLAPGGLAQRLGYWFTRLM

SEQ ID NO: 25239 - protein, 60 aa, Artificial Sequence
  Synthetic polypeptide
HSGSHRFLHTVAQKRAARRKRCCRWYVPNVTATSVSSTDTLWTTAADTGVAPPSKLGAHP

SEQ ID NO: 25240 - protein, 63 aa, Artificial Sequence
  Synthetic polypeptide
TVAHTDFYIPLLKRGLQEERDAADGMCPMSRQLLYPAQTPFGPQLQTRESPHHQSWVLTHDSL

SEQ ID NO: 25241 - protein, 57 aa, Artificial Sequence
  Synthetic polypeptide
AQWLTQIFTYRCSKEGCKKKEMLQMVCAQCHGNFCIQHRHPLDHSCRHGSRPTIKAG

SEQ ID NO: 25242 - protein, 57 aa, Artificial Sequence; identical to SEQ ID NO: 25241
  Synthetic polypeptide

SEQ ID NO: 25243 - protein, 111 aa, Artificial Sequence
  Synthetic polypeptide
HSGSHRFLHTVAQKRAARRKRCCRWYVPNVTATSVSSTDTLWTTAADTGVAPPSKLGEKRLRCDGSEHAVACVEAAYTLVGSGAPLSTIPHWLLILFVEGDGTIIKLNAEV

SEQ ID NO: 25244 - protein, 69 aa, Artificial Sequence
  Synthetic polypeptide
TVAHTDFYIPLLKRGLQEERDAADGMCPMSRQLLYPAQTPFGPQLQTRESPHHQSWVRRDSAAMARSTQ

SEQ ID NO: 25245 - protein, 57 aa, Artificial Sequence
  Synthetic polypeptide
HSGSHRFLHTVAQKRAARRKRCCRWYVPNVTATSVSSTDTLWTTAADTGVAPPSKLG

SEQ ID NO: 25246 - protein, 57 aa, Artificial Sequence
  Synthetic polypeptide
TVAHTDFYIPLLKRGLQEERDAADGMCPMSRQLLYPAQTPFGPQLQTRESPHHQSWV

SEQ ID NO: 25247 - protein, 177 aa, Artificial Sequence
  Synthetic polypeptide
KSKNVSIVFLKSNFIQAKGTHTISSEIMFKCCGVVYFTDWLEMTEMDWPPDSCCVREFPGCSKQAHQEDLSDLYQEGCGKKMYSFLRGTKQLQVLRFLGISIGVTQILAMILTITLLWALYYDRREPGTDQMMSLKNDNSQHLSCPSVELLKPSLSRIFEHTSMANSFNTHFEMEEL

SEQ ID NO: 25248 - protein, 177 aa, Artificial Sequence; identical to SEQ ID NO: 25247
  Synthetic polypeptide

SEQ ID NO: 25249 - protein, 26 aa, Artificial Sequence
  Synthetic polypeptide
FFLNPILFKLKAHTPFLLRLCLSAVE

SEQ ID NO: 25250 - protein, 26 aa, Artificial Sequence
  Synthetic polypeptide
FFLNPILFKLKAHTPFLLRLCLSAVE

SEQ ID NO: 25251 - protein, 3 aa, Artificial Sequence
  Synthetic polypeptide
DYV

SEQ ID NO: 25252 - protein, 3 aa, Artificial Sequence
  Synthetic polypeptide
DYV

SEQ ID NO: 25253 - protein, 35 aa, Artificial Sequence
  Synthetic polypeptide
SQEIETILANMIGLMDTTDNRENLLKRLAGPIQEH

SEQ ID NO: 25254 - protein, 35 aa, Artificial Sequence; identical to SEQ ID NO: 25253
  Synthetic polypeptide

SEQ ID NO: 25255 - protein, 2302 aa, Artificial Sequence
  Synthetic polypeptide
DHPGQHDWANGYYRQQRKLVEEIGWSYTGALNQKNWGKKYPTCNSPKQSPINIDEDLTQVNVNLKKLKFQGWDKTSLENTFIHNTGKTVEINLTNDYRVSGGVSEMVFKASKITFHWGKCNMSSDGSEHSLEGQKFPLEMQIYCFDADRFSSFEEAVKGKGKLRALSILFEVGTEENLDFKAIIDGVESVSRFGKQAALDPFILLNLLPNSTDKYYIYNGSLTSPPCTDTVDWIVFKDTVSISESQLAVFCEVLTMQQSGYVMLMDYLQNNFREQQYKFSRQVFSSYTGKEEIHEAVCSSEPENVQADPENYTSLLVTWERPRVVYDTMIEKFAVLYQQLDGEDQTKHEFLTDGYQDLGAILNNLLPNMSYVLQIVAICTNGLYGKYSDQLIVDMPTDNPELDLFPELIGTEEIIKEEEEGKDIEEGAIVNPGRDSATNQIRKKEPQISTTTHYNRIGTKYNEAKTNRSPTRGSEFSGKGDVPNTSLNSTSQPVTKLATEKDISLTSQTVTELPPHTVEGTSASLNDGSKTVLRSPHMNLSGTAESLNTVSITEYEEESLLTSFKLDTGAEDSSGSSPATSAIPFISENISQGYIFSSENPETITYDVLIPESARNASEDSTSSGSEESLKDPSMEGNVWFPSSTDITAQPDVGSGRESFLQTNYTEIRVDESEKTTKSFSAGPVMSQGPSVTDLEMPHYSTFAYFPTEVTPHAFTPSSRQQDLVSTVNVVYSQTTQPVYNGETPLQPSYSSEVFPLVTPLLLDNQILNTTPAASSSDSALHATPVFPSVDVSFESILSSYDGAPLLPFSSASFSSELFRHLHTVSQILPQVTSATESDKVPLHASLPVAGGDLLLEPSLAQYSDVLSTTHAASETLEFGSESGVLYKTLMFSQVEPPSSDAMMHARSSGPEPSYALSDNEGSQHIFTVSYSSAIPVHDSVGVTYQGSLFSGPSHIPIPKSSLITPTASLLQPTHALSGDGEWSGASSDSEFLLPDTDGLTALNISSPVSVAEFTYTTSVFGDDNKALSKSEIIYGNETELQIPSFNEMVYPSESTVMPNMYDNVNKLNASLQETSVSISSTKGMFPGSLAHTTTKVFDHEISQVPENNFSVQPTHTVSQASGDTSLKPVLSANSEPASSDPASSEMLSPSTQLLFYETSASFSTEVLLQPSFQASDVDTLLKTVLPAVPSDPILVETPKVDKISSTMLHLIVSNSASSENMLHSTSVPVFDVSPTSHMHSASLQGLTISYASEKYEPVLLKSESSHQVVPSLYSNDELFQTANLEINQAHPPKGRHVFATPVLSIDEPLNTLINKLIHSDEILTSTKSSVTGKVFAGIPTVASDTFVSTDHSVPIGNGHVAITAVSPHRDGSVTSTKLLFPSKATSELSHSAKSDAGLVGGGEDGDTDDDGDDDDDDRGSDGLSIHKCMSCSSYRESQEKVMNDSDTHENSLMDQNNPISYSLSENSEEDNRVTSVSSDSQTGMDRSPGKSPSANGLSQKHNDGKEENDIQTGSALLPLSPESKAWAVLTSDEESGSGQGTSDSLNENETSTDFSFADTNEKDADGILAAGDSEITPGFPQSPTSSVTSENSEVFHVSEAEASNSSHESRIGLAEGLESEKKAVIPLVIVSALTFICLVVLVGILIYWRKCFQTAHFYLEDSTSPRVISTPPTPIFPISDDVGAIPIKHFPKHVADLHASSGFTEEFETLKEFYQEVQSCTVDLGITADSSNHPDNKHKNRYINIVAYDHSRVKLAQLAEKDGKLTDYINANYVDGYNRPKAYIAAQGPLKSTAEDFWRMIWEHNVEVIVMITNLVEKGRRKCDQYWPADGSEEYGNFLVTQKSVQVLAYYTVRNFTLRNTKIKKGSQKGRPSGRVVTQYHYTQWPDMGVPEYSLPVLTFVRKAAYAKRHAVGPVVVHCSAGVGRTGTYIVLDSMLQQIQHEGTVNIFGFLKHIRSQRNYLVQTEEQYVFIHDTLVEAILSKETEVLDSHIHAYVNALLIPGPAGKTKLEKQFQLLSQSNIQQSDYSAALKQCNREKNRTSSIIPVERSRVGISSLSGEGTDYINASYIMGYYQSNEFIITQHPLLHTIKDFWRMIWDHNAQLVVMIPDGQNMAEDEFVYWPNKDEPINCESFKVTLMAEEHKCLSNEEKLIIQDFILEATQDDYVLEVRHFQCPKWPNPDSPISKTFELISVIKEEAANRDGPMIVHDEHGGVTAGTFCALTTLMHQLEKENSVDVYQVAKMINLMRPGVFADIEQYQFLYKVILSLVSTRQEENPSTSLDSNGAALPDGNIAESLESLV

SEQ ID NO: 25256 - protein, 1435 aa, Artificial Sequence
  Synthetic polypeptide
DHPGQHDWANGYYRQQRKLVEEIGWSYTGALNQKNWGKKYPTCNSPKQSPINIDEDLTQVNVNLKKLKFQGWDKTSLENTFIHNTGKTVEINLTNDYRVSGGVSEMVFKASKITFHWGKCNMSSDGSEHSLEGQKFPLEMQIYCFDADRFSSFEEAVKGKGKLRALSILFEVGTEENLDFKAIIDGVESVSRFGKQAALDPFILLNLLPNSTDKYYIYNGSLTSPPCTDTVDWIVFKDTVSISESQLAVFCEVLTMQQSGYVMLMDYLQNNFREQQYKFSRQVFSSYTGKEEIHEAVCSSEPENVQADPENYTSLLVTWERPRVVYDTMIEKFAVLYQQLDGEDQTKHEFLTDGYQDLGAILNNLLPNMSYVLQIVAICTNGLYGKYSDQLIVDMPTDNPELDLFPELIGTEEIIKEEEEGKDIEEGAIVNPGRDSATNQIRKKEPQISTTTHYNRIGTKYNEAKTNRSPTRGSEFSGKGDVPNTSLNSTSQPVTKLATEKDISLTSQTVTELPPHTVEGTSASLNDGSKTVLRSPHMNLSGTAESLNTVSITEYEEESLLTSFKLDTGAEDSSGSSPATSAIPFISENISQGYIFSSENPETITYDVLIPESARNASEDSTSSGSEESLKDPSMEGNVWFPSSTDITAQPDVGSGRESFLQTNYTEIRVDESEKTTKSFSAGPVMSQGPSVTDLEMPHYSTFAYFPTEVTPHAFTPSSRQQDLVSTVNVVYSQTTQPVYNEASNSSHESRIGLAEGLESEKKAVIPLVIVSALTFICLVVLVGILIYWRKCFQTAHFYLEDSTSPRVISTPPTPIFPISDDVGAIPIKHFPKHVADLHASSGFTEEFEEVQSCTVDLGITADSSNHPDNKHKNRYINIVAYDHSRVKLAQLAEKDGKLTDYINANYVDGYNRPKAYIAAQGPLKSTAEDFWRMIWEHNVEVIVMITNLVEKGRRKCDQYWPADGSEEYGNFLVTQKSVQVLAYYTVRNFTLRNTKIKKGSQKGRPSGRVVTQYHYTQWPDMGVPEYSLPVLTFVRKAAYAKRHAVGPVVVHCSAGVGRTGTYIVLDSMLQQIQHEGTVNIFGFLKHIRSQRNYLVQTEEQYVFIHDTLVEAILSKETEVLDSHIHAYVNALLIPGPAGKTKLEKQFQLLSQSNIQQSDYSAALKQCNREKNRTSSIIPVERSRVGISSLSGEGTDYINASYIMGYYQSNEFIITQHPLLHTIKDFWRMIWDHNAQLVVMIPDGQNMAEDEFVYWPNKDEPINCESFKVTLMAEEHKCLSNEEKLIIQDFILEATQDDYVLEVRHFQCPKWPNPDSPISKTFELISVIKEEAANRDGPMIVHDEHGGVTAGTFCALTTLMHQLEKENSVDVYQVAKMINLMRPGVFADIEQYQFLYKVILSLVSTRQEENPSTSLDSNGAALPDGNIAESLESLV

SEQ ID NO: 25257 - protein, 30 aa, Artificial Sequence
  Synthetic polypeptide
MENNQDVYQSRKSEQIKAHLDCGVLCRWEH

SEQ ID NO: 25258 - protein, 30 aa, Artificial Sequence; identical to SEQ ID NO: 25257
  Synthetic polypeptide

SEQ ID NO: 25259 - protein, 42 aa, Artificial Sequence
  Synthetic polypeptide
WKTIKMFIRAGRVNKLRHISTVEYSADGSTESKKLGKEISNM

SEQ ID NO: 25260 - protein, 42 aa, Artificial Sequence; identical to SEQ ID NO: 25259
  Synthetic polypeptide

SEQ ID NO: 25261 - protein, 2285 aa, Artificial Sequence
  Synthetic polypeptide
GTSRLWSTLQMGALNQKNWGKKYPTCNSPKQSPINIDEDLTQVNVNLKKLKFQGWDKTSLENTFIHNTGKTVEINLTNDYRVSGGVSEMVFKASKITFHWGKCNMSSDGSEHSLEGQKFPLEMQIYCFDADRFSSFEEAVKGKGKLRALSILFEVGTEENLDFKAIIDGVESVSRFGKQAALDPFILLNLLPNSTDKYYIYNGSLTSPPCTDTVDWIVFKDTVSISESQLAVFCEVLTMQQSGYVMLMDYLQNNFREQQYKFSRQVFSSYTGKEEIHEAVCSSEPENVQADPENYTSLLVTWERPRVVYDTMIEKFAVLYQQLDGEDQTKHEFLTDGYQDLGAILNNLLPNMSYVLQIVAICTNGLYGKYSDQLIVDMPTDNPELDLFPELIGTEEIIKEEEEGKDIEEGAIVNPGRDSATNQIRKKEPQISTTTHYNRIGTKYNEAKTNRSPTRGSEFSGKGDVPNTSLNSTSQPVTKLATEKDISLTSQTVTELPPHTVEGTSASLNDGSKTVLRSPHMNLSGTAESLNTVSITEYEEESLLTSFKLDTGAEDSSGSSPATSAIPFISENISQGYIFSSENPETITYDVLIPESARNASEDSTSSGSEESLKDPSMEGNVWFPSSTDITAQPDVGSGRESFLQTNYTEIRVDESEKTTKSFSAGPVMSQGPSVTDLEMPHYSTFAYFPTEVTPHAFTPSSRQQDLVSTVNVVYSQTTQPVYNGETPLQPSYSSEVFPLVTPLLLDNQILNTTPAASSSDSALHATPVFPSVDVSFESILSSYDGAPLLPFSSASFSSELFRHLHTVSQILPQVTSATESDKVPLHASLPVAGGDLLLEPSLAQYSDVLSTTHAASETLEFGSESGVLYKTLMFSQVEPPSSDAMMHARSSGPEPSYALSDNEGSQHIFTVSYSSAIPVHDSVGVTYQGSLFSGPSHIPIPKSSLITPTASLLQPTHALSGDGEWSGASSDSEFLLPDTDGLTALNISSPVSVAEFTYTTSVFGDDNKALSKSEIIYGNETELQIPSFNEMVYPSESTVMPNMYDNVNKLNASLQETSVSISSTKGMFPGSLAHTTTKVFDHEISQVPENNFSVQPTHTVSQASGDTSLKPVLSANSEPASSDPASSEMLSPSTQLLFYETSASFSTEVLLQPSFQASDVDTLLKTVLPAVPSDPILVETPKVDKISSTMLHLIVSNSASSENMLHSTSVPVFDVSPTSHMHSASLQGLTISYASEKYEPVLLKSESSHQVVPSLYSNDELFQTANLEINQAHPPKGRHVFATPVLSIDEPLNTLINKLIHSDEILTSTKSSVTGKVFAGIPTVASDTFVSTDHSVPIGNGHVAITAVSPHRDGSVTSTKLLFPSKATSELSHSAKSDAGLVGGGEDGDTDDDGDDDDDDRGSDGLSIHKCMSCSSYRESQEKVMNDSDTHENSLMDQNNPISYSLSENSEEDNRVTSVSSDSQTGMDRSPGKSPSANGLSQKHNDGKEENDIQTGSALLPLSPESKAWAVLTSDEESGSGQGTSDSLNENETSTDFSFADTNEKDADGILAAGDSEITPGFPQSPTSSVTSENSEVFHVSEAEASNSSHESRIGLAEGLESEKKAVIPLVIVSALTFICLVVLVGILIYWRKCFQTAHFYLEDSTSPRVISTPPTPIFPISDDVGAIPIKHFPKHVADLHASSGFTEEFETLKEFYQEVQSCTVDLGITADSSNHPDNKHKNRYINIVAYDHSRVKLAQLAEKDGKLTDYINANYVDGYNRPKAYIAAQGPLKSTAEDFWRMIWEHNVEVIVMITNLVEKGRRKCDQYWPADGSEEYGNFLVTQKSVQVLAYYTVRNFTLRNTKIKKGSQKGRPSGRVVTQYHYTQWPDMGVPEYSLPVLTFVRKAAYAKRHAVGPVVVHCSAGVGRTGTYIVLDSMLQQIQHEGTVNIFGFLKHIRSQRNYLVQTEEQYVFIHDTLVEAILSKETEVLDSHIHAYVNALLIPGPAGKTKLEKQFQLLSQSNIQQSDYSAALKQCNREKNRTSSIIPVERSRVGISSLSGEGTDYINASYIMGYYQSNEFIITQHPLLHTIKDFWRMIWDHNAQLVVMIPDGQNMAEDEFVYWPNKDEPINCESFKVTLMAEEHKCLSNEEKLIIQDFILEATQDDYVLEVRHFQCPKWPNPDSPISKTFELISVIKEEAANRDGPMIVHDEHGGVTAGTFCALTTLMHQLEKENSVDVYQVAKMINLMRPGVFADIEQYQFLYKVILSLVSTRQEENPSTSLDSNGAALPDGNIAESLESLV

SEQ ID NO: 25262 - protein, 1418 aa, Artificial Sequence
  Synthetic polypeptide
GTSRLWSTLQMGALNQKNWGKKYPTCNSPKQSPINIDEDLTQVNVNLKKLKFQGWDKTSLENTFIHNTGKTVEINLTNDYRVSGGVSEMVFKASKITFHWGKCNMSSDGSEHSLEGQKFPLEMQIYCFDADRFSSFEEAVKGKGKLRALSILFEVGTEENLDFKAIIDGVESVSRFGKQAALDPFILLNLLPNSTDKYYIYNGSLTSPPCTDTVDWIVFKDTVSISESQLAVFCEVLTMQQSGYVMLMDYLQNNFREQQYKFSRQVFSSYTGKEEIHEAVCSSEPENVQADPENYTSLLVTWERPRVVYDTMIEKFAVLYQQLDGEDQTKHEFLTDGYQDLGAILNNLLPNMSYVLQIVAICTNGLYGKYSDQLIVDMPTDNPELDLFPELIGTEEIIKEEEEGKDIEEGAIVNPGRDSATNQIRKKEPQISTTTHYNRIGTKYNEAKTNRSPTRGSEFSGKGDVPNTSLNSTSQPVTKLATEKDISLTSQTVTELPPHTVEGTSASLNDGSKTVLRSPHMNLSGTAESLNTVSITEYEEESLLTSFKLDTGAEDSSGSSPATSAIPFISENISQGYIFSSENPETITYDVLIPESARNASEDSTSSGSEESLKDPSMEGNVWFPSSTDITAQPDVGSGRESFLQTNYTEIRVDESEKTTKSFSAGPVMSQGPSVTDLEMPHYSTFAYFPTEVTPHAFTPSSRQQDLVSTVNVVYSQTTQPVYNEASNSSHESRIGLAEGLESEKKAVIPLVIVSALTFICLVVLVGILIYWRKCFQTAHFYLEDSTSPRVISTPPTPIFPISDDVGAIPIKHFPKHVADLHASSGFTEEFEEVQSCTVDLGITADSSNHPDNKHKNRYINIVAYDHSRVKLAQLAEKDGKLTDYINANYVDGYNRPKAYIAAQGPLKSTAEDFWRMIWEHNVEVIVMITNLVEKGRRKCDQYWPADGSEEYGNFLVTQKSVQVLAYYTVRNFTLRNTKIKKGSQKGRPSGRVVTQYHYTQWPDMGVPEYSLPVLTFVRKAAYAKRHAVGPVVVHCSAGVGRTGTYIVLDSMLQQIQHEGTVNIFGFLKHIRSQRNYLVQTEEQYVFIHDTLVEAILSKETEVLDSHIHAYVNALLIPGPAGKTKLEKQFQLLSQSNIQQSDYSAALKQCNREKNRTSSIIPVERSRVGISSLSGEGTDYINASYIMGYYQSNEFIITQHPLLHTIKDFWRMIWDHNAQLVVMIPDGQNMAEDEFVYWPNKDEPINCESFKVTLMAEEHKCLSNEEKLIIQDFILEATQDDYVLEVRHFQCPKWPNPDSPISKTFELISVIKEEAANRDGPMIVHDEHGGVTAGTFCALTTLMHQLEKENSVDVYQVAKMINLMRPGVFADIEQYQFLYKVILSLVSTRQEENPSTSLDSNGAALPDGNIAESLESLV

SEQ ID NO: 25263 - protein, 32 aa, Artificial Sequence
  Synthetic polypeptide
WKTIKMFIRAGRVNKLRHISTVEYSADGYEEH

SEQ ID NO: 25264 - protein, 32 aa, Artificial Sequence; identical to SEQ ID NO: 25263
  Synthetic polypeptide

SEQ ID NO: 25265 - protein, 28 aa, Artificial Sequence
  Synthetic polypeptide
GTSRLWSTLQMGMRSTESKKLGKEISNM

SEQ ID NO: 25266 - protein, 28 aa, Artificial Sequence
  Synthetic polypeptide
GTSRLWSTLQMGMRSTESKKLGKEISNM

SEQ ID NO: 25267 - protein, 2178 aa, Artificial Sequence
  Synthetic polypeptide
RRWHAPVVPTTPEAEMQIYCFDADRFSSFEEAVKGKGKLRALSILFEVGTEENLDFKAIIDGVESVSRFGKQAALDPFILLNLLPNSTDKYYIYNGSLTSPPCTDTVDWIVFKDTVSISESQLAVFCEVLTMQQSGYVMLMDYLQNNFREQQYKFSRQVFSSYTGKEEIHEAVCSSEPENVQADPENYTSLLVTWERPRVVYDTMIEKFAVLYQQLDGEDQTKHEFLTDGYQDLGAILNNLLPNMSYVLQIVAICTNGLYGKYSDQLIVDMPTDNPELDLFPELIGTEEIIKEEEEGKDIEEGAIVNPGRDSATNQIRKKEPQISTTTHYNRIGTKYNEAKTNRSPTRGSEFSGKGDVPNTSLNSTSQPVTKLATEKDISLTSQTVTELPPHTVEGTSASLNDGSKTVLRSPHMNLSGTAESLNTVSITEYEEESLLTSFKLDTGAEDSSGSSPATSAIPFISENISQGYIFSSENPETITYDVLIPESARNASEDSTSSGSEESLKDPSMEGNVWFPSSTDITAQPDVGSGRESFLQTNYTEIRVDESEKTTKSFSAGPVMSQGPSVTDLEMPHYSTFAYFPTEVTPHAFTPSSRQQDLVSTVNVVYSQTTQPVYNGETPLQPSYSSEVFPLVTPLLLDNQILNTTPAASSSDSALHATPVFPSVDVSFESILSSYDGAPLLPFSSASFSSELFRHLHTVSQILPQVTSATESDKVPLHASLPVAGGDLLLEPSLAQYSDVLSTTHAASETLEFGSESGVLYKTLMFSQVEPPSSDAMMHARSSGPEPSYALSDNEGSQHIFTVSYSSAIPVHDSVGVTYQGSLFSGPSHIPIPKSSLITPTASLLQPTHALSGDGEWSGASSDSEFLLPDTDGLTALNISSPVSVAEFTYTTSVFGDDNKALSKSEIIYGNETELQIPSFNEMVYPSESTVMPNMYDNVNKLNASLQETSVSISSTKGMFPGSLAHTTTKVFDHEISQVPENNFSVQPTHTVSQASGDTSLKPVLSANSEPASSDPASSEMLSPSTQLLFYETSASFSTEVLLQPSFQASDVDTLLKTVLPAVPSDPILVETPKVDKISSTMLHLIVSNSASSENMLHSTSVPVFDVSPTSHMHSASLQGLTISYASEKYEPVLLKSESSHQVVPSLYSNDELFQTANLEINQAHPPKGRHVFATPVLSIDEPLNTLINKLIHSDEILTSTKSSVTGKVFAGIPTVASDTFVSTDHSVPIGNGHVAITAVSPHRDGSVTSTKLLFPSKATSELSHSAKSDAGLVGGGEDGDTDDDGDDDDDDRGSDGLSIHKCMSCSSYRESQEKVMNDSDTHENSLMDQNNPISYSLSENSEEDNRVTSVSSDSQTGMDRSPGKSPSANGLSQKHNDGKEENDIQTGSALLPLSPESKAWAVLTSDEESGSGQGTSDSLNENETSTDFSFADTNEKDADGILAAGDSEITPGFPQSPTSSVTSENSEVFHVSEAEASNSSHESRIGLAEGLESEKKAVIPLVIVSALTFICLVVLVGILIYWRKCFQTAHFYLEDSTSPRVISTPPTPIFPISDDVGAIPIKHFPKHVADLHASSGFTEEFETLKEFYQEVQSCTVDLGITADSSNHPDNKHKNRYINIVAYDHSRVKLAQLAEKDGKLTDYINANYVDGYNRPKAYIAAQGPLKSTAEDFWRMIWEHNVEVIVMITNLVEKGRRKCDQYWPADGSEEYGNFLVTQKSVQVLAYYTVRNFTLRNTKIKKGSQKGRPSGRVVTQYHYTQWPDMGVPEYSLPVLTFVRKAAYAKRHAVGPVVVHCSAGVGRTGTYIVLDSMLQQIQHEGTVNIFGFLKHIRSQRNYLVQTEEQYVFIHDTLVEAILSKETEVLDSHIHAYVNALLIPGPAGKTKLEKQFQLLSQSNIQQSDYSAALKQCNREKNRTSSIIPVERSRVGISSLSGEGTDYINASYIMGYYQSNEFIITQHPLLHTIKDFWRMIWDHNAQLVVMIPDGQNMAEDEFVYWPNKDEPINCESFKVTLMAEEHKCLSNEEKLIIQDFILEATQDDYVLEVRHFQCPKWPNPDSPISKTFELISVIKEEAANRDGPMIVHDEHGGVTAGTFCALTTLMHQLEKENSVDVYQVAKMINLMRPGVFADIEQYQFLYKVILSLVSTRQEENPSTSLDSNGAALPDGNIAESLESLV

SEQ ID NO: 25268 - protein, 43 aa, Artificial Sequence
  Synthetic polypeptide
EKIAEDGGMHLLSQLLQRLRCKSTALMRTDFQVLRKQSKEKGS

SEQ ID NO: 25269 - protein, 43 aa, Artificial Sequence; identical to SEQ ID NO: 25268
  Synthetic polypeptide

SEQ ID NO: 25270 - protein, 1311 aa, Artificial Sequence
  Synthetic polypeptide
RRWHAPVVPTTPEAEMQIYCFDADRFSSFEEAVKGKGKLRALSILFEVGTEENLDFKAIIDGVESVSRFGKQAALDPFILLNLLPNSTDKYYIYNGSLTSPPCTDTVDWIVFKDTVSISESQLAVFCEVLTMQQSGYVMLMDYLQNNFREQQYKFSRQVFSSYTGKEEIHEAVCSSEPENVQADPENYTSLLVTWERPRVVYDTMIEKFAVLYQQLDGEDQTKHEFLTDGYQDLGAILNNLLPNMSYVLQIVAICTNGLYGKYSDQLIVDMPTDNPELDLFPELIGTEEIIKEEEEGKDIEEGAIVNPGRDSATNQIRKKEPQISTTTHYNRIGTKYNEAKTNRSPTRGSEFSGKGDVPNTSLNSTSQPVTKLATEKDISLTSQTVTELPPHTVEGTSASLNDGSKTVLRSPHMNLSGTAESLNTVSITEYEEESLLTSFKLDTGAEDSSGSSPATSAIPFISENISQGYIFSSENPETITYDVLIPESARNASEDSTSSGSEESLKDPSMEGNVWFPSSTDITAQPDVGSGRESFLQTNYTEIRVDESEKTTKSFSAGPVMSQGPSVTDLEMPHYSTFAYFPTEVTPHAFTPSSRQQDLVSTVNVVYSQTTQPVYNEASNSSHESRIGLAEGLESEKKAVIPLVIVSALTFICLVVLVGILIYWRKCFQTAHFYLEDSTSPRVISTPPTPIFPISDDVGAIPIKHFPKHVADLHASSGFTEEFEEVQSCTVDLGITADSSNHPDNKHKNRYINIVAYDHSRVKLAQLAEKDGKLTDYINANYVDGYNRPKAYIAAQGPLKSTAEDFWRMIWEHNVEVIVMITNLVEKGRRKCDQYWPADGSEEYGNFLVTQKSVQVLAYYTVRNFTLRNTKIKKGSQKGRPSGRVVTQYHYTQWPDMGVPEYSLPVLTFVRKAAYAKRHAVGPVVVHCSAGVGRTGTYIVLDSMLQQIQHEGTVNIFGFLKHIRSQRNYLVQTEEQYVFIHDTLVEAILSKETEVLDSHIHAYVNALLIPGPAGKTKLEKQFQLLSQSNIQQSDYSAALKQCNREKNRTSSIIPVERSRVGISSLSGEGTDYINASYIMGYYQSNEFIITQHPLLHTIKDFWRMIWDHNAQLVVMIPDGQNMAEDEFVYWPNKDEPINCESFKVTLMAEEHKCLSNEEKLIIQDFILEATQDDYVLEVRHFQCPKWPNPDSPISKTFELISVIKEEAANRDGPMIVHDEHGGVTAGTFCALTTLMHQLEKENSVDVYQVAKMINLMRPGVFADIEQYQFLYKVILSLVSTRQEENPSTSLDSNGAALPDGNIAESLESLV

SEQ ID NO: 25271 - protein, 50 aa, Artificial Sequence
  Synthetic polypeptide
ENPDLFPSSARHLLYGLGHVNYPPRTWFLLFTIWEMLPDCTLLLRGQYIP

SEQ ID NO: 25272 - protein, 50 aa, Artificial Sequence; identical to SEQ ID NO: 25271
  Synthetic polypeptide

SEQ ID NO: 25273 - protein, 694 aa, Artificial Sequence
  Synthetic polypeptide
KTEQIQSEKIQISFLVLPGICYMALGMSITHLGLGFSCLPFGKCFQTAHFYLEDSTSPRVISTPPTPIFPISDDVGAIPIKHFPKHVADLHASSGFTEEFETLKEFYQEVQSCTVDLGITADSSNHPDNKHKNRYINIVAYDHSRVKLAQLAEKDGKLTDYINANYVDGYNRPKAYIAAQGPLKSTAEDFWRMIWEHNVEVIVMITNLVEKGRRKCDQYWPADGSEEYGNFLVTQKSVQVLAYYTVRNFTLRNTKIKKGSQKGRPSGRVVTQYHYTQWPDMGVPEYSLPVLTFVRKAAYAKRHAVGPVVVHCSAGVGRTGTYIVLDSMLQQIQHEGTVNIFGFLKHIRSQRNYLVQTEEQYVFIHDTLVEAILSKETEVLDSHIHAYVNALLIPGPAGKTKLEKQFQLLSQSNIQQSDYSAALKQCNREKNRTSSIIPVERSRVGISSLSGEGTDYINASYIMGYYQSNEFIITQHPLLHTIKDFWRMIWDHNAQLVVMIPDGQNMAEDEFVYWPNKDEPINCESFKVTLMAEEHKCLSNEEKLIIQDFILEATQDDYVLEVRHFQCPKWPNPDSPISKTFELISVIKEEAANRDGPMIVHDEHGGVTAGTFCALTTLMHQLEKENSVDVYQVAKMINLMRPGVFADIEQYQFLYKVILSLVSTRQEENPSTSLDSNGAALPDGNIAESLESLV

SEQ ID NO: 25274 - protein, 19 aa, Artificial Sequence
  Synthetic polypeptide
DLVSPVYHLGNASRLHTFT

SEQ ID NO: 25275 - protein, 19 aa, Artificial Sequence
  Synthetic polypeptide
DLVSPVYHLGNASRLHTFT

SEQ ID NO: 25276 - protein, 687 aa, Artificial Sequence
  Synthetic polypeptide
KTEQIQSEKIQISFLVLPGICYMALGMSITHLGLGFSCLPFGKCFQTAHFYLEDSTSPRVISTPPTPIFPISDDVGAIPIKHFPKHVADLHASSGFTEEFEEVQSCTVDLGITADSSNHPDNKHKNRYINIVAYDHSRVKLAQLAEKDGKLTDYINANYVDGYNRPKAYIAAQGPLKSTAEDFWRMIWEHNVEVIVMITNLVEKGRRKCDQYWPADGSEEYGNFLVTQKSVQVLAYYTVRNFTLRNTKIKKGSQKGRPSGRVVTQYHYTQWPDMGVPEYSLPVLTFVRKAAYAKRHAVGPVVVHCSAGVGRTGTYIVLDSMLQQIQHEGTVNIFGFLKHIRSQRNYLVQTEEQYVFIHDTLVEAILSKETEVLDSHIHAYVNALLIPGPAGKTKLEKQFQLLSQSNIQQSDYSAALKQCNREKNRTSSIIPVERSRVGISSLSGEGTDYINASYIMGYYQSNEFIITQHPLLHTIKDFWRMIWDHNAQLVVMIPDGQNMAEDEFVYWPNKDEPINCESFKVTLMAEEHKCLSNEEKLIIQDFILEATQDDYVLEVRHFQCPKWPNPDSPISKTFELISVIKEEAANRDGPMIVHDEHGGVTAGTFCALTTLMHQLEKENSVDVYQVAKMINLMRPGVFADIEQYQFLYKVILSLVSTRQEENPSTSLDSNGAALPDGNIAESLESLV

SEQ ID NO: 25277 - protein, 113 aa, Artificial Sequence
  Synthetic polypeptide
VLVLPVSGMCEMSLKMYIQTTTLTVSMSLSASVSLGMLYMPKVYIIIFHPEQNVQKRKRSFKAVVTAATMQSKLIQKGNDRPNGEVKSELCESLETNTSSTKTTYISYSNHSI

SEQ ID NO: 25278 - protein, 113 aa, Artificial Sequence; identical to SEQ ID NO: 25277
  Synthetic polypeptide

SEQ ID NO: 25279 - protein, 24 aa, Artificial Sequence
  Synthetic polypeptide
FYLCQECVKCHLRCTSRQQHLLSP

SEQ ID NO: 25280 - protein, 24 aa, Artificial Sequence
  Synthetic polypeptide
FYLCQECVKCHLRCTSRQQHLLSP

SEQ ID NO: 25281 - protein, 24 aa, Artificial Sequence
  Synthetic polypeptide
FYLCQECVKCHLRCTSRQQHLLSP

SEQ ID NO: 25282 - protein, 24 aa, Artificial Sequence
  Synthetic polypeptide
FYLCQECVKCHLRCTSRQQHLLSP

SEQ ID NO: 25283 - protein, 113 aa, Artificial Sequence
  Synthetic polypeptide
VLVLPVSGMCEMSLKMYIQTTTLTVSMSLSASVSLGMLYMPKVYIIIFHPEQNVQKRKRSFKAVVTAATMQSKLIQKGNDRPNGEVKSELCESLETNSKSSVEFPMVKSGSTS

SEQ ID NO: 25284 - protein, 113 aa, Artificial Sequence; identical to SEQ ID NO: 25283
  Synthetic polypeptide

SEQ ID NO: 25285 - protein, 29 aa, Artificial Sequence
  Synthetic polypeptide
HQLGSIIQLAGAASTGHMTTASNLHSHLS

SEQ ID NO: 25286 - protein, 29 aa, Artificial Sequence
  Synthetic polypeptide
HQLGSIIQLAGAASTGHMTTASNLHSHLS

SEQ ID NO: 25287 - protein, 29 aa, Artificial Sequence
  Synthetic polypeptide
HQLGSIIQLAGAASTGHMTTASNLHSHLS

SEQ ID NO: 25288 - protein, 75 aa, Artificial Sequence
  Synthetic polypeptide
SLESRSLTPAGQHNPASGSSIDWAYDNGIKFAFTFELRDTGTYGFLLPANQIIPTAEETWLGLKTIMEHVRDNLY

SEQ ID NO: 25289 - protein, 75 aa, Artificial Sequence; identical to SEQ ID NO: 25288
  Synthetic polypeptide

SEQ ID NO: 25290 - protein, 75 aa, Artificial Sequence; identical to SEQ ID NO: 25288
  Synthetic polypeptide

SEQ ID NO: 25291 - protein, 8 aa, Artificial Sequence
  Synthetic polypeptide
MFSLGDCG

SEQ ID NO: 25292 - protein, 8 aa, Artificial Sequence
  Synthetic polypeptide
MFSLGDCG

SEQ ID NO: 25293 - protein, 96 aa, Artificial Sequence
  Synthetic polypeptide
GTVDEGVVGPGGAAGRAPACCVPAHPTPSALPCPSLMEVFRQVFHLQGTAYLLPRLCGCGWKSRDSCAFTRFSNIQLRLVQDLGRSDLEVSSGDCP

SEQ ID NO: 25294 - protein, 96 aa, Artificial Sequence; identical to SEQ ID NO: 25293
  Synthetic polypeptide

SEQ ID NO: 25295 - protein, 333 aa, Artificial Sequence
  Synthetic polypeptide
VFLRGLWMREWWVQVGLLAVPLLAAYLHIPPPQLSPALHSWKSSGKFFTYKGLRIFYQDSVGVVGSPEIVVLLHGFPTSSYDWYKIWEGLTLRFHRVIALDFLGFGFSDKPRPHHYSIFEQASIVEALLRHLGLQNRRINLLSHDYGDIVAQELLYRYKQNRSGRLTIKSLCLSNGGIFPETHRPLLLQKLLKDGGVLSPILTRLMNFFVFSRGLTPVFGPYTRPSESELWDMWAGIRNNDGNLVIDSLLQYINQRKKFRRRWVGALASVTIPIHFIYGPLDPVNPYPEFLELYRKTLPRSTVSILDDHISHYPQLEDPMGFLNAYMGFINSF

SEQ ID NO: 25296 - protein, 294 aa, Artificial Sequence
  Synthetic polypeptide
VFLRGLWMREWWVQVGLLAVPLLAAYLHIPPPQLSPALHSWKSSGKFFTYKGLRIFYQDSVGVVGSPEIVVLLHGFPTSSYDWYKIWEGLTLRFHRVIALDFLGFGFSDKPRPHHYSIFEQASIVEALLRHLGLQNRRINLLSHDYGDIVAQELLYRYKQNRSGRLTIKSLCLSNGGIFPETHRPLLLQKLLKDGGVLSPILTRLMNFFVFSRGLTPVFGPYTRPSESELWDMWAGIRNNDGNLVIDSLLQYINQRKKFRRRWVGALASVTIPRKRCRGPQCRFWMTTLATIHS

SEQ ID NO: 25297 - protein, 27 aa, Artificial Sequence
  Synthetic polypeptide
FPKHAALSLRCFAKAVPSGWNVLCLSG

SEQ ID NO: 25298 - protein, 27 aa, Artificial Sequence
  Synthetic polypeptide
FPKHAALSLRCFAKAVPSGWNVLCLSG

SEQ ID NO: 25299 - protein, 112 aa, Artificial Sequence
  Synthetic polypeptide
ASGALRKPSPPAGMFFVSLDEGVVGPGGAAGRAPACCVPAHPTPSALPCPSLMEVFRQVFHLQGTAYLLPRLCGCGWKSRDSCAFTRFSNIQLRLVQDLGRSDLEVSSGDCP

SEQ ID NO: 25300 - protein, 112 aa, Artificial Sequence; identical to SEQ ID NO: 25299
  Synthetic polypeptide

SEQ ID NO: 25301 - protein, 352 aa, Artificial Sequence
  Synthetic polypeptide
PQTRGPEPPVLCESRPLRLECSLSLWMREWWVQVGLLAVPLLAAYLHIPPPQLSPALHSWKSSGKFFTYKGLRIFYQDSVGVVGSPEIVVLLHGFPTSSYDWYKIWEGLTLRFHRVIALDFLGFGFSDKPRPHHYSIFEQASIVEALLRHLGLQNRRINLLSHDYGDIVAQELLYRYKQNRSGRLTIKSLCLSNGGIFPETHRPLLLQKLLKDGGVLSPILTRLMNFFVFSRGLTPVFGPYTRPSESELWDMWAGIRNNDGNLVIDSLLQYINQRKKFRRRWVGALASVTIPIHFIYGPLDPVNPYPEFLELYRKTLPRSTVSILDDHISHYPQLEDPMGFLNAYMGFINSF

SEQ ID NO: 25302 - protein, 313 aa, Artificial Sequence
  Synthetic polypeptide
PQTRGPEPPVLCESRPLRLECSLSLWMREWWVQVGLLAVPLLAAYLHIPPPQLSPALHSWKSSGKFFTYKGLRIFYQDSVGVVGSPEIVVLLHGFPTSSYDWYKIWEGLTLRFHRVIALDFLGFGFSDKPRPHHYSIFEQASIVEALLRHLGLQNRRINLLSHDYGDIVAQELLYRYKQNRSGRLTIKSLCLSNGGIFPETHRPLLLQKLLKDGGVLSPILTRLMNFFVFSRGLTPVFGPYTRPSESELWDMWAGIRNNDGNLVIDSLLQYINQRKKFRRRWVGALASVTIPRKRCRGPQCRFWMTTLATIHS

SEQ ID NO: 25303 - protein, 278 aa, Artificial Sequence
  Synthetic polypeptide
LTPVIPALWKAENEHEVGEAIQEKIQEKAVKREDLFIVSKLWPTFFERPLVRKAFEKTLKDLKLSYLDVYLIHWPQGFKSGDDLFPKDDKGNAIGGKATFLDAWEAMEELVDEGLVKALGVSNFSHFQIEKLLNKPGLKYKPVTNQVECHPYLTQEKLIQYCHSKGITVTAYSPLGSPDRPWAKPEDPSLLEDPKIKEIAAKHKKTAAQVLIRFHIQRNVIVIPKSVTPARIVENIQVFDFKLSDEEMATILSFNRNWRACNVLQSSHLEDYPFNAEY

SEQ ID NO: 25304 - protein, 25 aa, Artificial Sequence
  Synthetic polypeptide
SQHFGRPRMNMKWGKPSKRRSKRRL

SEQ ID NO: 25305 - protein, 17 aa, Artificial Sequence
  Synthetic polypeptide
PGTVAHTCNPSTLEGRE

SEQ ID NO: 25306 - protein, 296 aa, Artificial Sequence
  Synthetic polypeptide
GQSPLGKVKEAVKVAIDAGYRHIDCAYVYQNEHEVGEAIQEKIQEKAVKREDLFIVSKLWPTFFERPLVRKAFEKTLKDLKLSYLDVYLIHWPQGFKSGDDLFPKDDKGNAIGGKATFLDAWEAMEELVDEGLVKALGVSNFSHFQIEKLLNKPGLKYKPVTNQVECHPYLTQEKLIQYCHSKGITVTAYSPLGSPDRPWAKPEDPSLLEDPKIKEIAAKHKKTAAQVLIRFHIQRNVIVIPKSVTPARIVENIQVFDFKLSDEEMATILSFNRNWRACNVLQSSHLEDYPFNAEY

SEQ ID NO: 25307 - protein, 7 aa, Artificial Sequence
  Synthetic polypeptide
ASLLLAK

SEQ ID NO: 25308 - protein, 15 aa, Artificial Sequence
  Synthetic polypeptide
PVSSWQSERSSEGGH

SEQ ID NO: 25309 - protein, 13 aa, Artificial Sequence
  Synthetic polypeptide
PGGILENVVAHFL

SEQ ID NO: 25310 - protein, 240 aa, Artificial Sequence
  Synthetic polypeptide
KMLWPTFFERPLVRKAFEKTLKDLKLSYLDVYLIHWPQGFKSGDDLFPKDDKGNAIGGKATFLDAWEAMEELVDEGLVKALGVSNFSHFQIEKLLNKPGLKYKPVTNQVECHPYLTQEKLIQYCHSKGITVTAYSPLGSPDRPWAKPEDPSLLEDPKIKEIAAKHKKTAAQVLIRFHIQRNVIVIPKSVTPARIVENIQVFDFKLSDEEMATILSFNRNWRACNVLQSSHLEDYPFNAEY

SEQ ID NO: 25311 - protein, 17 aa, Artificial Sequence
  Synthetic polypeptide
RGNFRKCCGPLSLRDPL

SEQ ID NO: 25312 - protein, 10 aa, Artificial Sequence
  Synthetic polypeptide
PGGILENVWG

SEQ ID NO: 25313 - protein, 201 aa, Artificial Sequence
  Synthetic polypeptide
KMSGDDLFPKDDKGNAIGGKATFLDAWEAMEELVDEGLVKALGVSNFSHFQIEKLLNKPGLKYKPVTNQVECHPYLTQEKLIQYCHSKGITVTAYSPLGSPDRPWAKPEDPSLLEDPKIKEIAAKHKKTAAQVLIRFHIQRNVIVIPKSVTPARIVENIQVFDFKLSDEEMATILSFNRNWRACNVLQSSHLEDYPFNAEY

SEQ ID NO: 25314 - protein, 43 aa, Artificial Sequence
  Synthetic polypeptide
RGNFRKCLGMTFSPKMIKVMPSVEKQRSWMPGRPWRSWWMRGW

SEQ ID NO: 25315 - protein, 360 aa, Artificial Sequence
  Synthetic polypeptide
WKPQRDSPPGEDLTHSGLPQTDSWLTGPPEDVPGLHRPLSSGGERIDCRCAQPNSTPESSVSSPGKSLLGKVKEAVKVAIDAEYRHIDCAYFYENQHEVGEAIQEKIQEKAVMREDLFIVSKVWPTFFERPLVRKAFEKTLKDLKLSYLDVYLIHWPQGFKTGDDFFPKDDKGNMISGKGTFLDAWEAMEELVDEGLVKALGVSNFNHFQIERLLNKPGLKYKPVTNQVECHPYLTQEKLIQYCHSKGITVTAYSPLGSPDRPWAKPEDPSLLEDPKIKEIAAKHKKTTAQVLIRFHIQRNVTVIPKSMTPAHIVENIQVFDFKLSDEEMATILSFNRNWRAFDFKEFSHLEDFPFDAEY

SEQ ID NO: 25316 - protein, 360 aa, Artificial Sequence; identical to SEQ ID NO: 25315
  Synthetic polypeptide

SEQ ID NO: 25317 - protein, 58 aa, Artificial Sequence
  Synthetic polypeptide
LIPGFPRQTAGLQGHLKTFQGSTGHCLLEGNGSTAGAPSQIQLLSPQSLVPGSLFSAK

SEQ ID NO: 25318 - protein, 58 aa, Artificial Sequence; identical to SEQ ID NO: 25317
  Synthetic polypeptide

SEQ ID NO: 25319 - protein, 17 aa, Artificial Sequence
  Synthetic polypeptide
SREVSSRQSERSGEGGH

SEQ ID NO: 25320 - protein, 17 aa, Artificial Sequence
  Synthetic polypeptide
SREVSSRQSERSGEGGH

SEQ ID NO: 25321 - protein, 237 aa, Artificial Sequence
  Synthetic polypeptide
AALACPVEHPCGGLQPAGATRILRALPGRHLPRWDASPEPCVAGPRGGSTQWLNTGKELALGTWSPDVSNSAQQYQQQRRKFAAAFLAFIFILAAVDTAEAGKKEKPEKKVKKSDCGEWQWSVCVPTSGDCGLGTREGTRTGAECKQTMKTQRCKIPCNWKKQFGAECKYQFQAWGECDLNTALKTRTGSLKRALHNAECQKTVTISKPCGKLTKPKPQAESKKKKKEGKKQEKMLD

SEQ ID NO: 25322 - protein, 57 aa, Artificial Sequence
  Synthetic polypeptide
TPGRNWHLALGVRTSQTRLNSTSSSVENLQLPSWHSFSYWQLWILLKQGRKRNQKKK

SEQ ID NO: 25323 - protein, 57 aa, Artificial Sequence; identical to SEQ ID NO: 25322
  Synthetic polypeptide

SEQ ID NO: 25324 - protein, 70 aa, Artificial Sequence
  Synthetic polypeptide
AFAPVGCLARAVCGRPPWRINAVAEHREGTGTWHLESGRLKLGSTVPAAASKICSCLLGIHFHTGSCGYC

SEQ ID NO: 25325 - protein, 70 aa, Artificial Sequence; identical to SEQ ID NO: 25324
  Synthetic polypeptide

SEQ ID NO: 25326 - protein, 235 aa, Artificial Sequence
  Synthetic polypeptide
AALACPVEHPCGGLQPAGATRILRALPGRHLPRWDASPEPCVAGPRGGSTQWLNTGKELALGTWSPDVSNSAQQYQQQRRKFAAAFLAFIFILAAVDTAEAGKKEKPEKKVKKSDCGEWQWSVCVPTSGDCGLGTREGTRTGAECKQTMKTQRCKIPCNWKKQFGAECKYQFQAWGECDLNTALKTRTGSLKRALHNAECQKTVTISKPCGKLTKPKPQEKGKWRHRSGESLRRW

SEQ ID NO: 25327 - protein, 37 aa, Artificial Sequence
  Synthetic polypeptide
FLGSLTGKRGSTVPAAASKICSCLLGIHFHTGSCGYC

SEQ ID NO: 25328 - protein, 37 aa, Artificial Sequence; identical to SEQ ID NO: 25327
  Synthetic polypeptide

SEQ ID NO: 25329 - protein, 170 aa, Artificial Sequence
  Synthetic polypeptide
PASEAQQYQQQRRKFAAAFLAFIFILAAVDTAEAGKKEKPEKKVKKSDCGEWQWSVCVPTSGDCGLGTREGTRTGAECKQTMKTQRCKIPCNWKKQFGAECKYQFQAWGECDLNTALKTRTGSLKRALHNAECQKTVTISKPCGKLTKPKPQAESKKKKKEGKKQEKMLD

SEQ ID NO: 25330 - protein, 48 aa, Artificial Sequence
  Synthetic polypeptide
SWFPDRQARLNSTSSSVENLQLPSWHSFSYWQLWILLKQGRKRNQKKK

SEQ ID NO: 25331 - protein, 48 aa, Artificial Sequence; identical to SEQ ID NO: 25330
  Synthetic polypeptide

SEQ ID NO: 25332 - protein, 168 aa, Artificial Sequence
  Synthetic polypeptide
PASEAQQYQQQRRKFAAAFLAFIFILAAVDTAEAGKKEKPEKKVKKSDCGEWQWSVCVPTSGDCGLGTREGTRTGAECKQTMKTQRCKIPCNWKKQFGAECKYQFQAWGECDLNTALKTRTGSLKRALHNAECQKTVTISKPCGKLTKPKPQEKGKWRHRSGESLRRW

SEQ ID NO: 25333 - protein, 16 aa, Artificial Sequence
  Synthetic polypeptide
VRSDGLGAPALLRTSG

SEQ ID NO: 25334 - protein, 16 aa, Artificial Sequence
  Synthetic polypeptide
VRSDGLGAPALLRTSG

SEQ ID NO: 25335 - protein, 16 aa, Artificial Sequence
  Synthetic polypeptide
VRSDGLGAPALLRTSG

SEQ ID NO: 25336 - protein, 489 aa, Artificial Sequence
  Synthetic polypeptide
EPQHFSELLDEFSQNVLGQLLNDPFLSEKSVSMEVEPSPTSPAPLIQAEHSYSLCEEPRAQSPFTHITTSDSFNDDEVESEKWYLSTDFPSTSIKTEPVTDEPPPGLVPSVTLTITAISTPLEKEEPPLEMNTGVDSSCQTIIPKIKLEPHEVDQFLNFSPKEAPVDHLHLPPTPPSSHGSDSEGSLSPNPRLHPFSLPQTHSPSRAAPRAPSALSSSPLLTAPHKLQGSGPLVLTEEEKRTLIAEGYPIPTKLPLSKSEEKALKKIRRKIKNKISAQESRRKKKEYMDSLEKKVESCSTENLELRKKVEVLENTNRTLLQQLQKLQTLVMGKVSRTCKLAGTQTGTCLMVVVLCFAVAFGSFFQGYGPYPSATKMALPSQHSLQEPYTASVVRSRNLLIYEEHSPPEESSSPGSAGELGGWDRGSSLLRVSGLESRPDVDLPHFIISNETSLEKSVLLELQQHLVSAKLEGNETLKVVELDRRVNTTF

SEQ ID NO: 25337 - protein, 56 aa, Artificial Sequence
  Synthetic polypeptide
MLPRVWSVESQRYLGADEKCRISGLLRPVSQKRRLRSPSTSQNFWMSFPRTSWVSS

SEQ ID NO: 25338 - protein, 56 aa, Artificial Sequence; identical to SEQ ID NO: 25337
  Synthetic polypeptide

SEQ ID NO: 25339 - protein, 56 aa, Artificial Sequence; identical to SEQ ID NO: 25337
  Synthetic polypeptide

SEQ ID NO: 25340 - protein, 429 aa, Artificial Sequence
  Synthetic polypeptide
EPQHFSELLDEFSQNVLGQLLNDPFLSEKSVSMEVEPSPTSPAPLIQAEHSYSLCEEPRAQSPFTHITTSDSFNDDEVESEKWYLSTDFPSTSIKTEPVTDEPPPGLVPSVTLTITAISTPLEKEEPPLEMNTGVDSSCQTIIPKIKLEPHEVDQFLNFSPKEAPVDHLHLPPTPPSSHGSDSEGSLSPNPRLHPFSLPQTHSPSRAAPRAPSALSSSPLLTAPHKLQGSGPLVLTEEEKRTLIAEGYPIPTKLPLSKSEEKALKKIRRKIKNKISAQESRRKKKEYMDSLEKKVESCSTENLELRKKVEVLENTNRTLLQQLQKLQTLVMGKVSRTCKLAGTQTGTCLMVVVLCFAVAFGSFFQGYGPYPSATKMALPSQHSLQEPYTASVGKTACGKLGRVLFYFPRAGFLSLPKGIFCESPMFKKW

SEQ ID NO: 25341 - protein, 217 aa, Artificial Sequence
  Synthetic polypeptide
EPQHFSELLDEFSQNVLGQLLNDPFLSEKSVSMEVEPSPTSPAPLIQAEHSYSLCEEPRAQSPFTHITTSDSFNDDEVESEKWYLSTDFPSTSIKTEPVTDEPPPGLVPSVTLTITAISTPLEKEEPPLEMNTGVDSSCQTIIPKIKLEPHEVDQFLNFSPKEGLSALPVSLWVMDMVSGSTEREYGERAGMSLYHRCCSWLYEIALFLKNKNFASK

SEQ ID NO: 25342 - protein, 396 aa, Artificial Sequence
  Synthetic polypeptide
GKEHWAETQETWFLAPAVPLIVTLGDTTRQRIKFSDDRVCKSHLLNCCPHDVLSGTRMDLGECLKVHDLALRADYEIASKEQDFFFELDAMDHLQSFIADCDRRTEVAKKRLAETQEEISAEVAAKAERVHELNEEIGKLLAKVEQLGAEGNVEESQKVMDEVEKARAKKREAEEVYRNSMPASSFQQQKLRVCEVCSAYLGLHDNDRRLADHFGGKLHLGFIEIREKLEELKRVVAEKQEKRNQERLKRREEREREEREKLRRSRSHSKNPKRSRSREHRRHRSRSMSRERKRRTRSKSREKRHRHRSRSSSRSRSRSHQRSRHSSRDRSRERSKRRSSKERFRDQDLASCDRDRSSRDRSPRDRDRKDKKRSYESANGRSEDRRSSEEREAGEI

SEQ ID NO: 25343 - protein, 396 aa, Artificial Sequence; identical to SEQ ID NO: 25342
  Synthetic polypeptide

SEQ ID NO: 25344 - protein, 396 aa, Artificial Sequence; identical to SEQ ID NO: 25342
  Synthetic polypeptide

SEQ ID NO: 25345 - protein, 396 aa, Artificial Sequence; identical to SEQ ID NO: 25342
  Synthetic polypeptide

SEQ ID NO: 25346 - protein, 41 aa, Artificial Sequence
  Synthetic polypeptide
PWEIQLVNESNSVMTEYARVTFSTVVLMMSFLELEWILENV

SEQ ID NO: 25347 - protein, 41 aa, Artificial Sequence; identical to SEQ ID NO: 25346
  Synthetic polypeptide

SEQ ID NO: 25348 - protein, 41 aa, Artificial Sequence; identical to SEQ ID NO: 25346
  Synthetic polypeptide

SEQ ID NO: 25349 - protein, 41 aa, Artificial Sequence; identical to SEQ ID NO: 25346
  Synthetic polypeptide

SEQ ID NO: 25350 - protein, 41 aa, Artificial Sequence; identical to SEQ ID NO: 25346
  Synthetic polypeptide

SEQ ID NO: 25351 - protein, 28 aa, Artificial Sequence
  Synthetic polypeptide
DSGDLVSSPSCTSNCNLGRYNSSTNQIQ

SEQ ID NO: 25352 - protein, 28 aa, Artificial Sequence
  Synthetic polypeptide
DSGDLVSSPSCTSNCNLGRYNSSTNQIQ

SEQ ID NO: 25353 - protein, 28 aa, Artificial Sequence
  Synthetic polypeptide
DSGDLVSSPSCTSNCNLGRYNSSTNQIQ

SEQ ID NO: 25354 - protein, 28 aa, Artificial Sequence
  Synthetic polypeptide
DSGDLVSSPSCTSNCNLGRYNSSTNQIQ

SEQ ID NO: 25355 - protein, 28 aa, Artificial Sequence
  Synthetic polypeptide
DSGDLVSSPSCTSNCNLGRYNSSTNQIQ

SEQ ID NO: 25356 - protein, 64 aa, Artificial Sequence
  Synthetic polypeptide
GKEHWAETQETWFLAPAVPLIVTLGDTTRQRIKFSDDRVCKSHLLNCCPHDVLSGTRMDLGECL

SEQ ID NO: 25357 - protein, 38 aa, Artificial Sequence
  Synthetic polypeptide
PWGSESCQSLWISFFCKVWPHMCKFSPLTPFNQVPSVV

SEQ ID NO: 25358 - protein, 38 aa, Artificial Sequence; identical to SEQ ID NO: 25357
  Synthetic polypeptide

SEQ ID NO: 25359 - protein, 38 aa, Artificial Sequence; identical to SEQ ID NO: 25357
  Synthetic polypeptide

SEQ ID NO: 25360 - protein, 54 aa, Artificial Sequence
  Synthetic polypeptide
GHTDMCLNSGPLILRAHDLGGANPASLSGSLSSVRYGLTCASFLPSHPSIKCLL

SEQ ID NO: 25361 - protein, 54 aa, Artificial Sequence; identical to SEQ ID NO: 25360
  Synthetic polypeptide

SEQ ID NO: 25362 - protein, 54 aa, Artificial Sequence; identical to SEQ ID NO: 25360
  Synthetic polypeptide

SEQ ID NO: 25363 - protein, 28 aa, Artificial Sequence
  Synthetic polypeptide
MQQKTADSHGRQLRTARCWGSASPQALC

SEQ ID NO: 25364 - protein, 28 aa, Artificial Sequence
  Synthetic polypeptide
MQQKTADSHGRQLRTARCWGSASPQALC

SEQ ID NO: 25365 - protein, 28 aa, Artificial Sequence
  Synthetic polypeptide
MQQKTADSHGRQLRTARCWGSASPQALC

SEQ ID NO: 25366 - protein, 28 aa, Artificial Sequence
  Synthetic polypeptide
MQQKTADSHGRQLRTARCWGSASPQALC

SEQ ID NO: 25367 - protein, 28 aa, Artificial Sequence
  Synthetic polypeptide
MQQKTADSHGRQLRTARCWGSASPQALC

SEQ ID NO: 25368 - protein, 28 aa, Artificial Sequence
  Synthetic polypeptide
MQQKTADSHGRQLRTARCWGSASPQALC

SEQ ID NO: 25369 - protein, 28 aa, Artificial Sequence
  Synthetic polypeptide
MQQKTADSHGRQLRTARCWGSASPQALC

SEQ ID NO: 25370 - protein, 28 aa, Artificial Sequence
  Synthetic polypeptide
MQQKTADSHGRQLRTARCWGSASPQALC

SEQ ID NO: 25371 - protein, 28 aa, Artificial Sequence
  Synthetic polypeptide
MQQKTADSHGRQLRTARCWGSASPQALC

SEQ ID NO: 25372 - protein, 37 aa, Artificial Sequence
  Synthetic polypeptide
CSKKQQIHTGGSSGLRGAGAAHPRRRCARDGRGCPAP

SEQ ID NO: 25373 - protein, 37 aa, Artificial Sequence; identical to SEQ ID NO: 25372
  Synthetic polypeptide

SEQ ID NO: 25374 - protein, 37 aa, Artificial Sequence; identical to SEQ ID NO: 25372
  Synthetic polypeptide

SEQ ID NO: 25375 - protein, 37 aa, Artificial Sequence; identical to SEQ ID NO: 25372
  Synthetic polypeptide

SEQ ID NO: 25376 - protein, 37 aa, Artificial Sequence; identical to SEQ ID NO: 25372
  Synthetic polypeptide

SEQ ID NO: 25377 - protein, 37 aa, Artificial Sequence; identical to SEQ ID NO: 25372
  Synthetic polypeptide

SEQ ID NO: 25378 - protein, 37 aa, Artificial Sequence; identical to SEQ ID NO: 25372
  Synthetic polypeptide

SEQ ID NO: 25379 - protein, 37 aa, Artificial Sequence; identical to SEQ ID NO: 25372
  Synthetic polypeptide

SEQ ID NO: 25380 - protein, 37 aa, Artificial Sequence; identical to SEQ ID NO: 25372
  Synthetic polypeptide

SEQ ID NO: 25381 - protein, 130 aa, Artificial Sequence
  Synthetic polypeptide
AAKNSRFTREAAQDCEVLGQRIPAGAVLEMAVGALHHDPEHWPSPETFNPERFTAEARQQHRPFTYLPFGAGPRSCLGVRLGLLEVKLTLLHVLHKFRFQACPETQVPLQLESKSALGPKNGVYIKIVSR

SEQ ID NO: 25382 - protein, 130 aa, Artificial Sequence; identical to SEQ ID NO: 25381
  Synthetic polypeptide

SEQ ID NO: 25383 - protein, 130 aa, Artificial Sequence; identical to SEQ ID NO: 25381
  Synthetic polypeptide

SEQ ID NO: 25384 - protein, 130 aa, Artificial Sequence; identical to SEQ ID NO: 25381
  Synthetic polypeptide

SEQ ID NO: 25385 - protein, 130 aa, Artificial Sequence; identical to SEQ ID NO: 25381
  Synthetic polypeptide

SEQ ID NO: 25386 - protein, 130 aa, Artificial Sequence; identical to SEQ ID NO: 25381
  Synthetic polypeptide

SEQ ID NO: 25387 - protein, 130 aa, Artificial Sequence; identical to SEQ ID NO: 25381
  Synthetic polypeptide

SEQ ID NO: 25388 - protein, 56 aa, Artificial Sequence
  Synthetic polypeptide
AAKNSRFTREAAQDCEVLGQRIPAGAVLEMAVGALHHDPEHWPSPETFNPERYRCS

SEQ ID NO: 25389 - protein, 56 aa, Artificial Sequence; identical to SEQ ID NO: 25388
  Synthetic polypeptide

SEQ ID NO: 25390 - protein, 101 aa, Artificial Sequence
  Synthetic polypeptide
AAKQKDLSDQLLEVVGLEGAMEMGQIYTGLKSAGRRLAQCSCVVIRTSKSLPMQIDGEPWMQTPCTIKITHKNQAPMLMGPPPKTGLFCSLVKRTRNRSKE

SEQ ID NO: 25391 - protein, 101 aa, Artificial Sequence; identical to SEQ ID NO: 25390
  Synthetic polypeptide

SEQ ID NO: 25392 - protein, 101 aa, Artificial Sequence; identical to SEQ ID NO: 25390
  Synthetic polypeptide

SEQ ID NO: 25393 - protein, 101 aa, Artificial Sequence; identical to SEQ ID NO: 25390
  Synthetic polypeptide

SEQ ID NO: 25394 - protein, 101 aa, Artificial Sequence; identical to SEQ ID NO: 25390
  Synthetic polypeptide

SEQ ID NO: 25395 - protein, 101 aa, Artificial Sequence; identical to SEQ ID NO: 25390
  Synthetic polypeptide

SEQ ID NO: 25396 - protein, 55 aa, Artificial Sequence
  Synthetic polypeptide
QTQSESPGPESLTHRNCELINVCCFELLNKKISVTSCWRWSAWKEPWRWGKYTQA

SEQ ID NO: 25397 - protein, 55 aa, Artificial Sequence; identical to SEQ ID NO: 25396
  Synthetic polypeptide

SEQ ID NO: 25398 - protein, 55 aa, Artificial Sequence; identical to SEQ ID NO: 25396
  Synthetic polypeptide

SEQ ID NO: 25399 - protein, 55 aa, Artificial Sequence; identical to SEQ ID NO: 25396
  Synthetic polypeptide

SEQ ID NO: 25400 - protein, 55 aa, Artificial Sequence; identical to SEQ ID NO: 25396
  Synthetic polypeptide

SEQ ID NO: 25401 - protein, 55 aa, Artificial Sequence; identical to SEQ ID NO: 25396
  Synthetic polypeptide

SEQ ID NO: 25402 - protein, 55 aa, Artificial Sequence; identical to SEQ ID NO: 25396
  Synthetic polypeptide

SEQ ID NO: 25403 - protein, 5 aa, Artificial Sequence
  Synthetic polypeptide
TKRSQ

SEQ ID NO: 25404 - protein, 5 aa, Artificial Sequence
  Synthetic polypeptide
TKRSQ

SEQ ID NO: 25405 - protein, 5 aa, Artificial Sequence
  Synthetic polypeptide
TKRSQ

SEQ ID NO: 25406 - protein, 5 aa, Artificial Sequence
  Synthetic polypeptide
TKRSQ

SEQ ID NO: 25407 - protein, 5 aa, Artificial Sequence
  Synthetic polypeptide
TKRSQ

SEQ ID NO: 25408 - protein, 5 aa, Artificial Sequence
  Synthetic polypeptide
TKRSQ

SEQ ID NO: 25409 - protein, 5 aa, Artificial Sequence
  Synthetic polypeptide
TKRSQ

SEQ ID NO: 25410 - protein, 70 aa, Artificial Sequence
  Synthetic polypeptide
AAKQKDLSDQLLEVVGLEGAMEMGQIYTGLKSAGRRLAQCSCVVIRTSKSLPMQIDGEPWMQTPCTVSTE

SEQ ID NO: 25411 - protein, 102 aa, Artificial Sequence
  Synthetic polypeptide
PWSQASPRLSFKSPTSWLCVLSQEALKSLQERRREQELLEQYVSTVNDRSDIVDSLDEDRLREQEEDQMLRDMIEKLGLQRKKSKFRLSKIWSPKSKSSPSQ

SEQ ID NO: 25412 - protein, 102 aa, Artificial Sequence; identical to SEQ ID NO: 25411
  Synthetic polypeptide

SEQ ID NO: 25413 - protein, 16 aa, Artificial Sequence
  Synthetic polypeptide
VSNLPPPGCVSSAKRL

SEQ ID NO: 25414 - protein, 16 aa, Artificial Sequence
  Synthetic polypeptide
VSNLPPPGCVSSAKRL

SEQ ID NO: 25415 - protein, 49 aa, Artificial Sequence
  Synthetic polypeptide
MEPGEPTFEFQISHLLAVCPQPRGSEVTAGAAAGAGAAGAVREHRERPQ

SEQ ID NO: 25416 - protein, 49 aa, Artificial Sequence; identical to SEQ ID NO: 25415
  Synthetic polypeptide

SEQ ID NO: 25417 - protein, 40 aa, Artificial Sequence
  Synthetic polypeptide
GHRWAFFKSLLRNCCQGQRSLPARLDASTRSHACVDQREL

SEQ ID NO: 25418 - protein, 503 aa, Artificial Sequence
  Synthetic polypeptide
FLENEATDGHFLKAFSEIVAKVREVSQPDWTPPPEVTLVLTKENFDEVVNDADIILVEFYAPWCGHCKKLAPEYEKAAKELSKRSPPIPLAKVDATAETDLAKRFDVSGYPTLKIFRKGRPYDYNGPREKYGIVDYMIEQSGPPSKEILTLKQVQEFLKDGDDVIIIGVFKGESDPAYQQYQDAANNLREDYKFHHTFSTEIAKFLKVSQGQLVVMQPEKFQSKYEPRSHMMDVQGSTQDSAIKDFVLKYALPLVGHRKVSNDAKRYTRRPLVVVYYSVDFSFDYRAATQFWRSKVLEVAKDFPEYTFAIADEEDYAGEVKDLGLSESGEDVNAAILDESGKKFAMEPEEFDSDTLREFVTAFKKGKLKPVIKSQPVPKNNKGPVKVVVGKTFDSIVMDPKKDVLIEFYAPWCGHCKQLEPVYNSLAKKYKGQKGLVIAKMDATANDVPSDRYKVEGFPTIYFAPSGDKKNPVKFEGGDRDLEHLSKFIEEHATKLSRTKEEL

SEQ ID NO: 25419 - protein, 27 aa, Artificial Sequence
  Synthetic polypeptide
KPSQKLLPRSEKSPSPTGRLHQKSRLC

SEQ ID NO: 25420 - protein, 27 aa, Artificial Sequence
  Synthetic polypeptide
RPSRSPFPCLWNKDWHCGLTSRERPRS

SEQ ID NO: 25421 - protein, 27 aa, Artificial Sequence
  Synthetic polypeptide
RPSRSPFPCLWNKDWHCGLTSRERPRS

SEQ ID NO: 25422 - protein, 18 aa, Artificial Sequence
  Synthetic polypeptide
ALLALRFLACGIRTGIAD

SEQ ID NO: 25423 - protein, 18 aa, Artificial Sequence
  Synthetic polypeptide
ALLALRFLACGIRTGIAD

SEQ ID NO: 25424 - protein, 18 aa, Artificial Sequence
  Synthetic polypeptide
ALLALRFLACGIRTGIAD

SEQ ID NO: 25425 - protein, 184 aa, Artificial Sequence
  Synthetic polypeptide
RPSRSPFPCLWNKDWHCGLTSRERPRSDLQRSPFRLSWLLFRWWRRRWNPRLPGYRAWRDACGQPRRSWLTARRWLWSSGTSWRALVNGGASLVCGSQVGLVSSEWLCQKGLVYDRNAGQLERPQAFCPGSSKRKGQVGGASRAHRRPLWHTCAQVRHAGPCLLRPVSLGLRRHGVPWGASQRL
